United States Patent Application Publication US 2008/0114160 A1 - sequence listing, part 72

SEQ ID NO: 26586 - DNA, 6433 bp, Oryza sativa
tgggtagtcgagtgtctgcttggcccattgccctctgataattaacttgtggagttctttggactttggcctgagttcctcaaagcaaagtgcctcattttcattccttgcagagataagcaagctggaaagaagctgcatgtttgacaaggtagcaaaaagctttgcacaatcactataacttatgttgtcaatccatacacgtcttaatttcaacaatttactcaggtgctcagccaagtccttgctggcttgcatggtctcaagagtttgtagttcctccatattggacagatttttgggtgcttgcattcctacgaaatactggaacgtcgactgtgtttcatcagcatatctatcggctatcaggtgccgtagcttcttgaccttagcgattccttttggtagcttctctattttggtttgcttgatgtctaaagtgtggagattagacagcttttcaactgattgtgggagtgtcttgaccttggtgctccgcaagccgatgtaacgtaagttgaacaaattccctatggattctggcacttcagtgatttctgagtcttgaagctcgagaactgtaagatagtttgattctgacaaaattgaggacagcatataagtggagggtgacattgctctcaatgatactagggttcgcagacgtggaaatttaagttttagtacatcattgttttcccatccacaagatgacagacggcgaacatccctttccatttctatcattgtgccataatcatttgaaagccaaatttctcctcttttgctatagaagtgccaggtcgcgcacaagatcatgcatcttacagctactagccctgcctagctcatcattttccacaacatccagcatattcctttggattagttccctaagatatctgtcagccacctcctctggtgtgctatgttgttttcgcactgcaaagctttctgcaacccacagccagatgagggtatctcgtgaaaacagatgatcttcagggaataggctacaatacaagaaacaatttctaagatgtccaggtaagtcacggtagcttagatttagaattgctcgtatatgatcattgttcactagctcgtctccaagttgcttgtacatttcattccaaatataactctctagtttcactgaagaaaacaagccaccaatagatacgattgcaagtggcaggccttcgcacctgtccactatattgtgagccaacttctcaagatcctgtgggcacttgctgtgcatgctgttatagaaggtctttttgcagaagagatcaaatgcatcattgtgctccaatggtttgagtttgagacggtgtgttgggtatgcaagagttgccacatcgtcctgtcttgttgtgatgattatgcgacttgtttggcagcttaggaacgcatcctctatcagagtgtatgcttcccggttccaaacgtcatccaatacaaccagaaattttctatcctttagcctttcctttattatatttttcaagtcacgagggtccaaatctgataaatttgtctgttcagggtacccaattgttggcgtcgtttcgacaacaccaatcttcctaagtaatttcctcagtagatcaaccccattatatgtctgtgacacgacaatccaagaaaaagcatcaaaattgttcttctcccgctcatactcatacacattattgaccagagcggttttgcccaatccacccataccagataccgttatcactgtgttaccttgctcactggagtacaaccattcagtcagcagcttcctgttgccttcaatccccactagataatcttgtgccaggaggcagtcttggaactgtttcctttcaatataagtaagcgggttaggaataaggtcaggctgctgcagccaccgttctttccgcttcccagcattttcaatctttttctctatctggataatctcttccgcaatatcactgaaaactgtgacatatttctttttagtgaatacctttttcatggaactttcttcttccaacataagagcatggtatgaatatttgtccattacatcctgaacatggtgggccaggccccgcacctctacaatccaacccttgacaacctcatcgatgggatgtgttgtactcatcttttttataacattgttcattgtctccagttccttctttatttcatcaacctttgtcggtagttccttcagatttgcaactttttcagatagcttggctatagcagctttggtggcttcctccactaaaactgaaccaatctttgagacagcaaggattacagcctccatgtcagctgaacaaaggtgaatatactgtattacataatgtagtaacaaactaaagtaaactagcacagcccagaggatcgattcatgtaattagcaacaagtttatgaaaagaaaaacctatgttccagtcagttttcagttcatcatgttgagcctatagtttcagttcattccctacatgcttgagttttttattttgatcccctctgttcctactctgttgcgtgagggtagtttcaacaaaaaaaaaattataaattaactcctgataaaacttttctataatgaaccataagcatgaatagaatggcactgcaagatttggcgctgtgttccttattttgtgggattttagtggctgcatcgaccaggctgcttatatggagtgcgattctatgaacatacagccaaatggcatgtggcactgttcaaaagggtccatttctttaatgtttttttcctacaggtctataagtagaaaatactagctgaaaccccgcgcattgctgcgggaatttagtatgataaaaataaaaaaaataacgtgtaagatagctagataatatcagattaagtaaattaatgtggtttatgataatttaaatttaaatagtatgtagaatggtgattcaaacgtaaaaagtaaggtggtatgactttatggaagaagaaaagtagggagatagtttagaccgtagattaattatttaaaggctaaaaacaattgatgtgatatgacttaattagaggaaaaagggagaaagataatttggaccatagattaatcatttaagcactaactaagtgaggatgaaccatataagtatagaggatatcataaaatataataaagatatatattgaaacattatgtgaatcatgttggatgataatttcacatatttgtatttgaaaaactcttaaattataaaaactataaagatatagcatgtttgcatgatgtttaaatgtgatgattgttagtggatgatgatgcgacatctttgtatgttaagcttaaagagttagtgggggataactttatattaagatagaattaggaaacgggctcaattgtgaagactccactgagaactgtttagtttacagtatctgcatcacttactgtcacggatggttttgcgtttttatgtgccatttattcacagttttcattttctttgttacgctgcgaggcctagctactacgtcccagtcttccaggcttgatggtccttggcaatcacctatgctttctttggcagatgacttattctggtgtactcaatgctttcagtcttttcatctttctacaagggaattgttttgcaagctgttctttagaaactacttatgtttcatattataagatgttttagattttgaatatattcatatatggattcatgcttgtgttttatatataactaggaaggtggcccacgtatatgcgtgagcgtttatatttgaaaggtattccctccattaaataatgtaagccataaccaccattaactctaaaaaccaagaaacaattattatcatctcattgtttgaatcatcttaataaattcagtgcatgcacccaatagaattcgagattttgagaatgaaagtgttaaaaaaatataataatttagtggagaagaggtgctagttaattgcatgcatgcatgcatgccttatattttgaaacatgtaagaaaaatagttatgccttatattttgcaatagaggaagtaagattatagtttgttcaaaaattgtcttatggatagggaactaaagatcaaacaatgtccttttaaaatgatttagggattctatttttttagaaaaaatatatctcaaaaaagcattcatcgactctttgaatagaacatagattaagtttatacgacttttgcatcaaagtaaatattaaactattgtaactaattatcatgcatatcatttgtacacatactgacataccgtgcaaatatggctacaagcaaaaattgcgagatctaagagttgaatcgcctcgtgaaggcacatgacaaacaaattaagggtaaattagaagttggatttttttttctctatatataagttcaaaaatttcatattttctccatagttctgaagaactttaaagggtgttgctgcacacaaatcacctacacaatcgctttgcttggtagtgcaaaatatcaacattgtttgaagctaatttcttttgttttcacaagtttgatggttttatttgaaacaatatttgtttgaaataagaccataattatataaatttaattagtatggatagtttacttataaattttgaagtgttttatagtgaaacttatttctatcatgtagtctgcatatataaaaaatatagttttgttcaataagttcaatacaattttcatcagaaaaattaaaaatattttaaaaccatccatgactacttaaaaaattttgtttgtctattttttaaaaaaaaattcaaataagcacatattctccttcttatcgatgtcttgtctttatcataatcaaagaaaaactccttgtacaactgacatatcatgccatcactcaatcacatacagatgtaagctgtttgtcattattctcggtccacttattacttggttgtatccttcactcacccatcatcttaaacagtcgtaagaccatattttatctaatttatctacttattagtttatataaggggtaacaactaggggtgaaaacggtaacggtaattaccggccgaccggcgttcgttttcgactttctaccggccgagccatatggaaatggtaatcgaccgaaacaaaaatggaaatggtaaaaaatatggaaatgaaaacggaaatggttttgctgttataccgatcgtttccgtatttaccgtattctcgcggaaattaccgtttcttataatatggtaattaccgtattctaaatatgtcgatattataggacatgtctatacgtgacccacagcttatagattgactgactcttcaataaaatctctaacttttgtacatggctaaaataaagttaatttataatttatatagtataagcttgaatttatgtatatatatataacatacttatgtaaagttaaatatatgtttttatagtttaatgtttccgtatttgttaccggtttccgatctgtaccgacatgtttccgtccgtattgttccgtttctggttttccgatatttccgatatcgttttcgtttccgactttaccgtttccgattttgtttccgagaaaaatatggttacggaaatggttgaggctgtttttcgatcgtttccgaccgttttcatccctagtaacaacaacacgttgcttctccctcgtgcataagacacatggtctaattttttttcgccaaaacaagttcttagttaacacatgtaatgtaattagaatattatctgtgtaatatatatgtatatgacatagggtaatttttgttctagctttaccctgtttatatacatataaatataaattaattatatataactcgcggtgcttgactcttctctctacatcacatcttcgatttgtttttatgttattaaaaaaacaataattatccattgatgatttgatgtcttcacattgcagcgtcgtgatcacccaagctactttaggtacggtgccttgtcatgcgtgcataaggcaaatacgcgcacgtgtgttgtgctgagaaaaatagagaggtcttccgaggtttttgttttcttaacaaaagatatatatggttgtccaaaaataataggttcaccggtttaaaaaaaaatgatagacaaataaaaatatttataataagttaataatagatatatgtgtacaaatcatatgaatgttagtgattctaacaagggatggaggggccaaaacgttttataacgtgaaatagatggagtatttcactaagtctattatttgtaacaccacctgaatagaatggcttccattttacctgtcaactgttttctcacatcggtaaatgtatgaaacagtttggcatttatctttagagtaaagttgtctaatagtccctccgtttcatgttataagacattttgac

SEQ ID NO: 26587 - DNA, 2657 bp, Oryza sativa
cctcgacgatgacctcgaatggcgaagccaggcagtaccggttgaggcagcctcgcggctgtcaaggaggatcgacgccggcagcgtgcgcaagtggatctggccgtcgtggcgatggttcctgtcctcctcgtcgccgatggcacccctgtgtgcatcctcacccggaccttctccgatgatctagccctcgagcttctgccgccgccgctaccagccgccggccccaagctccagccgcgtccctcggcctcccacacgagctcctcctcctctgagcagccaacacgcaggcctcaccggaagctttcttctctgtgtacaacaaaaggctgatgattttgggaatttttggggaatgctacaatactaaaaaacttgggctaaaattactggaagtagatgttatcatgaacttcatttggtgaatttttgagatttttctcatgtatagttttccaatgaaaattcaaaaatcttggtttgcatatacattatacatcgaagggcaaaatagtctttgcacagtatctaactgagtacaagtgacagagtagtgacggtgatggcatttctgggacaaaatgactcgtacgatggcatttcctggaagttgcgttcgtcgatggcatttcttggattagggtgcttgtgaatggcatttcatggattttctctttaaaatgttgtttttctttttgtttttgtttgtagatggccggcagcgtcacccgtcgtggcttggacatgactggcttcatcttggagctgcggggcatgtgcgtggtcctggggtatccacatggagtggactaccaggccaggccgctcccggagcaggagggtgacgatgcagagccccacgctgcttgggaggttactgcagtgatcctctctggctctcccgagcggacttcgctggcagtcaccgcgggtggagattctttccccgccgcttgccagaacgccgctctcctcgccatcggcacccttcaccagcgctacccggacgagttgcagcactcgccctaccgctaccaccctcgtcgcggaggagcccgcgactacgccaccttccgggatgctagctcggaggatgacgctaccatcgtgcacctggcgcgcatggtggaggcgtacgacgcggctcgtatcgacttccatcagatggtgcgccgtgggatggtcgagaacaacttgaagatcctggagctgcgtcaggagaacctgcagctcaagaaggacctagacgcggtggaggcgcagctgcatcagctcaagatcgcccagggagaggtctgctgccccaagcgtcgccgcgtctgccgcagccagaagatcaccgcccgcaagagcacctccaggcccgagcttgttcgtcagtccctggcgtggacctgcttcgtcgagacccctcgtgccgagcccgcgcccgtggttccccaggagggggaagcctccggcgttggtagcacggaggatgcgctgttgctcaccttccgtcctggcccgtcgcagcggtagacgagcagttagtaggctggcgcgtgtgttctttctcgtttgtcttcttgttgggttgtgtggggcatggttatgccggtgtgtggcataactgtgtcggagcctgtctttattttatttgcctaagcaacttgaactttaatgaacccatttaatagcagtaataaattcaagaattatggtagtcgtgggtggttagttttaattgttagctctctctgtttgctggtctgtgtggggttttcagatggtgatgaccaggagaaatgctgccaccggtgatggcaaccaacctgaaggcagcaaccacaaccaccagggcaacccacctccacctcctcctccgcctccaccaccaccacccgataccaacgccattctcacccaaatcctcgcccagcaggccaacatgatgacggctttcctccaccacctccaaaatccgccacaacagaatgctccaccaccacccccacaacactctaaactcgccgagttcctccgcatccgcccacctaccttctctagctccaacaaccccgtggatgcgttggattggttgcatgccgtggggaaaaagctagacactgtgcagtgcagcgatgaggagaaagtcatcttcgccgcccaccagctgcaggggcccgcatctctatggtgggaccatttccaggctacgcagccagaggggcagcctattacttgggcccggttcaccgccgctttccggaggacccatgtgcccgccggagtcgtagcccttaagaaaagagaattccgagagttgaagcaaggcaaccgctccgtgatggagtatttgcatgagttcaacaacctggcccgttacgctccggaggatgtgcgggaagatgaggagaagcaagaaaagttcttggcgggaatggaccctgagctgtccgtccgtctagtctccggggactatccggatttccaacgtctggtggacaagagcatccgcttggaagccaagcacaaggaactggagtcgcacaagcgccgcttggcaaatttccgcaatcaacagggtgctaaccaaagggtccgctacaccaatccctatccagggggatcctcttgccagcagcaacaacagcagcagcaacctcgctccg

SEQ ID NO: 26588 - DNA, 2896 bp, Oryza sativa
cacgtgatatctgctaaaggagttgctgtggaccccgaaacggtgaccgccgtcactgattggaagccacccaagacagtcactcaagtccgcagtttcttaggtttggcaggatactaccggaggtttatcgagaacttctccaaaatcgctcgacccatgacacagttgttgaagaaagaagagaaatttgtgtggagcccgcaatgcgagaaggcgttcagaactctcaaagaaaagctggttgcctcgccagtgttaatcttgtcggatactcgtaaggacttcatagtgtattgtgacgcttcgcgccaaggattggggtgcgtgctcatgcaggacggtcatgtggtggcctatgcctcacgccagcttcggcctcatgaaggcaactaccctacccatgatttggagttagccgctgtggttcatgctctaaaaatctggcggcactatctcattgggaatcgctgcgaaatatatactgatcataagagtttgaaatacatcttcactcagtcggacctgaatcttcggcagaggagatggttagaactcatcaaggattatgatgtgggaattcattatcaccccggtaaggccaacgtggtggccgacgctctaagtcgaaagagccattgcaacactcttaacgtccgtggcattccacccgaacttaatcaacagatggaagccctgaacctaagcatagttagtcgtggattcttggctgcgttggaagccaagcctaccttgctcgatcaaatccgcgaggctcagaagaatgatccggacatgcatggactcctcaggaatatgaaacagggtaaagccgctggtttcacagaggatgaacacggaaccctatggaacggaaatcgggtatgcgttccagataacagagaacttaaacagctgatacttcaggaagctcacgaaagtccttattccatccaccctggcagtacgaagatgtacttagacttgaaggagaaatactggtgggtcagtatgaagcgggaaattgcagagttcgtggccctttgtgatgtgtgccagcgtgtcaaggcagagcaccaacgaccggccggacttctccaacctctccaagtaccagaatggaaatgggatgaaattgggatggatttcatcaccggactcccaaaaacccaaggtggatatgattctatatgggtagttgtggatcgattaaccaaggtagctcgatttattcctgtgaagaccacctatggagggaacaaactagccgagctctacttcgctaggatcgtgagtctccatggcgttcccaagaaaatcgtatctgataggggaagccaattcacctctcacttttggaagaagctccaagaagagctgggtacccgattaaatttcagcaccgcgtatcacccgcagacagatggacagaccgagcgtcaaaatcagatcctagaagatatgcttcgcgcatgtgtcctagatttcgggaagacctaggataagagtctcccctatgccgagttctcctacaataacagctatcaagccagcatacaaatggcaccctacgaagcgttgtatgggcgcaagtgccggccaccgctattgtgggatcaagttggggaaagccaagtgttcgggactgatatcctgagagaagctgaagctaaagtcagaaccattcgggataatctaaaggtggcacggtctcggcagaaaagttatgcagataaccgtcgccgtgacctggaattcgcagtgggtgactttgtgtatcttcgggtcacgccattgcggggtgtacacaggtttcagacaaaagggaagctcgcacctcgattcgtgggtcctttccgtatcactgctcggcgcggagaagtcgcctaccagttggagctgcccgcctccttgggcaatgtgcatgatgtgttccatgtgtcgcaactcaagaaatgccttcgagtgccatccgagcaggccgactcagagcagattgaagttcgcgaagacttgacctacgtggagaggccagtgaaaatcctggacaccatggagcgcaggaccaggaaccgggtaatccgtttttgcaaggtccagagagcaaccacgccgaggaagaagctacctgggagcgtgaagacgagctgaaggcagcccatcccgatctcttcgccagtccttccgaatctcggggtcgagattccgtttaaggggggtaggtttgtcgcgtcccaaaacgactctaaaatacatcctcgaaattgtgcatagaataattaaaattcatgtgaaagcctccaacaattaaaatgtgctaagttaaaagtcaaataaggcttggaggatttttgtatatttcctaaaagcctaaaatgcgtaaataaattttagtggaattttcagagcacaaataataattaagaagaaataaacaaagttaaaatggttttataaaaagaaaaaccctaaaaaatctttttccccccccccttcccctcttgggccggctcggcccagctccctccctctctctcctctcccccgcggcccatccggccttcccccgcgcgcgcgccgctgacgggcgggcccgcccgccaccctcgctgacgggtggggcccacccgtcatcccctacctcgcgccgctcccgccgcctcgcccatgccctagcgccgccgccgccgcggattccgccgcatcccgccgtccccgcgcgcaataaagagggggaaatcactccccgtgattccctctccctttccccccacttttccctctctctctccctcggattcgtttggaatcactcccgcaaacttcgccggcgcatcaatggcggccggatcttccgcggccgaatccccctcatcagaccgctctctccccctcc

SEQ ID NO: 26589 - DNA, 11854 bp, Oryza sativa
ccggttaattaagataaagctccaatttattgagggattaaatgataattcttggagggtatctttttaattaaaaataataagtaaaaaaactgccgacagggaaacaaacttgggtggtgaggttcaattcccaaactccagttaaaaaatttgagagaaagtgtgagttctttcattagattgtatctatatctaacatactatgctgttgggaagtgcttgggtcagtaaaagaaacattattatacacaagcgatgtaatagcaattcaaaatctgcttgtttacatcaatttgagtatcgatttactgtttagtacttaactataatataaccctttgcttgtctgagacattaattttgtggaacgaatgaatttgttgtgggggggtcacaacaaaattaataaatgaatcagccaggtactgaatgataaaactagtattagataagcatgtaatatttcttggaacatggttgcatttataaaataaaaggaaaagtatattttacttccctaaattatttggctgaagcagttaatcctaagcaattttaagttcgctctattccctgaactactaaaactggctagcttaactctctcgttgctttgtcgtttttgtttgtccttacacaagatgtgttttaaactgaaattgtgtgagatgatatgctcgctcagggtcaaatttcagaacaaatttcccaatattttctagcaaagagactagttagtgatccctcctctcaacaaggcgaaattcacgaaagaaaaaggcagaattttccagcagacataatcagaaaagttaaagctgatgacagctacaaactagctagatgatacaaagcaagatccagtggaaatcaatctaacctgagctgcagacgatcagagcgtctagaagagcagagctggcgagacgatcagagcatgtgaggtttaagataggcaacgaagaaaatataaagcacaaagccactagcctcaaatctcaatcagatccttgtctgtttctctgaactagccgccgacgacttgacgcgaagtcgacgcggctaagcatttgcagtgccaattatcaactggccaagttgtgcgtgtaggacgggagtccgctgtggaagcttcctttttcctgatctcaaaatttatagtataccctccaaaccgcatgcagtgggggatgctggattctttttaaatggaccagaaactcgagaaattattgctcaatagattattttgcctatagtaaaaaggaaaagaaaaagtaaatcagaattgttcatatcgaaaggaatagaatatctgtagtccagtatgcaaattagaaaagatacagttttgattagtttactgtcctgcagccagctcactggtcaggctgttcgctgcatcttggacatatactcgctttgcccaaaatataagggattttggacggatgagatatttttttagtacaaggaatctggacatgtactagtaagtgttgcatctgtttaaaatcctttatatttaggtacgaatggagtaggaagaaacatattgttatatttgaggatggagggagtaggaagaaacataccgtgtcaccttaacagtccttgtacttatgactcagttgttgaggacctagttagctagtcggcaactgcaaaaatataattccagtctccttattctactcactaatgacagcttagagaaagctaacaaactgatttcttatgttttcatccaactaaaacggccggagacctccaagtcgtcttagtataaaaatctctcaagtcaagtttcctcgatttcttggtcgtcgtcttcgtccaccttttggtatgctcgattttttaaaaaaaattatgactctttttgtaaaacttatttcataaatagaccctccaaaaatctaattatggatatggactctactcggtgccggtgagcttggcatcgaggtttcatgcacccacgctggagaccttggcatcgagttagagggggagggggagagagtgtcgatgttgtagatcacgactatggtatttgcaaagtttggggatcattcgtaccagggtataagcgagactaaggtaaaatagacggagacaaggattttcatgtaggttcaggctccttatttaacaggtaatagccctactcctgctaattgaaaccagtgttgctcttattcatcagaatcacacaagtacaatatttgggataactctaatcatcgtcaacacggcggcatgaaccaccacacgttgtcgacaacagggtagtcctcctcctctaatatgaactgggcgatatcagagatagcgctagatccctcttgttagcctctgtggcaccagattggatctgtttaggtttatctcttatgttgatgtctggcggcatgtattgatgtatattctgactgttgcctgtctatttagactcggcttgtcttggtccgtctccccctcttcttttaggggtcttgtatttataaccatagatgtccccttatccaaatagaactagaaagataaatatggatacgatccgaatagtccttgtagtttccatatagaactctgcttctccttccttatctggaataccttccatatgcaagatttgatttcatataagacttggtatatggtgggtcccgttgagcttaacccaacactattgggtatgccttacccataaaactgacagggggtaggcgccatgcttcttggtgcggacaccgagttgtcccgagatggcatgggatggcatgagtgtacagcgagcaccaagagtctgagacaccatggaatggcacgtgtttggcaacttttttgacaagtagacaaacacgatcgagacacctaaacgccttgcggtgattgtagtgtcgccaaccacctcaatctagcaaaagctagaccaagatgggttttgataaactaaaccggctagcggagccgatttagatagaacaatagataactatccgtctcgtgggtaaacggaaggtttacgggacaaacctacaaaggatttcgcactctcgtagtgaagacagacgatttatggcacaaatcgacaaagatggatgaactagactagaactagattgaaatattgaaaaagcgatttaattggctaagttggattgtgtgtagattgtatgctcaattgaaccggccttgtcccttatataggggttgatcttgcctcctacaggtcctcctccacgtcgaactcgggatagaattcaaaggaaacccgaaatatagcctcctgagtaaggaatcctgagacatgacgaaaacagactcgggcttggactctgctggtctgaccggccacatgccgccggacagaccggccctcaagcagcggtctgaccgaccaacaaacgacggtcagaccggccctatggaggaaaccggcggttttcccaaatcttagcaattttccttaatttgaacagacaaacgatgatgatgagcatggcccacctcaaccctccctcttctccatttcaatccctgcctttttatcagttgattctatcttatttttcctctatgtagctcctaatgttactacttcctctatttcatactacaagactttctagcattgctcgcatataagatagaatatactacaagacttttttttcttaacggcaacatatcctatgcacacaggccctcacgtgtacacacgtgcacaccaactaaaaaatgtcaccaaaaaatttagaaaaaatcatacacatactttcaattgtattacacctagggttaaaatcttaacgtcaaattcattatattttagccgtaacaaaaaaaacaaaaaatctgacagttttaaggttgcaattttgtcagaattttatcttttttgttattctctatatagaatgaatttgaagatgcgactttgcacgttgatgtaatactattgaaagtacatgtatgaattttcctagaattttttgtgataatttttagttggtgtacacggtgtgtacacgcgaatatatatatatatatgtgtgtgtgtgtgtgttaatgaatctagacatatatatatgtgtttagatttattaacatctatataaatgtgagtaatgctaaaaagtcttataatataaaacagagtgagtaatattttttttctatggaaatcttgaatacccatcccgaaaatcatgtctctgtcactaatagggctagtggcatttggccaagcgttggtcgggttggtatgtgcaggagttactagcacgtgtggtggaggttttttttttctttttccttgataataatttcgtagggttataatcttttgtactttttcccagctttatcaatatgaaatttcacaccatcttatcttatgtgtgggccattttggaaaaaaaaaactgagctgcaattgtatcgctttcagtaacaccagaccacgcgatcatttttaccgtgactcggtggttgatgacctatagcttagctagttggcacaactgtagatccgattgctccatacaatccgtctgcttattctaatcactactggtagctaatggaacgtaaaacgaggaagtcattgccattttgattaattaaattttaattattttaaacttaaaaatggatttatttgatattttaaaacaacttgtatataacaagttttcacacgaaatataccatttaactgtttgaaaagcatgctaacgaaaaccaaggtaaaatctgtataatcaaagttagaacggggttagagaaaagccaataaaacggccgtggacctgaaaagtttcattagaatacacctctcaagtcagtctcctctgcatcctggtcgtcgccttcgtctacctctcgcctcgccgtcgccggaagaggagctaaccggctggagatcgattgatccaacatgagtgacaatcctccaggtatgtgcatgctacaagcttaaccaatcatccataggcgaactatttcacgtttgaataacatattttctgtaaattttcttactttgtgggtgttgttcatatgcaggctacttcgttggtcgcccattgaaccatgaagaacagcaagcttcacggccggctgaggaacagaacgctcaattccctggtaggtatacaggattaattagttttctgcatacatcaatttgcttagttttctgcatacatcaatttgccggatatgatgtagcagatcttgttataacttgaggttgataagtgctttgaaaagggttcttaattttcagtcttctatgcattcttctattacctcaggctgttttgtttgctatgtcctatgatagttttcaacttttcaaatttcaaatccttataaagattaagagaaatctttatcttctgattttccttttctactactaaggctactacaatggcaatccggtcagaccaaatgatgctaagggtgcacagaggaatgaaccgggcttctttaagaaactgtaagctgcaattcgtgtacagaatatcagatgcttctgtctgtagttacccattgatttgtttttctctttgcatgatgcattggctcattgaatctctgcagcttcgggtgcttcactggcggtcaaaatgtgaactagatcaacacggctgtattcgcaatgttaatcgacagttcatcaagaaatcagtggaattttgatggagaagttatcattttaggaaatacaagttttgtttcttccaaagtttttcttttcctgcagttacactgttgtgaattgtacaatcatatcccaagcaaatgagattattccgcgttatccattagtattttgcttacctgtttggatctatcaatttactatattgctactggtctcattaaaaggattgttttatccaagtcgtctttgtcaaggaaaaggtccacatgaatatgaaaactttgaactttctcttggatggttcagaaattttttttgactcaatcgcctattaattacaacgaacaatcatttgtcattttcaacgaaaaagaataataatgtttgcaaacgagagcagcgatcaatgagatgactttgacaattgaccgacttatttgcaactgcaagtcttcaagcaattgaaccaaactgtcatggattttaatttttcagcgtttgctttgagatgaaaatgactataaattaactggaaaagttctaagactcttcgctgacaaggattgataggtattctggtatttggcatgcttgtggtcttcattaattaatcctggttcagggtaaataaacttggacaataatcaattattatactcattcaaatcaaggcctggtttaattcctaactttttgttcaaacttccaacttttccatcacatcaaaacttttctacgcacacaaactttcaacttttccatcacatcgttccaatttcaatcaaacttctaattttgacgtgaacaaacacaccccaaattacacttagaatcttatattcgccaccagtccatactatactaatcaagtagacacctttactttcatctaatttccaagactaacagccaatgcatcaaccttatggactatcatattgaaacattttatatcatgttccttttgcaatacttatttacaaatacaatcctatgaaacttaattgtaggaatgaaccccaatctcagtcacagccaagcccaagcttaggagtgaactccaacatcttagcaccaacaagcaggtcacttagttactactccctccgtcctaaaatgtaagatttttagctatgaatttggacacgtatgtgtccagattcatagctaaaaattgctatattttgggacggaggtagtatattaatcttgcttctagcatggtgccattggtcaactccaaggatttttgtgctgagatgttagaagttttagggtccatttgtgcgatcagtttttaagggtttgttcttaaaataagtattgaaaaagaacacaaatgtgtaaaatcttcaggggctacttaaaagaaaaagctttttgcagacagtcaaaagtgatttacacaagtggccagccattatgtctacaatttaaggcctgcgaaaatcatgcatctttcacattgattgatattctgtcttcaaaagcatcatacatttatcattgatatgtaggtttatgattcatcagacctatatatcagtaataaagtcacatgcctttcaatgtagaagaggccgatctctttcacttgcagccaaactaacacggcccaaatatctgtaagacaatgaagttttccctgtcatgacaacttacaagatccagagtatctgtcctaactaaaacggttgccagtacggtgaaaataaaaaaaacaaacagtggatgatttgatattctcattgcatgccatgtttgcaatttcgtggaaagaaataacaaatagtggatgctttgatattctctatctcatgccatgtttgcaaattcctgatactctagttactgagctggtcttcgagtagtagtggtcgctggttggtgatgccacttgagcaacgacttgggttttaggtcgtcgcggccgaaaaaaatatcaatctctgcgcgaatcattggcgtaggccagcctgggagagaggaaggaagcatcttcctgtgcctctccttaccctcttcgtcttcttctccatctccttgtgtgctcagtagcttctcctcctacgaaaccaaccagctgccgccggtgaccgtcgatccgtcgaccgccgccgccatgagcagcgatgttcctggtacgtgtcactcactcacaagctttctcttctcttcttttttttttgtttgtatcaatcaatcatgctaaagcctaaaggaattcttgcttctttatatcagtctaagaatttttcggtgtgtgtgtacgtttgttgcagggtacttcgtggggcggccgatgaaccaagcggagcctgcgaaagaacagcagcagggcgccgacgagcagcggcctgctaccaacgcgcagatccctggtggtacgtccaacggtgcaaactcgatttgatgatcaaattttggccgcaaaagaatcggttttgcccgatgttttgctgaactttgcttcgttttcgttttatgtaatcgttttgggacacaaaaatgagtcgattttgtccggttggtttgctaaatttttgcttcgttttcattttttgggggggagaagactacttcgtcgggcgtccggcaaacccgcagcagccgccgtcgcaacctccgcgggcgcaggagagatcgagcttcttggccaaatggtactccaatttgttcttcgaaaatcgaacaacaattgtttagattgtattagatttcatatcgatttgtcactctgatgctttgctcttgctgatttctctgtttcgtttctgcagctgcccatgcctcgacagccgagctgagggatagacgaacaagtgcggcggcgggcgtgaccgtaaattcgatgggaaaattgaagcaaatttgcttggagtgataaggctcggatctgtgtttgtgttgcaagttttgctaatagatgtttgtaactgaaggttgcttctattcatttgtataccaattgttcattcgtatcatcagagtgcgaattcgatgaaattgtccattccaatccggcatgccttttctccttccttgaaatgaatattctgctccattgctggcaaatgtcaagaatgagtttgttgttttattcagtactgatgttgattgcatggttatcccgaatttgtttcccttttttttgtgaaaataaatccaaatctttaagttcatctttgataaaaaaaattctttctttgctagaaaatatatatattgttttagtcaattttgcaacttgcgtgcatatgtttttgccacagctctccacagtacatgtacgaagcaacttgatgaactaatattgtaccaattaagaaagcgaaaatcattcccagcaaaataaaagaaagagaactatgttcggattccagcggaaaatagtttaatagtgctagaattactccatggggattatttttgatgatttatttgacagctgaatgtgagtgttaacctaatgtttgattcccccaatcttgtctgcaggatgcgagaccacttttttttttgaatgaaatgatgagacgatttgtggctttaaaatatcgtatttgttttgttggacaacctagcaaccaatcattttctgctcacttggtagcgaattttttttacttgtttgatcagaatcatagttgtatcacatggaatttgtagttctacttagaaaaaatgcccgtgcgttgcaacgggaagaaaatatgagaaaattaaggagaagttgaaaaagatttacattatgtaattaacttaaatacaaatttcctgaaatagttgatattttttaagtaggtatgtgtttaaattaatttaaaagtaaattaagtgtggaaatacaatgatatggctggatttaatttttatgaagttctccatgattaattacgctctctagaattttcttgaaattttcagagcttagttgcgaattttaataatacaaacatcatttcagcatttatttaaaaaaatctaaataaaaaccctcctttctctttgggccattttcagcccgtttccttcctcagcccacagccagccgacccacttttctcccttctcctcccctccgcctcggcccgcaagtacgcatccggcccggcaaggcactacaagtctaatcatcctccccactcctttcccagtcacgtgggcacgtggtccggtgctacagggttgtctcctacctctgtctatattgtcgcatctgcccgacgacgcctgaatccacctcctccgtaaaatccggtcacatccttggagataatctgaaattaactgagaggttttgatacttatcttctcctctttccgttttcccaagaatcaaagcaaaaccacgtcgtataaatgtcggaagcgaaaccctagttttttttagtctaggcccatttctcttaaaaaaaaactgcgcaagcattcgcgagaggggggaggaattggaccatatggataaaaaaaagtgtgacgaaaggaaaaatacgaattttttaattagttaagatactaatgaattttaaggtaatacaatagttagtgcataattgtcaagaggcaaattatatgtatataaagaaaattatattatataaaagttgggtggtaaacgccctgagggaaaaaattcatgaaaccatccgtcccaaaataaatcaatatagggttgtatgtgatattatttagtataataaatctggatatatattatattggtttattataagacgaaatgagtagcgttgtaagtatcgagtactaatccctctcttgggtaaagggacacgcagagctaccaaacgaacatactctgtttttaatagacgatgatgtttgatttttaacacaaaactttatatatttttcttattaaaaaatttgtgcaaatacattatacttaaagtatttttagtgataaaataacccacaataaaataaattataattatgtaatctttttaataagatgaatgatctaatatgtattaaaagctaacggtgccgtctattaaaagatgatgaacgtagtatattaccattcgaatttatttaagttttgcatgctccgtatgctccaactattttcttttttttaaaaaataatcaatcatcaatgtaaaagtgccatccttgtcactaggaattctctatatacccgtagcttttaactatttgccatttttagatttgacaaataactatttgtcacccctatctcaatgacatgtgggtccacatgtgtctatgacatatagatctagtggcaaaaagttaattgccacatccaaaagtggcaaatggttaaatatctccggaaatggcgccaactgaacgtgctccactggccggtgtggatggttgacttagtcagcgcactggtagcgaactatagtagtagcgattagcgatggaatggcagcgttgacttgacaaataaaaaagtgagaaaaaccaagctgcagcttgcagccagctagctcattccgtctcttctctttagctcaccctcacacctcgcccatagagtcaaaggtcgtcgcctcctctcccatcagcgagccgctccattgcgagctcatcaaccaattaatccagatacgtgatgatccatgccttcgcttgcaaatcgatttgtgctttagttaagcggacttctgcccaacatttctttctgccccgatttagacggagattaattagttttggtggatttttttgttttttagcgtttgagcatgagaagctagtggttgttgggattgtgatccggttcggatctttggtgatgaaatcgtcatgctcgcccggccacctcggttgcctgtgcgaccaacgccgtgtcgcgtcaccggtcgcccacgacgtgttcggcgtaaggcgccaaagcgaccgggagaatatgtaggccagtagcggcggcgccggcggccggattgccgattcgtgcggtgtttggagtttggcctgcagtcgatgtgatgttattattatcgccggccgcgccggcgcggccggagtgcgttgtcgcggccaccgtgccaagatgtaccactcctgctttatttctagggccaaatcttaggaaattttcgaaagttgtaatgtcctgtgcctagatggctaagctgtgttggtttacgcaaagctcgttaggattca

SEQ ID NO: 26590 - DNA, 747 bp, Oryza sativa
tttggttttcactcaaattgctgatgaggtagtcaagatagagaaggaaatcaagcaagttgtagaactcaaggataagtggttgccgctatgcccatttgtttctcacccactcactgagatggagagacagaggtcccaagacatcttcccggaacttgtcaaagatgaagatcttgtgggtattgaggacaataggagactgctgacagaatggctatattatgatgagttggacaataaggtgataacggtgtcaggaatgggtggactgggaaaaaccaccctggtcacaaatgtttatgagcgtgaaaagacaaacttctccgctcatgcatggatggccgtgtcacaaacctacacagtcgatgctctgttgaagaagttgcttaggaaagttggttacaaaggtgaaattgacaaaatggatgtttatgatttgaaagaagaaataactcgagtactcaaagataggaaatgcttgattgtactggatgatgtctgggaccaagaagcatactttaaaatatgcgatgcattccagagcaaccaacagagtcgtgtaatcatcacaacacgaaagaatcatgttgcagctcttgcttcctcagcatgccgccttgatctccagccactggatggcaatcaggcctttgatctattctgcagacgggcattttatagcaccaaggaccatgagtgtcccagcgagcttgtggaagttgctgcatctatagtagatcgatg

SEQ ID NO: 26591 - DNA, 2391 bp, Oryza sativa
gttcgtcgtctgtcaacttaccgatggaaagacagtactgcaccaattctcaaacttctacgtcttcgaaccatagtatcactgaagcattttcatcttccattgatatgttgtcctcagttttgtctcactcaagctaccttactgttctcgagcttcaagattcagaaatcactcaagttccaccatctatagggaatttgtttaatctacgttacattggcttacggaggaccaaggttaagtcactcccagactccattgaaaagttgctgaacctccacactctggacatgaagcaaacaaagatagagaagctaccacgaggaatcactaaaatcaagaagctaagacacttgtttgctgatagatgtgttgacgagaagcagtcggagttccgatactttgtaggaatgcaggcacctaaagatctatccaacctgaaagaactacaaactctggagactgttgaagccagcaaggacttagctgagcagttgaagaaactcatacaactaaaaagtgtatggattgacaacataagctctgctgattgtgataatatttttgctacactgtcaaatatgccgctactttccagtttgcttctttctgcaaggaatgagaatgagccactttcttttgaggctctcaagccaagttccacagaactccacaggttaattgtcagagggcaatgggccaagagtacattggactacccgatattccgtagccacagtacacatctcaaatatttatccctaagttggtgtcatctcggggaagatccattggggatgcttgcgtcgaacttgtcggacctcacttatctaaaactgaacaacatgcagagtgcagcaacattagttcttcgtgcaaaggcattccccaaactaaagactcttgtcttgaggcagatgcctgatgtcaagcagataaagatcatggatggcgcccttccatgcattgaatgtttgtacattgtgttgctgccgaagctggacaaggtccctcaaggcattgagtcccttaactccctgaagaagctctccctgttgaacctgcataaagacttcaaaatccaatggaatggtaatgagatgcacaagaagatgctgcatgttgcagaaatctgtgtctagaagttgcatgctttatttaccttaaagaggctctttgtaattttgtagcacccttgaatttttcatttatttaaaaatcttgtcatttaaacattttgagtataaatttggttcttatttgattttgtgccaaataggtctcaaatcctctcttagaaatcccctcgagttgttgtcaaaaccctaggacaaaattcaaattagattcctccaaaaactccccaaaatttcaaattccaaatcctagagaaaatgtgaaaggtcaaaggtcactattcatttgggcctctttttttcctttttcttccctcagcccaactccctttcctctcctctctctccccgagcaggccggcccatggccttcccgcaccggcccagcccaccgctgtttgtcttcctcctccgaccggtcgcgcgcgcgcaccacatgttcgacgaaatgtctcgcccgagcactgagtcgtggcagtgctgcgtcgcaccgagccgccctcccatgcgccgcgcgccgtgccaggaccgcatcgcgccaaagccgcgccctgccaagccgcatatcccagtgggaatcacatcccatccctcgctccggtttctctccgggagacacggcgccgcgtcgtcccgtcgccacctcctcgtgacgccacgccgtcctatcccgggctcccgcggacgcgcgccctctccacttgtcacaccgcgccttgtcgcccgtctcctaccgggaagccgccgagcccgcgcctatctctctctctcgcgtcgcgttgccaccaccgcatgacgccgctcgcgtcccctcgctctgagaagaaccctaccgctcgattcccggccgtagccgccgtccgtcgcgcgtcaccattatcccgtcgccaaacccgctccccgcgcgtcacctcgcgttccatcgccgcttcccatgacgtcgcgccgtcaccatcgtcatcacgtcgccgcgccaccgcatcgtcatccgctcgccgtagcagctagccggctatgcccggactcgcggtgcctagccgccagatcgccgcgtcccgccaagctcacgccgccaataagaggagagccgagccccatcctcaccacgccatccccatctcttctctttctctcctctctttttgccgccgctcgagcccccgcacttgccctcccaagcggaagaagatacggcactcgtcatcgccatatcttgtcctaggtggtgccggcttaggaaagggagggtggt

SEQ ID NO: 26592 - DNA, 8188 bp, Oryza sativa
ccatgttgaggacgtaatggacaagtactcatatcatgctattcaacttgaggaagaaggtttcttgaagaagtacttcgttaaaggttctcattaagtcgtggtatttagtgatattgctgaggaggtagtcaagttagagaagcaaatccagcaagttataaagcttaaagagcagtggttgcacccttcccagctcaatcccaaccagcttgctgagactggcagaccacggtctcacgacaacttcccatatcttgtcaaagatgaagatcttgtggggattgaagaccacaagagattgctggctggatggttgtactctgatgagccagatagagcagtgataacagtatctggtataggtgggttgggaaaaaccacattagtcacaaatgtttatgagcgtgaaaaggtcaactttgctgctcatgcatggattgttgtctcccagacctacaatgtggaggctctattaagaaagctccttagaaagattgggtctactgaactgtcacttgatagcttgaacaatatggatgcacatgacctgaaagaagaaattaagaaaaagattgaagatagcaaatgtttgattgtgctggatgatgtctgggacaaaaaagtgtactttcagatgcaagatgcattccagaatcttcaagcaactcgagtcatcatcacaactcgagagaatgatgttgcagcccttgctacctcaacacgccgtctcaacctccagcctttgaatggcgctgatgcatttgaactcttctgtagaagggctttctataacaagggccacaaatgccccaaggagctagagaaggttgctaattctatagtggataggtgtcatggcctaccactagcaattgtaacgataggaagccttctgtcttcaagaccagcagcagaatttgtttggaataaaatatacaaacagcttcggactgagctagcaaacaatgatcatgtccgagcaattctaaatttgagctaccatgacctatcaggagacctcagaaattgcttcttgtactgtagcttgttccctgaagactacacaatgacacgggagagccttctgaggttgtgggttgcagaaggctttgtgctaggcaaagaaaagaacacgctagaggatgtcgcagagggaaaccttatggaactgatccaccggaatatgctggaagttgtggacaatgatgagattggcagggtaaactcctgtaagatgcatgacattgtgcgtgtattggctctttctattgctaaagaggagaggtttggttcagccaatgatcttggcacaatgttgcttatggataaggaagttcgtcgcttgtcaacatgtggatggagtgatgatactgtatcaacagttaaattcatgcgccttcggaccctgatctcactttcgacaacctcattgccccttgagatgttatcctcaattttgtgtggatctagctaccttacagttcttgagctgcaagactcagagattactgaagtgccgacttctattgggaatatgtttaatctacgttacattggcttacgacgcaccaaagtcaaatcacttccggagtctattggaaagttatctaacctccacacgcttgacatcaagcaaaccaaaattgagaagctaccacgaagtattgttaagatcaagaagctaagacaccttatagccgatagatacgttgatgagaggcagtcagatttccggtactttgttggaatgcatgcccctaaagaactttccaacttgcaagagctgcagactctagaaactgtggagtctagcaaagacctggctgagcaactgaagaaattgatgcaactaagaagtgtgtggattgacaacataagttctgctgattgtgcaaatattttcgctatttctttccagcttgcttctttctgcaaaagatgaaaatgaggaactctgcttcgaggctcttaggccaaggtcaacagaactccacagactaatcatcagagggcgatgggctaagggtacacttgattgcccaatatttcacgggaacggcacaaatcttaaatatctagctctaagttggtgtcatcttggtgaagatccactagggatgctcgcttcgcatttgccgaacctcacttatttgagactgaacaacatgcatagtgcaaacattttggttctttctacagtcttttccccacctgaagacacttgtcttaaagcacatgcccaatgtgaaccagctaaagatcatggatggggcacttccatccattgaaggtttgtacgttgtgtcactctcaaagctggatatagtccctgagggcattgagtcccttcggaccctgaagaagctctggcttctgtacctgcacagggacttcaaaactcaatggcacaaaaacagaatgcatcagaagatgcagcatgttccagagattcgtgtttagaactttagatgcggctggctggtgccgtttgtagtttttttccccctctgtttgcagcaggtgtcgatttccgatgagttgcctatcattcctagcttttttgcgttcgcggtgcctctgtacattatgtgtagtttcatttactttgatattcattgtatgtaagagcacatccatttttttataagaccttatttgcatgtactgttgccaatatattaatctctctgtttggagatatatgcggtggaaatgaaatgtaacaagatagtaggaccaatgttgtcaatgctattatgcatcaatgcaagtatataatatggttaggatttaagcttctggtcatccatctatatattgtctagctctctggtcactgtgctattcacttgtgaactactatatcccctatacccagcatttttgttggaagacctcacaacttcaggcttactttatggtggttgtgctacactgcgctgggcttgttattttactgaccgtcgtagtttgttttacaaattaaattacagttatataattgtgttacttaactgtcatgtctcttagtggttttactgtttgcgacatatagattaaaaaaaaatcagtttgccaaacgccaaaaaatctaaaagcgcactatatagaaataatttcctgtacaggactcactttatattgcagacggactgtaagtggtcgcgtctgcaaaaatcacgctctattttcgtgtgcggttctttaaaatgaccgcaaggaaaaaacaatttttgcaggcaggcctcttaacagatccacacgcaataataggcttattttcgcgtgcgaacctgttaagtgacccgcacgcaaaaatagcccacccacccttttagctcccggcgccacttgatctcttcccatcctaccactcggccactccaactcccactccctctccctctccctctcatcctcccatctctcctctcactcctcccatctccctctccctctccaccctcccctgtacccactcctggcgacggcagcagcctcggctagggcggcggtggcagcggcatcggtgagagcggcggcggcggcattggcgagtgtagcggcagcatcggctagggtggtggcagcggagcggatccgccgctggccaccacggggagggtggatccgtcgcctgccaccgtggggagcgcggatccgtcgccggccaccgtggggagggtggatccatcaccggcgaccattgggatgatagcggcgggcctcgggcagggcagcgacgatgactgcggtggcggcaatggtctcccagcctcgggcgtttggatccgttgccggcgaccaagcggacgacggtgactggcctcaggcaggccagcggcggcggctggattagggttccagggcggcttttggttttttttttctgtttcgattttttattttctcgtgcgggtgacttaagtgcccgcacacacgtgtgggtgcatcacccgcacgaaaaaaatcggattttcacaggcacttcgttctagacgggcggaagatttgcacgcaaaaaccgctttcgaccgcacggaaaaatcgttattgtactaatggcagctatttgcaccaaattagattatcctaatccactatgatacaattaatatcacttgggggtgtttagatccaaggctgtaaagttttggcatgtcacatcggatattatatagggtgtcgcatggggtgtttcgggcactaataaaaaactaattacagaatccgtcattaaacaacgagataaatttattaagcctaattaatccatcattagcaaatgtttactgtagcaccacattgttaaatcatagagcaattaggcttaaaagattcgtctcgcaaattagtcgcaatctgcacaattaattatttttttagcctatatttaatacttcatacaggtgtttaaacattcgatgtgatagggtataaaatttttgtgtggaaactaaccagagccttggtatagtttctcctgtgcatgtaagcaagtaggccctgtagtcttgctaaacatcactcacttttttctatccctctgattgaagggcatctctaatgtgcatgtaaatgcgaccataagccatatgataatattcttagtacaactttatgtatagggaggtgtgtttggaagagaatattgctatggctaacttaaccttaaagctagctataaggaatataaaattactttatgtcttttcaacatgtacgttggtttgaatccttcatactataagaattaatagatattattttttctagtgagtcccaacttaaggtgaagagatgatcttaaacattgtagcattgactataagtaaaaacacatatatgtgggttccgtcttatagttgttgtttggtttaacattgaggatgcccgaaggaggaggttcctctgacatttacttcccagtgatgttgtcactaactgtggacataagggtagtactccctccgtcccattttaagtgtaaccatagttttccgcgcccaactttaatcgtctgtcttatttgaaaattttttgaaaaaatttaaaaacataagtcatgagtaaagtactatttatattttatcatctcataacaacaaaaatactaattataaaaatttctcaaataaaacggacgatcaaagttgggcgcataaacttaggatccacattccctcattgaaccactcactactatgcatagtgtgatcagcatacgctctgtggttgcctactcggctcttgtgaagagttgcacatagtaatgagcatggtggtgtcaaaccacaaatttattcgcaatggcaggatgtaggtagctaggtgtgcctaaaagttaaaaggttaagatttgcaagagaaaaacaatctattgaaaggtttattcccatattattaaaaacagtttttttattaattaaaaaacataagtggcatatcagatacagaccagcaatcgtgctgcaccgcaccaaggtacaacaaaaatatagtttctcacttagcacaaggtacaacaatgtgtttctgaatatgttacaacaattacaagcactaacaacaaagaacaacatggtgaacttcattttgaccagacagatgtccagtgatttgaattgaagaaagacaaaccttgcaaattgaccagacagatgtccagtgatttgaatcgaagaaagacaaaccttgcaaattgcaattgaagtacaaaggagcacagatattgcaacggaagcaaccaaatgtcgtcaatatatcttctcaacgttgaaatgagccgtatttgtttctgagattctagtcaacagaactagcagtaccatgtaccaacacagtaaatcagctcagagcaatgacaatccacaaacaactcttccaatgtactgcaaaatcaaaatggccgtcatgatactatatttggataaagagattttcagctaattaaggtacatatattaactaaagtgccctgcagcatgtataacttgcttcgatttccttttggcttcgcaattacagtacagttactatttttctagcaatgttgcacacatgactacaaatgaaacttttccctagtagttcttgtattaatctcaccatgaaacacaagtatacaacacttaccaatcaacaaatggtattccatataacatgacacaacgtgccttaggtgggttgtgtgtggttgaaaacatagtaagtctacttaggacttcaccactttggcatgatgccgctaggcagggaatggggaactgggattgagcaattactaagctacccttattaatactattttctgttccaaaattatggcaagatatgctacgtaataaatatttgggatcgcaacctttatctcaggctttttgaaaagcgggggactcatatttttgggctagccttatgaaagccaaacaagattttcttaggtttaggtcctttcgtattagggaaagctctcaaataaggttttgggaggataaatggttgggtaatgcctcgttgagagattaatatccttgtctctataacatagcaaggcataaacaatcgactatctcataaatctttcaaaacaatcctccaagcttttcatggagacgagatttaatcggagcaaaattagccgcatggcacaatttatggcctcgcatagctgatttggtgttggcacaggagcaagatgaatttcgatggaatctcacccccaatgggatcttttcggtcaattctcattacttagctcttgtccatacgggcatcccgaatataaatagatgtatttggaaggtaaaagtattgctcaaagtaaagattttcttttggtacttacgtcggggcataattctaaccaaggataatctagctaagcgaaagtggaaaggtaataagaaacgttgcttctgtcataaggacgaaaccatccaacatttgttcttccaatgtcatgttactcgtttggtttgatccgtgattcatatggcttataacttacaacatcctcaaaattttaatcatatgtttgggcgttggtttacatgtgttcctaaggatatgagaaatctgcttttgatgggtgcaacagctatttgttggtccatttggctaagctgaaacggggcaatttttgataataagatggtatcttctcctttgcaggttattgctttagtcaccaggtggctacgcaccaggtctatcctccacaaaccgggtcttcaggtattgtggtggtatcgcgttgtttggatcaggtggtacatgagttttttaccctagagcatgggtggcgatctagtcttcggcttgatagtcactaatttcttagttttgtgttgagagtctagttagatcctgttttgtagctgtgtgcatttcatgcagaggccaggagtgagcccagttagaagttatcgaaaaaaatgaattaatgatgggtatcaattggttaaggaggtaccttccaagtactgtaaaagatctcaatgaacaaagtttcacagttgatcagttagagagtaagagcactgcaaaaccactcctccaatatgttttctaaccgctttgtattcacacaaaccctgatttttatagtcactgatatagaaacagggttatttctcttgagaaagaagagccaaactgagcatgaaaacaggttttgaaaaaacaaaagatttgaactagtagctacttaaggtcaaagctgttttctagtcatcaatgctaggttggtggctgagtcgtccaactacttctaagacatgaaatgcttacaactttagatgcaaatagcgcgttggtgttcagttgggatatgggtgcgaaaaccttttcttaggagctgtaagatctgctaagtttttcctgggaggagtactaaagcaaggcccaactgtagcagtattggacaaaattggatagagaaatataaagaaaaaggtacacatacacataatccggctaagcatttgtttaaaaataaaagaaaacagaagccatacggattaatcatcagcgacagcataagcagcttgcaatttacatggcaagattaatttcagttgatcgtaaatgcaactattggtttaaagaaactgcaactaactagattattactctttctgatttttaaagtaaatacaagttgttttagcactctcaactcttt

SEQ ID NO: 26593 - DNA, 7231 bp, Oryza sativa
  unsure (1)..(7231): unsure at all n locations
cataaatcgaatcacgggtatgaaaaaatggagcagagcatgtggaacttaaatcagcctaattagaagaagaattgttgatacctcaagttggtcagctgatcagtgagatttacaataagctggtccaggtcgacaacggaggcatccgatggcgggttagataccagttgtccgattatctccctcaacaccttgctcggatcaccatgtgccgcagaaacccaggcctgtttactgaaactccggccgagaccgctgttgttgtacaactcccttgcaagtgcagtcttccccaagccgcagaacccaacaatcgatatcaccttaagcttcttcggctcggcttctttcagatgctccagaagttcttctcggggcaggtcgatgccgacgagatcagcctggaggtttctcccgtcagatgcaccggagcagcgttgctcatccgagctgacaggggaggactgatgaccgacgaccaccgtgtatctttctcgccgctctttcgcttcgtctgctctcttcctcagcttcttcatctctttggccaactgaagcttcgacgttcccgtgacggaattgatactgaaaagagaagcttgctgatcccgagttttctgatacatgatgcgatctacgcagtcctctatgtcgcgagccaggtcgcgaagctcttcgatggacagcagcagcacgcttccacggctcaccgtccgcaagagctgctcgtcaatggctccggcgatcatgcggagctccttcaacagaaattctgcgtcgcctttgaatcccttgtacagattgtacttctgatctaccagagagagcatcctcgacgcgagtattttcaacaaaccgctcaaaatagctgcctccatctgcgatttctggctactcgacgggcttatcctcctattcgatccccttgtgcatcggggttgactcgttttttttccttttagtataaaggaagctttcattaatgtcaaaacgattatattaaccactccctataattctatctgtaagttcattcataattttccgtgcacaactctgatcatccgttttatttaaaaaaataaaaaaaattaaaaacataagttacatgtactattcatgttttatatctcataataataaaaatactaattaaaaaaaattaaataagacagataatcaaaattagatgcgaaatcttatggttgcggaggagcatcaagttaatagaaccattcagaaaactcatggtctctgcataagccaagaggtccccgatctcattctcaatacctgctttttttttttcaatttctttgtaaatttgttcgcaaaaaccagatcaagcccaaaagtagagattaatcggatcgtgctatattacaatgcgcagggcatccacgacacactaacgatatttctagtaaaattataaaacctggtcataagtcacaactaaaatttatactatttgtttattatttattaataaaatcgtgatcgtgatgtagttatcatgtttactttgtgtgctagcttgatctgggaaacaaatataacttgagtatactaagctacacactgtaactcaaggtggatgccaagctggctcagctcggcttagtctggctcgttatgatatcaagcagttgatgtgaaaattcgtcgtgacacacaagggcctgagaaatttgcttaactccagtgcgggcgtgtcagtcagtttgattctataactgacaacatagataattgatgataaagaaccgatagccaaaaagccgatgtaacgatactagcatatgtcgataaggttttgaacaatctgctatatatccaatgtagattctgacacttagataaagataatggaaaaacttgaattaaccatcccattcaatttgatgataatatgatgaagtaaatgtccaatgagccaatcgatcgatattgatgcaaaatattaaatgtaggctcgacggttaaacatacatcggttggaagtctatgtaaagataactgtcgggggataaactcctcaagcgggggaccttgaggcccctccttcgttagttcggcgggggacagcgtgtgtaaatcaagaaactgataagatcgaaaaggaccgagggggttgggccctcaatcaaaagggggagacaaaagggattatacaagttctggccgctaaggagcgtaataccctactcttctgtgtgatgatttttctaagcttttgaagtctctgaatctctgatgtacaagccagagctaggagttcctactccaaattgtcctctctcccacttactggacatgaacctccttttatactccaaggggttctcacatgcactgggtgtgcaatctagttctggggggggggggggtaaatattctctatcttcaaagtgcgtcttgtgctgcagcttaaaaaacgcatgtgcatcagctgccgtgcagggcctatcaaatcatgccggctgacgcaggccgacacggggaggatccccgtcattcaccatttaatggatgtggattctggggtgttagtgcaccgggaatgtcatcccgggtatgttcaaggcagtcaagccaacgctgaatagttgagaggtgttgtacccctcatcatcgtgacgggacagggcatacctaccgcacgccacctgacacccggctagagcatgcgtggcttgcactgtctcgtctgtcagtcaaccggtcacggttcagtcaggtgcgcagcacaccgcattaaatgcggcgtggcacgcctgctccgtccacactaaatgtggttaggtgggcgctgaggggcgtccatcgaaccactctcgcacgacggtcacgtggtgaccatcccgaggggtcggggcggctaccgctcgttcatgggcccgacccctggggggaaatgccacgtggatgtcgagggaggctcctccccttcaagcacggtacccccgggcccatatcaccgacaataatgtatcgacttacactctgataaaacgtagcacaaatctataaacttagccagctttagattatcagcagtaatatagaagatcagacccaaccgagacagttctagattacgtctgatcaaataagctagataagtccatagatgtatgctaatatgatcctaatgagctataaccctggcttagcaaacttgtttgcaagctcgagcgagttcatttagcttgtgagccacggggcaagagatgaggagcgcaagatcgccgacacttaaagctagacaatgcaagagatgagctcgagctcgctggaacttggagcatggggaggagctcaacaatggaggtgtcagtctcaaggataagacatatctcctatacatgggtttgtggaataggcaataccatatatccaataatatatgagaaggtatcctttagttaaggaaatacgatgaataaggaaggaaattatcttcctagaatagaaggcctgtatcatgttctatttctccgagttctacttggagagaaagatgatgttcgctattaatacaagatcttctaggaggagaggggacacgcctacggaatacatgccaacacaaaatacaagcctagacaaactaaatccggaaccacaaaggccggcatgagggatctagagctatctacaatctctccgagttcatatttgacaaagaagattacactagccgtcgatgacgtgtggaagctccatgccaccaagctgatagagactagattaggtcaatcccaaatattatattcaggtgatactgatacataaaggcattatcggctctggccaacaggagtagagttattacctgttagttaagggccccgaaactatataaaaatccatgtctcctatatgttttacctcaatctctcatataccctggttctaacgatccccatattctacaaataccatctacgggtatagccggtgataggaagagaaaagctcaagcttgccaacacttgagtcttggtccacaggaaggctcgtgctcattgtggttcgctgcgctggggccgggcggtggcgcaggtgggtggcagcatcgggtgctgggggcgtgcgatggcgttgggccgagcgatgacgcaggtgggtggtggcattgggcgttgggggtgagcagtggtgcctagctctagggacgagcatcagtagctggagacgcagggcgacggcaccatacgctccttttggtgatgacgacaggttgagcgacgggcctataactgttggtgaagagcgacggacggcgtatggcgcaagcggtgagcggccttggcgggctagcgacttggcgagtggtgatggcgagtgggtgggtggcggcgaagttgtgcgcagaggggagacaaacacggcgcacgctcgtgcatgaagaaaggaggctatgactgctgtgaagagtgaagctagggtttttaatgctcttggccctgaaagtatgggcccgtgggttgtgggctgacttgctgagagcaagtttaatagtatagccaactactaactccaaatcttctatagccaatgtaatagtcaattcatacaatagttacttacgatactattaatacctggtcctacctatcatacacacagtacgtcttagagtccgtgctgctacagatctgtagcccgctgctcttctctctcttcctttatctctttaaaatatgtttatagctggcttatagcctgctattatacttgctgtgaggtgcagtgtggctatagcctgtgggctactctcgagttgactgattatctctaacgaggtaaaatgccaaatcggctcgttacgaaaatgaaacgagtctagccgagcttgtcacgagctgagcgagctaacgagtaataagcttttccgtccacccatatatgtaacaaatgataataccacaaccattttatgattatattaataattaagaaacatatataacttgagttgtgttttgacttttgagacaatgttttatagtttattggtcacacagggcctaacggggatgacaaacaaaaaaaaaaaaaaacgtagggcacccacaatacaccacatgcagtgatcatttgaggtattgaaccatttcaatgtcttcagcaataatgtgtatataaagtactcaccaagctggctggcgctgattaggagatccttatctagaattagttttttggagtatctatttgtaaataagttttacaaaaggactcgtaaaaatcctagcggtatggacgtcgtcgtgtcggagtcgggcacacgacatacgcactactaaaaaaaaacaactcggaaacgtacgggaaagctctaccatttctgttttcggttttttttttttggaatcgaaaattgaggatacgaaaacgtacggccggaaaccatttctgttttcgtattatttttggaaatcgaaaatcccatatatggagacggaatcgaatattatcaaatacgaattggagcgaatacgataacaatatttatcgaaaaatgaaaacaactcttactaaggttctcaaatcaacgaagaaatacaactcattattttttctaaaacaataaatcaacatttttaatttctatcatcaattaataaatagtaatatacctagttgtacacttcacttttcagaactataatgagctacattcatttgtaactatggaatggcataataaaacagaaacaaatatttattaagtaaaaaaaccagatcaagtaccgaactaaaaagaatatccccatttaaattcagagtagagaagagtaaagttaatcatgtgtgtatgaacagtaattcatctccgataccgagaaaataaaatctaaattcacttcgagaaattttccgacggattccagttccggacacgacggattccagttccggacaaatagtagccttattgtattcgttttaattccaaaaataaaaaaaaaaatccaaattcatttttaattccaaaactctctttaaaaaaatttcaaccaacactttccttttccgaaaaacgtctgaaaatcaaaaactatctaaaccattttcatgcgtacacacaacattttccaagtaattttttaattgcaccatcgatcccaaaaaatatagcagctcaatggtagtagttccgtagttgcggcggggtgagggcatattctaatgtagaactacctccgttcaaaataagtgtagtcgtgagtatctccgtatccaacgtttaacactctgttttatttaaaaaatttataaaaaaataaaaaatagtccgcgcaaagtttatgatatttatcatctnatnatataaaaataacataaaatattttcaaacgagacgaatggttaaatattagctataaacagtgtaaaactatatttattttggaactgagcgaataagttttcaagtcaacgagtgagatacctttttgcgccaaggttggaacttggaagggcctccaagatcaactcattcattgaggccattctcttgaggcttgagcgagacagagagagggggggcatggagatggaggtcccgacgagtgcttccatgggtgccatggggtcgcttctcaggaagctccatgtactactcactcccgaataccagcagctgatagagccagtgaaggacgggatcgagctcctcctacaagatctggaagccgtaaaggccgccatggtggatctgtcagagatggagactccaaccatgatggcgaggcactggatgaacgaggttcgtgacctatcttatgacattgaggactacatcgacaatacgatggactcctgctctaattcaggtgcagatttggaatcattcgactgcggccgaattggggaatttggagcttctattaaggaggcccggcaacggcacgagatctatgagcttggccgttgcacatcgagatttacctgtccccaaattccagcgccaaactggaaggggataaaccttgtcggcatggggaaatccaaggtcgagcttaccaacaagctcaccgacggttccttgcctcagctgaaagtagtatccattcttggatgtgcaggtgtgggcaagactggcttgccaaaccagtgttctgcgaacttcgagggcgattcgagtgtcgagcttttgtgcaggcctcaaggatgccagataccaaaaggcttcttcgaatgatgaactacttgc

SEQ ID NO: 26594 - DNA, 5837 bp, Oryza sativa
accgacggttccttgcctcagctgaaagtagtatccattcttggatgtgcaggtgtgggcaagactgcgcttgccaaacaagtgttctgcgaacttcgagggcgattcgagtgtcgagcttttgtgcaggtctcaaggatgccagataccaaaaggcttcttcgaagcatgctctcacaatttcgacgccataatcgactaccggctgatcgctgcacagtgcaagaccttattgacaacattcgtgatcatattcaagataagaggtatgctaagataagaggtatgctaagtttaaaagattcgtctcgcaatttacacgcaatctatgtaattagttattttttcgtttatatttaatactccatgcatgtgtccaaacattcaatatgacagggtgaaaaattttgccagcggatctaaatagggcctaataattgctaaactaagcaacaccatttttctcttatattttgtagtttagtcattgggccaccggcccaccatggcaaataaccgagttagcatgctacatagacaaaaatgctctgcgaaacatctcaaagtttaatgggttcaatatccagcctaataggtcggggattctagatggaccctttactatgttagcatgataaattttgaaattatttggcaggtatttcattgtaattgatgatttatgggaaacaacatcttgggatatcattaacagtgcttttcccaagggacaggactgtagtagaatattaatgacaacaactattgaggatgtagctctagagtgctgtgattatcaatctgacgatatctgtaagatgaagcctcttagcagagatgactctctaaacttgttcttgaacagtgcattcggctctgaacaaaattgttctgaacggttgagggaagtttcaactgaaattgtcagaaattgtggtgggctgccactaggaattatcaatatagccagacttttggcgagcgaagtggacaacttggagctatggcaccatgtgcagaaacatttattttctagtatggcaacaaatcacacttcagaagacaagctcagaaatatagtccgcctttgctacagatgtcttccctgtcgtttgaagacctgtctgcaatatcttacaatgtatccagaggggtgcataatctggaaggccgatttggtaaaacaatggactgctgaagattttatcagggaaacagaaagggaagatgccaatgcagtagcagatagctattttgatgagcttgtcagcaggggaatgatgcaacctaataacagaacctacagtgacatggtgttgtcttgtacagtccatcacatggtatttgatgttgtcaaggacatgtctgttgaagagaacttcaccactgcattagattactctcaacctattacaagacttaatttcaaggtccgtcgattgtctctccatgtcagcaataccaaatatgcaacaaaaccggtgcacatatcactgtcacaagctcggtcactcaacttctatggactagctgagtgtctgccttcgactttgcagttcaagcaacttagagttctaatacttgaattttgggatgatcaagaggagtttgatctcagaggaattttcagattgttacaactgagatacgtgcaggttacaactgatatgatcgttaagctaccagccaccgtacagagcctacaatatttggaaacactgcaactaaatgcaagagtagcgaatgttccatcggatattgttcatctcccgaaattattgcacttacgtcttcgagatgtggcaaatctgcctgacaacattggctgcatggcatctctatgcacgctagagtcattagacctcagcaataactctgaacaaaatgtgtggggtcttggagagatgacgaacctgcaagaactttatctcaactgctctacagaattgtctggccgcctgaagagaaatcttaccgctctagcttcttctctagggaaacttcgtaaactaagaactcttattctggctccttcttcaggcacgagcatgtacatggattgctcgagcatcgtttcatctccgcccctctgtcttcagagacttgagttattacctaccatttgcatcttttccagactgcccaaatggatcggacagttaaagagactccgcattctgaaaattgttgttagagaactgctatgcagtgatgttcatagcctcacaatgttacaggagctcactgttctctcattggatgtccagcaatccactgaagaaacaattgtctttaacgacaaggcattcccagttctcaagtatttcaaattcagatgtggtgtgctgcgtcttgcttttcaggcggaggcaatgccaaatctccggaagctcaagatagaattcaatgtccacaggggggaacagtatggtgatattcttaccggcattgaacacctgttgaaccttcaagagatcattggacaaattggagctgctgcgggtgcagaggaatctgacaagagagccgctgagtttgcgttaagtgatgccactaagaagcattcgaggatttctagattcaacatacgatggattaattgtgttgaagaagagtaagagcttctcctttcctccaataactgattttgagttttgaaataaattacagtcctctgggtagtagcaataagtattagaatatagaacataccaaaatttcatattaccaattggggacgtttcaacttataattactagtgcatcagctattgatatcaagttcgtttgtgtaaattaatttatttacaaagtataaattaaatacaaacaattattgaaaactggttaaacaatcacagtctagatcaatggtttgcttattgaacatataatcgtatttgctatataatatgtaagttttatttctgaagtacaattggatttatcataccgatataatacaaatatattaaaaatcataccaatctaaactataacctgtctgaaaatcaatggtgtatacatttctcttttgtttgataaatgttgtgatctctaatcctacaaaaaaatatggtgatctgtagctttcacaaagaatgtggtggattcttttcacctagttttaataatattagttccctatgaacatgttcatacaaataaactttaattctaaacttttttgtatattggtacaaatacagataaattaactattcttttaatagtaattgtaaaatctagaaaattaaattaatttaattattagatcaatagttcaaaattgggaattccaaggaaaacttagttatatgaggacacaatgcaaaaaaaaattgttatatgaaaatgtaattttttcttgttgcctctggctttaattgaatttactggtctgctagtgtcagggtttccaagatttcagatttacaaggaatatcttcaagttcaggtactctactttagtccccactatgtattttgttatataagaaaactatcacacaaataagttaatagttcatggatttaacattggtctccatctctttatcgtgttttaaagaggatacctgtgggtgtgtgtatgtggtggtacacacatgaatcttccatttaatacatgtaatcgaaaagcaagaattcatagtgattgatgtggctaacttgtctcgcgtgtctagagagaacttattaaattgctttaaaccaaaatttacttctatacaagtttagatatttataaagaaaacaaataaataaacactgtttcatattaggaaagttctttttttgtgaaaataatactaggaagttgacaacaggactattagttcaaaacccttgtaaacattttcttctttgaaagcacaaacacattttttttagcttttatatgatttctaatataatatgtagtaatataatgagaaaaatcgttgtgatccatatcattattacatgcttttttcattcactggaaccagaatattaggttttgatatgttaacatgtatttaacttactagacaaaaacctattatataggagtaaatttagcaaaactacagacactttgataaaattgtcacaaaattatatattcaggttaagtttgtcttaatctaatgatttattaccattttcctctcaaaattacatatgttagattctccctcccaagcatggttgtccttactccttacagaacttttacaatatgtagttttgatagttttgcagtaatgcagcttaaaaaatttctgtggttgttttgttaaattatttgtaattttacaaatttatagtattaaatatgatctattgggatcatatagttacaaatacgtacagttttacactgaagataagctattaatgcaatttttttagatgaagaaaagcaaaaggctaatgagccaagtgggacagatattacgattgaggacgagtcgccattttctcacgagccaaattatgatgttccacgggcatacaaggtactagttgtaacagacttgtgtgtaccagaatgcttccagaagttttcaattgaatcatttcgttttttatgtagtgaatattaattctatgttactaccatggtctataaacctattgtagactgataaactttttttttttggggggggggatttactttagactgataaacttattgtagatgtaaggaattaacacgttctcgaaatacagagaatgcttcccgaatccaaataacacttaatccaagctaaataaaatatttgactctgaataaatttatagaaccattactgcaaagctgtcaacacctgacggatggtatatgtttataggtggcaaaagtaataacagataaatcccatttcagtatccgctaatctcttggctgaattccgcttagatatatcgctacaatgccctggcataataagttttcaggttctgtgggcatttgcaaattttccgctaattctaaatattttgtaacaatgccatttgaatgatattcgtggtgatatttttgtaaatttgctagtggtaagtttgcaataatgattcaaaacagtggtaaatttgcaattgctcatgtgggatattttcagttcctcaccttaatcatcaacgcctcaacagctatggtgaagtaaatttacatttatgtatgcccagaaataaacacagtaaattgataaacagaatacacgttattgtcacctcggatgtgctttatttctgaagcaataatgatagtgcataagggtgtagtggcatctgtgacaattaatttaataagataacatgttgttcgtcattcataagatatcaagccgattttctgattaatgcaaacgtaaagatagcaacagtatacatttgtaataattgtaatgaaattaagctccttagatttcattatggaacaaaaaaaaagaacacatcattaccttttcagttttcactttgcctcattttatttaccgtgaaagcctaccataagagaagttgaataaattatgtccttttcctaccatggcaggggatcatgaatgattttacgaattttatgttctatttgcaaaaacagaagctgtatatgttgcaatgatgcacatttttactagttagtaccaatgacttcattcacaggcagagatagaaagcgaagaagttcctcacgcggaattagcagatgcctctcgcacaagcgattcaatcgacaatcgtcgacggcaacgccggtcaatcgagccttctttctcccgcgatcgcctcagccagccgaggaagcactcggtcgcgtccgccgtgccaaagttcggcgagtg

SEQ ID NO: 26595 - DNA, 6215 bp, Oryza sativa
gcgcaacgcggtgcgttgacggacacgccaggcacggcgcacgggcaagggaggtcgcgcgtggctcagtagcgacctggaaagagcggcgctgggtcgggaagggttcggtttgggctagacgcagatcaaacggttggtggacgatggatagagcgcccataaaaagaaaaagaaaataacgaaagggaataaaaggaaaaagagggagagggaggggctaaactgcaaaagtgaatgggagtggaattgagatgtagctctctatacgtttcggtatggggaattcaaatattttatttaaatatttgtttatttgattattcatcatttcccaaataaaactggctttacattatatcatcccaaattcatcctatatattttggatttgagaattcaaatatttaaatttgcatgtttatttatttattcatatctctacctaatgattgtagtctatattggattattccaaaattaacttaaataattgggggctttgatagtcctaaaattaattaaaatattctaatgggtccattattaatacaatagcacatcggttgaacttatttgtataacaaggtattttacatggacatgtttcatctattattccataaaatcaaattgagacttggtacaatattgatcgaaatgtttaattatacactcacataaacgtattttatatataaagcttaattcatttacatgaccaattattttatgttagtaaattttattccatgagagactcgatgaaagttctaaatattaatttaattattctagtggaacactcctatatatagagagtcattgtagtggcgactatttcatggttacttagatgtcatgacacttgtcacatggttccaatatttaatatttgacctataaattaaattagtaattaaccttctctttgtatggctttgttgtgttgtgcgtaaatatttatagggttcataatgaatatcttatttttataattattaattagttgtatagctttagcttaatattcaattgtaacaatttatagtttggcaagcaataataatcataacatccagcatgatgcaaaagttttaaaaagtttgaaattttagtgattttttattgtcagtaattttcaggatgttacacaaggcatatcaacaatattggctagaaagaattcaaagatatcagtatgaagaagatttggccaatagaattgcaaagttaatagaggagcagtttggacttaagcccaaggaacaaacttctgtgtatcggctgccatatcttgattgatttgatagagttacgttaccacaccaatacaaggttccagacttctccaaattttcaggacaaggtggtatatatacaatggaacacatcagccgattcctagcacaatgtggggaagcatcgactgaggaagctctaaaagttagattgtttccactgtctttgactagatcggccttcacatgtatttcttctttaccatcaaactctatcaaagattgggccgatctggaaaagcagtttcattcaaacttttttgctggcatcggtgagttgaagctctcagacttagtatccattcagcagcaagaaggagaatcagctatggaatatattaagagatttcgtaatgtccgtagtcgatgttatagtttgagtctaagcgatgagcagctggcagatcttgcattccaagggctatctacacctatcagagacagattcttttgccacgagtttgatagcctagctcatctaatgcagacagtatcggctcatgaaagccgattggaagaagcaaaggaagatcaattttcaagtcatcaagatcagaaagaagataattttgaagcatgagttctcatacaccaaaattggacggcatgtgttaacagtaaaatttggtaagaccctaagagaattatcacgtcgccaatagtcagattcctgctatattcggttaaggaaattaatctgttaaaggaagcttatccagtagtgaccgagttcaaggagaatgcggcatggcatgttatctattaattaggcattatttattagttttcttttatctttagaaaagtgtgtttggtgtcccatcaggactttatgttttccttttatgttttaggagagtttctttcttgtcctaaaaggactaatatctccccatgggtataaatatgtacacccggggttattgtaaaatatctccacgatcaatacaattcggcgcatcgccaccttttaccttttctacattattttatctttcggtgggatttggcacctgacgcggggctgtattggctttcgatctccggcgaaggggtaagtccaatgttccgctggcctaggcaattgtatcgtttacattggcctcgttcaaggctgcatcagtacattcgacctcttggattgctccggtttggatggtatatttgcctacatatttatcatatgtctctattaatctagtcttagcgtatcaatttagctctatcggttgcttctcgttttagggtttctgccggtatcggctaaatcgtattgctagattagattagcttagacatctaccaccctgaaaactcagtcattggcttgattgtctagatattacgtttcttttaatacttagtgctgcatcagttaagtttgatctactaagtcatgcttagaaacataatctctagcctgctttttgactataaataagggtttcatcggggtttcagccgatgagttatttggatgttgcatcggcttacaaggattgcatacaagttggatttagccgatagcaaaaaagatttcattgtttaatataatcttatggattttatgacgtcggacctccagccaatgtatgctttaaccttcggatcaatgcttattctattatatcatattgctagacgattggtttatactagattatattattgttatattatattatcatcagccgattgcctttatatcattatttactcaagtatcagaatctacattgggcatatattcgatagctcaaaactctatcgctatcggctggtatcagcatcggctggaattactccatcagcttgttagccgatcggctcattgatcttcaatttacatatcttgtcagttgcagggtcaaactgactgacatgcccgcatctcaccaacctttggtcctgcactggagctaagcaaatttcacatgccagtgtgtttttcgcgtcaacagaccctagtaaccattgttccccaccattcctgattttattattcatggtaattaataatctcttaattaactacgtagtaattagaatgaaaaaaattggaaattgggaaggatacaatgagaaaggacgtgcaaaccatggacgctattgcgtatagcatctaggcctggccacaattaagaacaacgtccacattctgaaccgcaaatcactgatcgatagtctggtttagcctgaccgcttgattgctccttatggtttagtcactttagattgattcaaaatcatgtcaactttattttttccatcagaaaatctttccaaaaaaactgttcaaataataaacttcatttgtcaaattagcacaattttcacaattgatcaacacccttatttttgcgacatctggagcaagaaaacacttcatcaaatttcacaatattttttccatgtactcaatatgacctaaggcatcttttagcttcatcttgtttagtaagcatgttgagcaattcaaaacatcatattgttcatttcactttttggcacaaatcatgtcaaacattgaactagcataaaaaacagtttgatatttttttcaataaaattttagttaaaaacaactcatccaaagtgtgtgtgcatgtcaactccaagagcgagagaagattttattctcaaatcatgtgtagcattatgtcacggccagaaattcaagaactagaatttccatgctggatgtgccttaaacccctatctaggaccaaccagggtacacaaacgacaatgttgacatacagatccacgtcttacaaatatataaaacattacaaatgcaacagaaagataaaaacgagccaaacttgaaagtttgactcctgcagcgaggcgaccccactccacaggtatccttgacggcagcgacgaaaccaacttctccgagaaagctccaactaggaaggacttcagctctggtgtggggaagagagagcaagactgagtactacccactgtactcaacaagtcataccggaagagaaggtatgatgcaggatatatcccagggaggctaaaggttcatttgcataaagcaggcatttaaaagcagaagttgaaagcagtaaaaatgttgtagtaaattaagcaatattaatcatcactgtccaatgctacaccatggtgcaacaaacccaaccaaccacttgaactacaccagttcattaagccaattattaaggatgagactaatcacgggggaatttgggttgatcgcccataaccacgggcacggctattcgaatagttttactctggccagaggtgtataactgtacccacaagacacgattccacatatgtcgccatgccccaaagtaccaccatggtactgctaatggggaaatcatgaaaatacccttcgcataaccctcccctaaccattcacaccacgctaaggtttcacccccactcctaacccggagtgggtagtcccctcgtgcgccgcggtgaatccggcagctggacaactggacaccccggctgacccaactccatcacgcccaccctcgccactggtgcttaggaaagggtcgagctatactacaagtcaagcaattagccactcccgcttgtggtaagcacggtaagtctttcagggtttcctgtgaaccggtccttaattaacatgggtgcgaccagcaaaaccatgtacccacagcccaccattcaatagcattttaattggataattatgaccaatgaaacatggctggatgtctcgagcacgtagctcgccataatgctaagtgtctaataatgtaattatcccatcatgtgaagtagtggatataagcatggctaagcatttcctaaaccaacatctagtcaaattaatacccaagttatcaatggtataagggaaacaagatatggctgagtaataggaaccatcccagatgacattgtaaaataatgcaatatttaatagaaaatgggacatttgtaaattgggcacaatatgatcaattgtatgatgtgccttgctcttgcgctgttgagacctctgcaacgtcttcaatgcaccacggagtgacgaaacggccgaaactatgtgacaaacaaagcacacaagcaaaacatgctataagtctactgaaacaggaaacaaaaccatttttaataaattctagggatttttatgaatttactaagacttaaatggacttaaacggagatcggatgaattagttatgatttttaaaagattctctgtgtttttactataaacagaaaagccttaatgatttattgcgcaataaacctaggcgaggatgacgtcagcaagggggggaggtgcggcgccggcaagcgggccccgcatatcagcggctcaagggggagggagtggcggttgactggtgggccccactgggcagcgacacaagaggggccggtccaccgtggaccaagtccacagggccgcgggtggtgcgccacatggtaccgacgtggcaccacgcgtgtcacgaccggaaataacccaacgggcgttcctgacgtgcgtgcattaatccttgtcccaggaggcaaggtacaccaaaagttgatacaattcagagtttaacaagcggaagcgtaaatagttaacttattacatgggcagcgaaggcccagcacacacagagacaaacgagaaacagcggaagactagggcgacgaccacaggcgcttgacggcaggcacgagctagacaccaaagccttcatcttcaaggaactcctcttctggacttgggaaaaattgagcaagactgagtacaaccaccgtactcaacaagacacacccacaaatgcagaataaatgcaagggagtacaagggaattataatataaagggttagggttgcagtaaacagcatttaaagacatttagttgctcaaagctattttgtaa

SEQ ID NO: 26596 - DNA, 1147 bp, Oryza sativa
gtgtagccttcatttgccctggagaatgtccatcgacccccgacttcatccatctccaatccgtgtacttttgtttatgactagactgagccacaaactaagccttacccactagacatgtggaagtacggtagtgctttgcaacagaggcccgaagaccggtccttatatggccgaggtgctaccatcaaaaccatgcaccccgagcccagcctaaaaccattttggggacttttgaatagagggagcggtgtgaatccaattccacaataaaccaacaattccagagtgtccaggtgatatgaatatttcccaaagtctatagttataaaaccacctaatgttgcctaattaacttgcgaagcatctacctaaaattatactagtggtactatgagtagagtgtccactagttggggttttgtttgttctagggtgaacaaggtaataataataacaataacaataataatatggtcataacaaaggtaaataggcatggctaaataaaacagtgataacgcgggaatttaaataaagcgataatgcaataatttaaatcaacataattttataaactgggattcaatatgatcaagatgatgtgtcttgccttgctcgtcttcccaaacgtcggcttcgacttccacgaagagcggatcttccgaagctgcagcgtctacacgaccaacggaaaagaaaaggcttaaactctaacaaattccacataacagcagaaacaaagcacaaaaatgggttcttgacttcttaaggaaaaaattagagacttgaacggtccaattccgagttcaaatggccaagttatggccatttgaagtttatatgctctttaaatggatatttacgaatttcttcatttaaattttaatttaaaatcgaattattgcgtcagccgggagagagggcgcgcggaccgggtccacgggagtggggcccacgcgtcagcctctcggtccacggtggaccgggagcacgcggctggcggcggccggcgccgtgggtcccacgcgtcagccgcacccgcgggcgcgggcggctgacggccgggcccacctggcagccgcgagagcgcgcccgaaggcggcctcgccggcacggccgacgggagaggacgcgcccgcgcccc

SEQ ID NO: 26597 - DNA, 25535 bp, Oryza sativa
tgcaagtagctcatgcacttttagggtttttctttttataaaccttttcaactttgtttatttcttttcaattattatttgggctctggaaattccactaaaatttatttacacattttaagcttttaggaaatatacaaaaatcctccaagcctcatttgacttttatctttgcacattttaattgttggaggctttcacatgaattttaattattctttgcacaatttcgaggatgaattttagagtcgatttgggacgcgacaaacctaccccccttaaacggaatctcgaccccgagattcggaagaactggcgaagagatcgggatgggctgccttcagctcgtcttcacgctcccaagtagcttcttcttctgcgtggttgctccactggaccttgcaaaaacggattacccggttcctggtcctgcgttccatggtgtccaggattttcactggcctctccacgtaggtcaaatcttcgcgaacttcaatctgctctgagtcggcctgctcggatggcactcgaagacatttcttgagttgcgacacatgaaacacatcatgcacgttgcccaaggaggcgggcagctccaactggtaagcgacttctccgcgccgagcattgatacggaaaggacccacataccgaggtgcaagcttccctttcgtctgaaacctgtgtacacctcgcaatggcgtgacccgaaggtatacaaaatcgcccactgcgaattccaggtcacggcgacggttatctgcataacttttctgccgggactgtgccacctttagattatcccgaatgattctgactttagcttcagcttctctcaggatatcagtcccgaacacttggctttctccaacttggtcccacaagagcggtgtccggcatttgcgcccgtacaacgcttcataaggtgccatttgtatgctggcttgatagctgttattgtaggagaactcggcataggggagactcttatcccaggtcttcccgaaatctaggacacatgcgcggagcatatcttctaggatctgatttagacgctcggtctgtccatctgtctgcgggtgataggcggtgctgaaattcaatcgagtacccagctcttcttggagcttcttccaaaagtgagaggtgaattggcttcccctatcagatacgattttcttgggaacgccatggagactcacgatcctagcgaagtagagctccgctagcttgttccctccataggtggtcttcacaggaatgaatcgagccaccttggttaatcgatccacaactacccatatagaatcatatccgccttgggtttttggaagtccggtgatgaaatccatcccaatttcatcccatttccattctggcacttggagaggttggaggagtccggccggtcgttggtgttctgccttgacacgctggcacacatcacacagagccacgaactctgcaatttcccgcttcatgctaacccaccagtatttctccttcaagtctaagtacatcttcgtactgccagggtggattgaataaggactttcgtgagcttccagtagtatcaactgtttaagttctctgctatctggaacgcatacccgatttccgttccatagggttccgtgttcatcctccgtgaaaccagcggctttaccctgtttcatattcttgaggagtccatgcatgtccggatcattcttctgagcctcgcggatttgatcgagcaagataggcttggcttctaacgcagccacgaatccacgaccaactatgcttaggttcagggcttccatctgttgattaagttcgggtggaatgccacggacgttaagagtgttgcaatggctctttcgacttagagcgtcggcaaccacgttggccttaccaggatgatagtgaattcccacatcatagtctttgatgagttctaaccatctcctttgccgaagattcagatccgactgggtgaagatgtatttcaaactcttatgatcggtatatatttcacagcgattcccaatgagatagtgccgccagatttttagagcatgaaccaccgcggctaactccaagtcatgtgtagggtagttgccttcatgaggtcgtagctgacgtgaggcataggctaccacatgaccgtcctgcatgagcacgcaccccaatccttggcgtgaagcgtcacaatacaccatgaagtcttgcgagtatccggcaagattaacactggcgaggaaaccagcttttccttgagagtttgaaacgcattctcgcattgcgggctccacacaaatttctcttctttcttcaacaactgtgtcatgggtcgagcgattttggagaagttctcgatgaatctccgatagtatccttccaaacctaagaaactgcggacttgagtgactgtcttgggtggcttccaatcagtgacggcggtcaccgtttcggggtccacagcaactcctttagcagatatcacgtgccctaagaatttgacttcggacaaccagaactcacacttgctaagtttggcatacaattgatgttcccgcaactttcccaacaccagacggagatggtgctgatggtcttcctctgattgggagtatatcagaatgtcatcaatgaaaaccacaacaaacttatccaagtattccatgaacactttgttcattaagttcatgaagaaggcaggtgcattggttaaaccgaacgacatcaccgtgaattcatacagtccgtatcgcgtggtgaatgcggtcttcggaatatcttcttcacgaatacgtaattggtgatatccggaacgaagatcgatcttggagaatacagtggcacctttaagctgatcgaacagatcatcgatccggggaagagggtacttgtttttgatggtaacttcattgagagctctgtagtcgacgcacatcctcttcgtcttgtctttcttctctacaaaaatcacaggagcaccccatggggaagtactcggacgtatataccctttttctttcaactcttccaactgtttcttgacttcggccagttcattggctgccatacggtagggtcgcttgtgcagaggagtggttcctggagcaagatctattcggaactcaatctctcgcttgggcggcataccgggtagttcttccggaaacacctctccgaactccctgacgatgggaatttctgacagtactatctgatgcagttctgaacttctgacagaggttggggtgcgaagaaaacaaccggttgttccggtcctcggtacagagtgacggtgcgtctcgcgcaatccactactccttgaaattgagccaaccaattcatcccaagaatcacatccaagttcttggtgtctagtagaatcagatccgagggaaaaggaatcccctgaatttctataggaacggcagggctataatactttgctatcataacccctccaggggtggtgatgagcagagggtttctaagcctttctacccccaactgatttttccccacgaatggcacagatataaacgagtgggaagctccagagtcgaacaaaatagtagcagggatggaatgaatgaggaacgtaccaacgatgacgtccggagttgtcagcacgtcctcggccgtcacgtggttcacacgaccccgaatgacatccttcccgccgttgttggggcggggaggcgcttgaccttgctgacgccttggcttcgggcatttatccgcaaagtgcccgggctcgaagcagttgaagcacagacgctgctgaccttgagcgtccctgcggccttgaccaggctgcacagttggcgtaggaggacggggcgcacgagtcccttgctgattctgctgctgctgcgcctgtggtcgtcgccctagtcttccgctgtttctcgtttgtctctgtgtgtgctgggccttcgctgcccatgtaataagttaactatttacgcttccgcttgttaaactctgaattgtatcaacttttggtgtaccttgcctcctgggacaaggattaatgcacgcacgtcaggaacgcccgttgggttatttccggtcgtgacaacgcggccggccatgcgggccacggatggacggccatgatctgccgaggggcagattgggcagctggggacgggcggcgccaaggccggcccggacatggcgcacggcggcggccggcgaccggccggcggcgcagcgcgatagcgcgcatgctgagaggggtggaacacacgggagaggaaaggagaggagagaaaagagggttctcaccgtgggttggccagtgcgggaagaggcgacggcgagcggcggacggcggggcgagcggttggatgacatccagagtgacctaggggagcaaaggagaggatttagagggagagaggagatccgcggtgagcggcaatgccagccgaaggcgggggaaatggaggcctcaccggcggcgcgagggaataggggctccgatggtagttggcggcaaccgagcggcggccgaggtggccccacgtggcggcgaagctaacggcggtggtggtgtctgtcacaccctgaaaatcataaatatataaattgttgtttaaatggaatttttagaaataattttaaaagtcttaaagagaagatctagttttaattaataaattccaatataaaaaggggccagataaaatttcattaaatactttgcttaattctataattcctagatttttctgggatttatttgagctaagaaagtatttttaataaatggaattgcatttaagaaataatttaaattgaaaaaggttttaaaaagtcttcttttggctttgggccgaaagtcggcccaaaagccttctctctctcctcggcccagccggcccagtccgcagccgcgcgcgcgcgcgttcggtcgctgacaggtgggtcccacctgtcaggtccttcgtcctccttcggccgccgccgcccgaaaccctagtttcgcgccgccgccgtctccttccaaatccggccgttcctttccttctccggccgaattgatagaggggaaatgatctccgggatctcctctaccttttctcctttggaatcatcggctaaatcgttttggaaagagttggattcgagttcgtctcggattcgttcttctcgatctttccttcctcgtcgccggccgccgtgggcctttgccgtcgcctccgagcccctttaaaaagacccccggtgtctcctctacccgtcgccaccctcgccttcgcctctcgtcgccggaatcgctctagcaccatgtgccctagcttcgccgtcgccgccgccgctccagccgtgcgccgccgtcgctccagccgtcgccgtcgctcgggaaggacgtcatcgtggtcgccgtcgcgtcgccgtcctcgtccgccccttcgccgtcgccggagatcaccggagcttcgtcgccgtcgacaacccgaaggtttccgctgtttcctcctcgtcgccgtcgtcgtccgttgttcttccgccgccgttttggtcaccggtgtgttcgccgcgtcgtcctctacgtgctggtgccctccgtttgcgtcctcgcgccgccgttcgccggcgagcgtgcgccgcccgagccgtctgctccgccgagccgccgccgctgtcggtgacgtcaccgctgacgtcatcggggtcgtccgccgtgagccggtcgtggaccgttcgatctcggccgtccgttttggattggttcgatctcggccgtccactcgcgtgaaccgccgcccgtgcccccggtccaccaaaaccctagccgctgacgcaataaacctccttttccttttcaaaaataattcattattgcgtcataattcaattttaaccgatttaagtgttttaatccgatttaatctttaaaaattcgtaactaattcatcttagctccgatttagttggttcaagtctctaaatttttctaaaattgagatctacacattaaaaatatccacatgtactgttcatgcttgtttatgtgctgttttggtgattttgctcttttctgcttagattccgtcgtttccggagagtccgttttcgccggagaagagtttgaagagttccaaggccagcaaggcaagtcacacagatcccaaacaaccctttgagcatgttgatcctatttaaagctattgtttcttttcaactattgcatttattttcgattgtcattgggtggaattaacctattctttgttatagcccttttgttcttgattactttattccttgataccttgggttataataatttgactggttgaactttatttatattggttcaactagatattagatataattgcttagccctgcttagaaacattagcacatttatgggataactaatgattcactattatttcatgatggcttattgatagttcacgatggtcaatcgtgattagttaattaattaatgtgccaactaaaacctgataatggtgggttgtgagcacatggttttgatggtcgtgctcatgacaattaaggaccggttcacgagtttcggttgtgaaacatttatcgtgccaaccacaagccagcatgggcaacggctttatcttttgtatagcatggttcattgcggggcaccagactgagaagtggcggagataagcccacgggggtcgctggggagtccatgccttgtttataagggggtgattatgatccaggaaggtgcgctgcagtggattgtgttatgtgaggggtattgtcacaactcctttccgaggtaccgtggtggtattgaggcacatggtgacatgatgtggggttgtgtcttgtgggtacagtggtacacctctgatcagagtaaaactatgagaaaattccctatctagcatcaaaaaaagttgctcttccctctatagcacctaaacttaaaaagttccctatctaggcacttctaaaatttcccttccctatgtagcacttctgttagtttttatacttgacggtgttaactagcgggagaaaagacggttttgcccttctttagttttcagacttgcctgtacatgatgttcgttattaattacttaagttaattaatgacaagtgaacccacaggaggataattattattatttttcaaaagagtggattgacatgttatatttgcagtgctacgttaaatcaagagaaagcacgtctaaaataccaacgatcatgtacgggcaagtctgaaaactaaagaagggcaaaaccgtcttttctcccgctagttaacaccgtcaagtataaaaactaacggaagtgctacatagggaaggaaaattttagaagtgactatattgggaacttttgaagtttgggtgctatagagggaagagcaacttttttttatgctagatagggaattttctctaaaactattcgaatagccgtgcccgcggttatgggcgggtcgaacaatgtctttcgtgattagtcccacacctctcatcatagtaataaatgctttaattggtaataatttgattagctcctggtttggaatggaatattcctggtttggagatagaactgtgcagccgggatggttgttcagaatggttgggcctatacaacagggtatgttgtatagtgttggattaatattgtttaattattactcaactgttttattaaattctcaaatgtttgctaaatgctgtttttgcaaatggaaccctattatgccatcctttgttatcctgtgcacttgcatatttgctgcgtggcttgctgagtatgtcatatactcaccttgcaatcattcatcagaggaagagttcttcaatgaggctgatggtgtggaggattaggtgtactcttggtcaagctgcctgtggagtggagccgtctgcgccgtttattttttttccgctgcttagatctttattgaataagaggaactatctacctctataatgacattttattcgcttattaattagagtaataattgtactctattatcaatttgttattgtgtgcctcggctgattcctggacgagggttcacacacatgtaagcgtttggaattttggatagaaattccgggcgtgacagtgtcaacactttcaaagatatttgagccttggaggcgaaatcacaacactttcagaagagataactaaactgaaacgtttggagacacctgatgtggagattatggataccccatatctacatggcagttatagttaggttggatatagggtaccgaatatagataaaatatctttataggaactcgggtttgtttcttaacttgtatgtcaagaaagtacccggggtcttagttggttacgattgtattttatctgtaacctcatgttccgttagggatatggactatattttgttatacggaccccttctcctatataaggaggggtccgggtccttcttgagacacgatttcctccaagatcatataatcaataacacactcggcggattcatccccggacagaagtagggtattacttcttgaataagaaggcctgaacctgtataaaattccttgtctccaaacccatccacttttctaccttgatagccacccccttttagtattgccgaaatcttgtttcgacagttggcgcgccaggtaggggttgcgtcaagtttttcgccgatcagtgcgatgggttccgtctctggcatcgacgacttcgtcttccctcccggacaggcgtttcggttcggcagcctcgacttcatcaccaacaacttcggcaagatctctttcctcgactcggattcgaaccagtcgggaaagaaccaggtctcagccccgttcggaattccaaactcggccaagatctaccccaagtacatctcgatcgagtcggcttcaaaccactcggacgagatcccatcttctccaacaccaccagatcaagacgatggggcctacccaccgatcctgatgaaactccccgacgatttggcggccgttttcaccacaacggcgtcttctccccgtaggcctaggcggaagtcggctttaacaccgatcccgcctagctccagggaagtcggcgtcatactccagccactcggcacagtttcaacggatcaattggaaggctacttcagctcccccggcgtcgactcgcgtccaactgagatcgtggagtacgacgaattcggctaccgccacgacaaccacgacctagacgacttcgacgaaagcttggaagacaactatacccctctctacttcggcgtcttcatggccgacaacgagacggaagaacaacgccaagcccgagaagccgaagcacgacgcgtacagcaagaagccgagcgacgccgactggaagaggagcgtcaagtacaagaacaagaacggctgcggtgtgagcaacaagaacgcgagcgggctgcaaaggaggccgaagaccgacaacagcgagccttggatgcatggcgacgagcacaagatctcattggccagcaaaacgttgaggggacaccggtcttccgcaccccacaacagaacgctatcgccgcgatcacccttctcgacacccttcttaaggaaaacgaactcaatcaatccgatcacgtcgtcaacatcttaaaccagaccaagaccatgatcgcagctacgatcccggttaactccgaaagcgtccgcacgccgactggcagccgggttccccatcttcgatctcaggattaccaccagccaagcctcagcatcgccggcgcaggatccaatcgcaggagcaggggccacaacgagcgatctgttcactcgcctcccgagcgacacagggagcgaagagttgaacggcctcgctcgccgccacgccgacgtcccgtcgatcttcgcaacacgatcattcagcgccgtgcagcacgaggtcaccgccattcaccggatcgctgcgacgacgacgtggatggagtcgccgccttcaccaacgacctgcgtcgagtggattggccggccagctttaagctgactagaatagagaagtatgacggtaccaccaatccggagtcttggctcaccgtctacggtctcgcaatccgcgcagcaggaggagacagcaaggccatggcaaactacttacctgtggctttagcggattctgcccggtcctggctccacggattaccccgtggcacaattggatcatgggcagaacttcgcgatcacttcattgccaacttccagggcaccttcgagcgccccggcacacagtttgatctttacaacgttattcagaagtccggagaatcccttcgagattatatccgacgcttctctgaacaacgaaacaagatctccgacatcaccgacgatgtcatcatcgccgccttcaccaaaggaattcgccatgaagaggtggtcggcaagttcgggcgcaaacctcccaagactgtcaaacttatgtttgaaaaagccaacgagtacgccaaagccaaagaccccattatcgcatcaaagcagtcgggccccagttggaagccaaagaaggatgcaccgaccacaggagggggtggaagtaacaatcacaaggaccacaagcgtaagcccgaggaacttgttgcgaccactacacactcctcccgacaccgttcgtgcgtcaacatgtacgacaagatcatgaactcccaatgcccgcatcatcccaactccaaccacacggccaaagattgcttcgtctacaagcagttcgcagagcaatacgccaagaatacacggaagaactctgacggggagcaaagcacgtcgaaaaagaaggatgatgatgatgcccgacaggttttcaagaccaccgcaaagagctcaaccacatcttcggcggccctttggcttacgaatccaaaagaaagcaaaagctgactgaacgggagatcaacgctgtccagcccgatacgccccaatatcttcgatggttagagacaacaattaagtttgaccgctcggatcaccctgaccgagtggtccacccggggcggtaccccttggtactagacccagtggttcgcaacgtcaagcttcgcagaaccctcatcgatggtggcagcgtattaaacatcctcttcgccaagatcctagacgacatgcagatccctcgcaccgagttaaagccgagtaatgcgccctttcacggagtcatcccagggctatctgcaactccactcggccagatcactctcccggttaccttcggtacccgggaaaactttcgcatggagaacatctgcttcgaagtcgctgatttcgagacggcataccatgctatactcggacgcccggcgttagccaagtttatggccgtcccgcactacacctacatgatgataaagaagcctggtcctcgaggagtcttatccctacgaagcaacattaagcaagccgtcacatgtgacaaggaaagttgcgagatggcccaaacccgcgagatcgcgaccgccatagaagacatccgactggctgcaaccacggcaagcgaaggagaggtgcctacaaccaaggtttcaaagagtggagaaagcgaagccaagactaagaaaattcccctagatccttctgatcctactaaaactgctgtaataagcgccgagttagattgtaaataggaaagcgcgctcatcacctttcttcaaaataataaagatatctttgcatggaaaccatccgatatgcctagtattcctagagaggtgattgagcactctttgcacgttaaggaagacgctaaacccatcaaacaacgactccgccgctttgcacaagacaggaaggatgcgatcaaggaggaattaaccaagctgttagcagcaggcttcatcaaagaagtccttcatcccgactggctggctaacccagttctagttcggaagaagactgggcaatggcgtatgtgtgtcgattataccgacctcaacaagtcttgccctaaatatcctttcgggttgcctcgcattgaccaggtagtcgactcgaccgccagctgcgagctactcagttttctggactgctactcggggtatcaccagatccgactgaaggaatccgactgcttgaagacttcattcattacgcccttcggggcctactgctacatcaccatgtcattcggactaaaaaacgcaggagcaacttatcaacgcatgattcagagatgtttctcgactcaaatcggccgtaatgtcgaagcctatgtggatgatgtagtcgtcaagaccaagcagaagggtgatttgatctcggacctggaagaaacctttgcaagcatccgcgctttcaggatgatactaaaacctgaaaaatgcaccttcggagtaccgtcagggaagctgcttggatttatgatgtctcatagagtcatacaggccaacccggagaaggtcaacgccatcctcaacatgaaaccgccaagctcccagaaagacgttcaaaagctgactggatgcggttcgtctcacgactcggcgagcaggggatgcccttcttcaagctgttaaagaaagcagacaatttccagtggggacccgaagcacagaaggccttcgaagacttcaagaaactcctcaccactccaccagttttggcctcgccacatccacaagagccgctactactgtacgtatcagccacctcccaggttgtgagcacggtcctggttgtcgagcgtgaggaaaatggccatgtccagaaagtccaacgaccgatctacttcgtcagtgaggtcttagccgactccaagacgagatatccccaggttcagaagctgttgtacggtgttttgatcaccgtcaggaaattatcccattacttccaaagccactcggtcacggtggttacatcgtttccacttggtgacatactccataatcgtgaagcaaatggacggatcgccaaatgggccttagaactgatgtctttggacatatcgttcaagccacgaacttcgatcaagtcccaagctttagccgacttcgttgccgagtggaccgagtgcaaggaggacacccctgaggaaaagatagagcattggaccatgcattttgacggatcgaacaggctttcgggcactggagctggagtggtcttaatttccctaactggagaaagattatgctatgtgctttggatacatttttctgcatcccacaatgtcgcggagtacgaggcgctcctccacggactacggatcgcaatttctttgggaattagacgtttgatagttcgtggagactcacagttagttgtcaaccaagttatgaaagagtggtcttgccttgacgacaacatgatggcttatcgacaagaggtacgcaagctggaagacaagttcgacagactcgaacttacccacgttcttcggcacaataatgaagcagccgacagactggccaattttggatccaagcgcgaagcggccccttcggatgtgttcgttgaacacctttatgagccaaccgtacccaagaaagaaacggttgaagctgcagacactcaagacatagccatggttgaagccaacaagagagagcccctcatacgatttttaacttcccaggaactcccacaagataaagatgaagccgagagaatttccaggcgcagcaggctttatattattcatgaggccgagctatacaagaaaagcccatcaggaattctgcaacgctacgtatccttagaagaagggagacaattactgaaggacatacattctggcatctgtggtaatcacgctgctgcacgcaccattgtcggcaaagcttaccgacaaggctttttctggcccactgctgtgtccgacgccgacaagattgtgcggacatgcgaaggttgtcaatttttcgccagacaaattcatctaccagctcaagagttgcaaactatcctgctgtcctggccgttcgcggtttgagggcttgacatggtcggccggttcaagaaggcagtcggcggttacacgcatctatttgtggctatcgataaattctccaagtggattgaagctaaaccggtcgtcacaatcacggcagatagagccagagatttttttcatcaacattgtgcatcggtttggagtacctaaccggatcatcaccgatgtcgcgtcccaaaacgactctaaaatacatcctcaaaattgtgcatagaataattaaaattcatgtgaaagtctccaacaattaaaatgtgctaagttaaaagtcaaataaggcttggaggatttttgtatatttcctaaaagcctaaaatgtgtaaataaattttagtggaattttcagagcacaaataataattaagaagaaataaacaaagttaaaatggttttataaaaagaaaaaccctaaaaagtctttcccccccccttcccctcttgggccggctcggcccagctccctccctctctctcctctcccccgcggcccatccggccttcccccgcgcgcgcgccgctgacgggcgggcccgcccgccaccctcgctgacgggtggggcccacccgtcatcccctacctcgcgccgctcccgccgcctcgcccgtgccctagcgccgccgccgccgcggattccgccgcatcccgccgtccccgcgcgcaataaagagggggaaatcactccccgtgattccctctccctttccccccacttttccctctctctctccctcggattcgtttggaatcactcccgcaaacttcgccggcgcatcaatggcggccggatcttccgcggccgattccccctcatccggccgctctctccccctcccaaccctatataaacgctccccgtgcctccctcctccgtttccgccactcgccgctctctctccccgtcggaatcgagctcgcgccgtcgccctctctctccgccgtcgccgccgagctccggtccgccgccgtcttcgccccggacctcctcccgcttcggcatcgcctccttcggcttcgccgcaacctcgccgacctcggccactcctccgtttcgcccgccgaccgccggaacgccgccgtcctcgtcgacccgagccgcgccgccgccttcctccgctccggtcgccgttcccgtcgtcgccgtcgacccggggtgagccgtggaccgccgtttcgcttcccccttccctcccctctctcggccgccgctccgccgtgcctatggccgccgccggcgaccataggggcgcgggcgcgccgtctcccgtcggccgtgccggcgaggccgccttcgggcgcgccccgtggctgccatgtggggcccggccgtcagccgcccgcgccctcgggtgcggctgacgcgtgggacccacggcaccggccggcgtcagccgcgtgcacccggtccaccgtggaccgtgaggctgccgcgtgggccccactcccgtggacccggtccgcgcgcccctccctcggctgacgcaataaatccgattttaaattaaaatttaaatgaagaaattcgcaaatatccatttaaagagcatataaacttcaaatggccataacttggccatttgaactcggaattggaccgttcaagtctctaatttttccttaagaagtcaagaacccatttttgtgctttgtttctgcttgttatttggagtttattagagtaaaagccttttcttttccgttggtcgtgtagacgctgcagcttcggaagatccgctcttcgtgaaagttgaagccgacgtttgggaaagcgagcaaggcaagtcacatcatctttgaacatattgaatcccagtttataaaattatgttgatttaaattattgcattatcgctttatttaaattcccgcgttatcactgttttatttagccatgcctatttacctttgttatgaccttattattattgttattgttattattaccttgttcaccctagaataaacaaaaccccaactagtggacactctactcatggtatcactagtataaatttaggtagatgcttcgcttttaaataggtaacattaggtggtttttcaactctagactttggggaatattcatatcacctggacactttggaatggtttggtcattgtggaattggcttcacaccgctccttctattcaaaatccctaaaatggttttaggctgggctcggggtgcatggttttgatagtagcacctcggccatataaggaccggtcttcgggcctctgttgcaaagcactaccatacttccacatgtctagtgggtaaggcttagtttgtggctcagtctagttataaacaaaagtacacggatggagatggaagaagtcgggggtcgatggacatctctaggacaaatgaaagctacacgagctgcggcccggtagtcgagatgtcatggcacagggccggtgtcctgctgctaggggctcagtcctgcctccctgtcccggaggttccggccgtaggtgggattgggtcggtactcttgtctatggctaggatgggttggaaactatgtcacgtcttccgtctgtataccgtggtggtatgtggcacgtggttgcacgtgaggaagatgtgtcttgtgggtaaagatgtacacctctgatcagagtataatctattcgaatagccgcgccctcggttatgggcaagccgagcaatgtacccaagttagtgttttaattcttaaaacctgcttaacaactaaaaggtggaatggttggcctgggttggcttgggacgagctgggacccagggtcgggttgccagttcggtctgaatcatcgtaggccttgggttaaggcaggttcgtgtgggttcacggccttgataaataacattgtatagttctaggatcgcatttacaaaatagctttgagcaactaaatgtctttaaatgctgtttactgcaaccctaaccctttatattataattcccttgtactcccttgcatttattatgcatttgtgggtgtgtctggttgagtacggtggttgtactcagtcttgatcaatttttcccaaacccagaaaaggagccccttgaagatgaaggctttgggtttagctcgtgcctgccgtaagcgcctgtggtcgtcgccctagtcttccgctgtttcttgtttgtctctgtgtgggctgggccttcgctgcccgtgtaataaattaactatttacgcttccgcttgttaaactctgatttgtatcaatttttggtgtaccttgcctcctgggacaaggattaatgcacgcacgtaaggaacgcccgttgggttatttccggtcgtgacaaccgataacggcactcaattcacaggcggagtatttaaagacttttgtaaagacttcggaatcaaaatctgctatgcctccgtatgagcaatgggcaagtcgagcgagccaatggcatgatacttcaaggaataaaggcacgagttttcgaccgactaaatccctatgccagcaaatgggtggaacagctaccatagtactttggtccttgcgcactacccccagtcgggccacgggccagtcaccattcttcctagtctatggggcagaagcaatgttgcctagtgaagttgaattcgaatctttgcgttttcgcaattttcgtgaagagcgctacggagaagaccgagtggatgacctgcaccgattggaagaggcccgcgaagcagccttaattcagtcggcccgatatttacaagggttgcgtcgttatcataatcgtaacgtccgatcacgagctttcctagtcggcgacctggttttgaggaaaattcaaactacacgggatcggcacaaattatcccctttatgggaagggtcatttataatctctgaagttactcggccaggttcctatcgactcaagcgtgaagatggtacacctatcgacaactcttggaatatcgaacatcttcatcgtttttctgcttaagtttatctctgtatttccctgtcttgactgacaacatcaagcttctccttgaagttatcagtcgggggctactataataataatggagtgtgatctttatcaattcaatttgcttacttggtttatcattgccttgctcgatttttcaacttagtttacgaggactgaaagtttttaatagcttttgcgggttctaggatcaacaaggcttgacaaaggcttttaagaaatcaacagctaagtatgaaacaccaagcacagcataaatataccagtattgtacaaattgtgcctccatcatctatcatcaaaatcaattgatacatcaatcagtgtcagtcttttcatcatcagaactgccagggccaatctgccgaagatcggtatcttgaaaccgctctaccacatcaaccgcaattttgtcggctgctttctgtgcatcgttgatgagatcgagagcagcttcttcgctcgtcccgtctgcaaagccatcaacggcatcaatgtcaatcttcgggtacaaggacttggtcatcgccagcgccaaacttgctcccatactcccggcttctttaatgttcttgaagtacgtgtccggagcgactctcaacttgtcgaagacttcagaagcatcgaatctactcggaccattgttattaaagaacatcgcctagacaagtagagtagcggcgttggcaacctcgtccctggctccttcaagtcttttgaatttgccgactaagacgtcaaactgagcttgcgatttgatcttgcggtctacatcaacaaaaccatatcaatgatccggcataccaaagagaaactcagagtattgactgacggtaccttcaacgtccttcaggggcgagtccctttgtttggccagctcagctttctcattctccagagcctgaatctgtttctccagtcgggatatcttggcggcttgcactgtattgtttccagacaattaaagtcacaacgatgacagcgtaaactaactggataagttttgtgtttaccttttgacgagccgcttagttcgaaattagactcttgaagttgagcaatccgatcccatagatcgtgctctgtcttcctggcgagctctttgacttcgctcagctgatctctaacagcttcaagagtccctagatgaggaaccaattttttcagggttatggtctttgcctcattcctgagatggattctctgcatgatgactttgtcaatgatcttgccgagaaggaaacgaggtagttgaggtcaggagtcagaggacttacattgacaatacgagttgcttcaccaagtgccttcttcagctggcacacctcttcatcctctttctgccggtttattattatgccttcaggccgcaagtcatcattccaccacttgactaggatgggagggcgagagtcttcagctgctcttatccgaggaatttcttcttcatcgccgaccagtggtcctgatgcatccacggatgaaagtcaaataatcaattgaagttactcggatcagcatggtttaaggcaaggtgttacctgtgataattcccgaacgagggcgagtagattcctgtgctttagccggggatccaggccttgggtcgctaccagcgtctggcccttgagagctatcagcctgagcttcgacttccgggatttcttggcctggccctgtttccgactagtttccagtcgggggctcctgacaggcttcggtttcagcctcggccgactggtttccagtcgggggttggtcacccgggtctacattgtcggttgtcggctagttatcactcggatggccttcgacagtcggcccagtttctttggaggaactcgtctccgtgttagccggattagagtcctttctagatggatctatgtcggatggtttcctacaagtttttgttatcagtattactttcatactgggagcgcatcaaaacaaggaaaggcgttaaatggttcgtacctggaggattttctaatctttggcatggggcgactagacgttttcttctttggagcagcatgcttcggcggttttctgggtgattcttcatctccagatttcttgccattgtcgccttcgtcgtcgctcagcactaattttctcttgcgggaatctgattgcccggctggattggaggttttaggctgaggttcggacctaatcttcggtcccccactcccctgaacggtctgatgacgaggagatcggcgctgagcaattggggggtcggacttcaccaaagcaaactcctggacaggatacccgccactgtcagttgattcaacaggaagacaagactatattttgagcaaagttggaaaattttgatacataccggtggaggtggattgaatgcgttatatggtacgactggcagcagatgcgtatagctgacgacaatggcgttagagaagattttgtacatcctctccttcatgatcttaaaatccagggagtctgagtcttcgtgatttggatcatgtttgccatcaaattcaaaagccgtgcgggatctctctttgattggagctagccgacttttgatgaaatgccgagtgatctgctccccttgcaaaccttgctctttgagcttcagcatatgttccatcagttctacagcttgggcagcttcatctcccatgggcagcgaattccatgtgtcttggtagaccggaggaagacaggagtactcggggagtgcaggctcagggttttgaacatagaatcagttggcatgccagcctttgtttgaagttttgaagggcatagagaagtatttctggctcaaagttcccctaagttggaaaccagcccctccaacaacacatggtttgttcttatttggctggggtttgaggaagaaaatgcagcggaacagagcaaaatgaggcctaatgcccaggaaagcttcacaggcgtggacgaaattggcaatgtgaactatggaatttggattcaaatgatgcaagttgatcccataaaaattcagtatcccacgaaaaaatctcgaagttggaacagaaaatccgccataaaagaaatgggaaaagaccacgacctcatgtgtatcaggggttgggaaagcttcaccaaataccggatgccacccgatgatctccttcgccggaagaacgccgtgcgccaccatctccttcagattttcttccgttacatcggacggcgcccattgactctcgaaactttccttttcttctgccatcgattcgacctgaatgggttgatttggttcgaggaatggctggggagggatgcggaatcggagcggtgggtgcgcggagaaattttgtggatttttgggaatggattggggcggattgacgaaccctagtttcgccgacgcagctctgtactgtagcaaggagtgggggaaatggtgagagttccggcggggaagacgaagcgtcacttagacttcggtgttttgttaagggtatcgaaggtgctaatgggcctaggcctgtacagtacttcagcccaatatcattaacagcgtggcccgttgtgatccctagggacttaggcattttttgctttggcaatttgtgctcacaatggtgtgacccgatgttgtcaaaatcctttttctcgcggttagataattctttggaattactacgatgcaaataaaaaggtgcccgacaaaaaagtgttatactacttttgcaagcctttttaggctacaaagctgtttgggttgatttgagatggctcgttttttaatagtcattctcttagcatgttatatgcttgctttgattatggtgaaagtcatagcttaggctattagacttgttaattaccataattttttataatatttgatggatcattttaaagagtttttactcggattcttgtcaaatatacctatttgtggaccctttgagtatcattcactcgggctctttattcttgatataataaggctgaaaagcagtcggctggatgtttattgaaagccgtacatgcttggctatatgatgtttggttgtgaaaccatttggttcttgactacatgtttagttttttaactaatcatatagtcgggggctacacctaattatgtgcatctattcgatgcaccatgttttattttcgcccttcacagtcttcgattatatcactcggcaggctggagtagcaagaattaaagcactcggattattcttgagaaggctatttcgtcgactgcaaaggactcgggggctactgtggagattatggataccccatatctacatggcagttatagttaggttggatatagggtaccgaatatagataaaatatctttataggaactcgggtttatttcttaacttgtacgtcaagaaagtacccggggtcttagtcggttacgattgtattttatctgtaacctcatgttccgttagggatatggactgtattttgtaatacggaccccttctcctatataaggaggggtctgggtccttcttgggacacgatttcctccaatatcatataatcaataacacactcggcggattcatccccggacaggagtagggtattacttattgaataagaaggcctgaacctgtataaaattctttgtctccaaacccatccacttttctaacttgatagccacccccttttagtattgccgaaatcttgtttcgacacctgatcttaggagaacggaggtgaatatcgtgtcaaccgaagtcatcaagctactctatttaactagtctgcttggaaagtttaagcttcaaaataaagccaagagattgaacgaactgcagaaatttttcagcactgctatacatacgattgtttttatacgacatttgtacgatgaaacgtttctctcctaatgatttttagcgttgaaacggatccctctccactgctgagcccatatccaaagcccaacagctcctgacttcctagcctgctctctcgttggcatgcctgcacagccaaccaaagcaatcttctttctaattatatacttcctccgttttacaatgtaagactttctaacagtgggcaatgctagaaagtcttacattgtgaaacagagggagtattaagcaatcttcttcctaaataaatcttatatagttattgtacttagcgctcatttatcatgtggcaggttaggcaaattactcaaacatttataatcccaccttggacaaggatagcatcaaccctagttggaagtactattccatcccataaaaaagcaaatcctagctacgaacctggacacgcatatgtccaggttcatacctaggattagattttattttattttattttattggatggagagggtagattctaatggccacaatcggaattggatgcagaaaaagttcatatacgaaccaatgtcaaacaagatttacatatgtttggatagagagagaggtcctagagacaaacttaaagccaaagtatagtgctgctcaagtttctctgaatatagatcttcctgaagtcctgacttcctgctgcatatagatctttaatgctgacatgaacgtatgatcggtcatcttaatcacttcttttgtttatgagagatgcttgatgcatgctccacggcaataatctccttttattttctttgcctgatgttccatgatcagtgagctcttttctccttccattattgttggtacaatattgttcttttgtaacattcagtttttacaactttggttaatgtgtcctgccaacgcacagagacactatatccaagaatttttattttatgacttgattatatggttagataatgttatgtaagtgtagaatcatgtgacgatttaatcttggtgatgaacaattgtcaaaagtaagttgtcgacgggtggtacccgtagaccggatatagagggtattggggtacgttggtacaaggatctacgtaatacgacatcaagcagacaggagacaagagttatactggttcaggccccttgataggtaatagccctaatccagttgatgtgggattatatggtgaaaaacacaggttacaaaggaaacaatggaactcgtcggatccggcgagatcgtagtcgagttggttcgactagatctcgatggcttggctcctcgcaggctccggcttcgtaggctgtgtgggttgtgttggctctgagattcgatgtcataagcccttcccgggggggtcccttttatatcgcagatctggaggtctccaagtagaacgcggaggtatcagaccctatacgatacgtcaatgacccagtcctgtccgagtaggattcttcccatctgtagattccgtgaaaggtttccttagaatatacaggaagtatccgcatgcgcgtgggtatgccataccgatatgtaacgtatatcgaagggtaaatggtatgcctaacccgtaaccctgacataagtgtttattgaaaatacagtgaatagtatattcagatattagtgaacggttttgttggcattgtgaggccagtcagaccgggtgggtgccaccgatcagaccagtggtggtttgtcacgcccggaaattcactagtaatttccgaactaatttgtgcataaaatcctcgtccaggaaccagccgaggtacacaaactgacaatttaatatacaaatccatcataataataacgttacatacttacaaaagaaaagaaaaacagcagcggaattaacggtctagcgatggcttcagctccactcccacaggcagctcaactggggtataaaccaaacgtcttctccttctggatcctttatcttcaactgaggtttgatgattattgcaagaatgagcatatgacatactcaacaagccacacagcaaaatatgcaagtgcacaaggattccaaaggatggcataatataggcttatttgcaaaagcagcatttagcaaagatttaagataagtaaaacagtagagtaattaatcatcgattttaatcaacactaaacagcacacccatgctgcacaggcccaaccatcctgaacaaccatacccggctgtacagatctaactccaaaccaggagctaagcaaattattaccagttatagcatccataattattgtgagaggtgtgagactaatcacgaaaaacattgctcaacccgcccataaccgcgggcacggctattcgaatagttttactctggccagaggtgtaccactgtacccacaagacacaaccccacatcatgtcaccatgtgcctcagtaccaccacggtacctcggaaaggagttgtgacaataccccttgcacaacataacccattacagcgcacctttcctggatcataatcacccccttataaacaaggcatggactccccagcgacccccgtggacttctcgccacttctcagtctggcgcactataatgaatcacgctatacaaaagataaagccgttgcccacgctggcttgtggttggcacgataaatgttttacaacagtagctcgcgaaccggtccttaattgtcatgagcacgaccttcaaaaccatatgctcacaacccaccattgacaagttttaattaccaatt

SEQ ID NO: 26598 - DNA, 37971 bp, Oryza sativa
catcatcaacctgaaattaacgatggcattctagtaaattcaaaggttgtgacagaaaaacagacacatgaaaacagcagacatatgaaaagctgtacctccacaaatcctctccctcttgaactagggagaggacaacagaagttcagatattcaatatcatcatgctcaacgtcatcaactatattatcggtgtcttcctggaatatacaactcccttcaaatgagcaaattagcctgaaaacatgagatgatcaatctttagatgacaagtaagcttaagcaaacatcaacctatgtctccatcaagaacaaacatatgtaaactgtagatgcaaactggcaaagtaccttgaggaatcactgactaggttcaagccttctaccctgaaattcacttttgttgaaaaaggagcagcaattggtctcacacataaaatcttgcagtaatgatgagcactgtttgcaagtggtctgtccaacataagttgacctgcagtgatataaaggagtggtgagaataacaaaattccgatgtaaaatatgtataatagaacttgaagagcactgcgctaactaatcattcgggcttaccattatgcatgaaagctatctgatgccttaccattacaaataccaaaccatatgcccaaaagttgccggtggaactattcataagcttatccaggtatgacctcatattatcagagagctgtattaaataatatgaaaacatcaagctatcaagcattaaacaaaaagatcattgtcatgacatgaaataattatttgaaaaatcatacctctttccatacaaactcaactaagcgaagatatactgttaaaataatacaaccaggtctaatatagctctctatatcactagggctactggacaaccaaccaaaaatctgaaattcaagattgaagtgttaaattaactatatttactcttccaccttgctgagggaatgcataatttacctgtgatcgcaaaactggaggtaaatcactaggaactttctcgaaaagcttgaagacaattttatcagtccgacactgcaagcattcataatgacaatcaatgtgtgtgtgtgtgtgagagagagagagagagagagagagagagagagagagagagcacacgcatttcaacatatttgaggtgcaaatccactatgcaatattacaaaatagaaaatactggcatttggcatctcaatacgtatgtactagaccgactgttgttatcagtagaaattctctttcttcatgcacttctttatactgatcaaaaggtagttcagttcaccttgtttatgtggcatttatgtgagaaacagatgcgatgaattagttagagacatttcactggtgcagatgagtcagttaaatttggatctgggaaaatgtgcattctgttcaaatttctctgcagacttaatgtttttggttcttgatgatatctgcaacaatttttctagtaaaggtactgaaaagtcatgcacgtgtaagtgtgtaacttttaagttcaaaatgtacagttaagttcatacttatataccccttaaaacagaatctgaagcatatctagtactgcataaattaaggcatgtttgacagcactccaacccttgtagaagtgcactaaaatccccttccagttcaaaatcccacttgaactaatgcccacttaagatagttatttccttatttggtatgtacctcttgttaacttgttatcaaaagataaggatgttattatagaccaataagtcgtgagcatttgaaaattgaagcgatccctttagttttgggaaactagttttctttacattaagttgcaaggaacaaatttgcaaacctgagcatctccatttgagcttgacagtgactgagctgatgttgaatctgaattgccactagtctgtggtgggctttgagtagaatcttggtgcatccatgatggacaattgggagaatcagttgtcttgaaagctggtgtaggtgaaccttcatacccatcctcgaaaccttccatgccaccataagtgtcattcaaatcaaaatctttaaatttgcatgctggagggtctgtgaaaaaaagccactagtgtaacttaaaatcttcatttggaaacattcactgaagggctagaaatgttgtgcatctcaccaggagttgcaacagtgggagactttgattgtactggtacaacagatgatgatgccaggccacattgatcaccgttcacaaaaggcatcttagagttagatggccctgcagcctctgctacagcagtatttaccaaagcattagctgtttcagaggtcccagcatttgatccatcttgcatgctttggcatgcctccaagagtttacagagttcttttggatccaatgatttggcaactgcccccaggtttctcaaaagaccagatatcaactcctgacctcttaaatgctcagcattgtcagctgcaagtacaattgtggagtcctgtgagtattatcataaaactagcttgcatggaccaagtatgttcataatagtccagtctaggcactagaagtattcctacgttattttgggaggctctacatttaagcaaatggctaaaagattgcagaattgtgctgttgtgaagtcttgacataggataggcaatcttgacacaaaggtggaaatttcctgtaagcaaatctgggagttgaatataagacttaactatgaactcatctagtaccacactacagtctttgtagtcctagaaactatgccactaacaacctttccaataaacaagaaccatatacaacataaaagctaccttacttgaaaacatcagaagtcttatttcaatcaataccaagtaaattcactcagaaacatattcagataaagtcaaactcaagtacgcaattgaaaacaaactatactagtaccagctcaccaatacatacgtgcagatggaggatctatgttattgtaccataaaaacattacctacagttcaaataagaatatgtttacttaccattcaaattggcgcatactccaaggagacccaacaataaataactgctaattttgtcctcagtaaatgcagaaccaccaacagcaacttcagggcgggtcttcctccttcgtctgttgtggcctgctaaacgtcggcggcaacttcgcttcccttcatcaaattcttgaagagggtggaatctgtaaaaggaacatgtaagcatgtacagtaattacagagttcacccatatctttttgaaaaaaaaaatgcatactatggcaccatagcacagtacattgtaaatagtattagcactatgtaatcacacggtactccttgaacagagtgccagttcctttgaaacatttatgaaaaaatatgcatgaaaaacaaatactgtaaaaactattataattgacagtgcccaagaagaattcacaatattttctaaaagttgacagtggtgttaagcataggaacaacccacacacataaaagggtgagcaaaagaaagcattactgttggacgtgggatgcacaaatgaggacattaaggaaccaaatgttctcttacatcagacgaaaaagaatatatgaaaatactggtccatgaaaaacgtgcgtactagttctagcaattacgaaatgtaaaaatggtctcagaaattctacgattcaaaaaatatcttagcaaaaatgtttctggctttgtcaacttcaactaatttttccccaaaaaaaattaatttcagactttcagtacagatgttggaaataaaaaagtattttctttgaagagaaaataatccaaagaaattacgagagaaagcagtctgattgttatgacacgtacaactgtaattttgagctgagccatcggcagtaccacatagatcttagatatacaggcacagctagaagggcataggccattttataatatatttactttcgaacattttcttttatatcgtatattcaaatgggttgtgcaatacgactccttttcggttgtattcactgctttcataagagttaatccctaacgatttctcttagcatggcactacgttgatcacttcttccagcatcatcactaaatcttgcctatgactgatagtccgtgtttttcacaattacaacataagcatcgtcattttaatcttcgctccacaaattatggtgtccttttcattttactaccactgcgcccatatgctgtgacagatgtcaaattaataaaccacgtcctgagttaaagaatcattacactctaagctcaaaaggtgcagacaaatatcatatcatcatgaatttgagaatttgactttaggatgagaaggaaaaaaaatatacctaaaattattcttcaaaatcaaaaggtacgatccaaaatcattacttccataatagtccctccgtttcacaatgtaagactttctagcattgcccacattcatttagatggtaatgaatctagacatatgtatgtgtttagattcattaacatctatatgtatgtgggcaatgctagaaagtcttacattgtgaaacggaggaagtatataatacagacaagtctacgtataaatttatctcagccaatctagattgaacatgcacagatgatagatcacaccaactcctctctttaactatcattttatcaatttaatttaccatattcatcaggattactttcaaaatccaatgcttacaaaattgttagggttggaagtttgtgagggtctagaatctgtttagccgcattgcatcaaacttgcatagcatattctacctaatcattccaatatgaacaaattatagaatgagaatgaaaggcagtagtagtttgaattaaactaacctactacattgttggcagaaccgctggacagtgttcccaaccacagcagtggtagccttggcatgcatctcgcagaccttgtgtcgtcgatggtaatccctcacaccagtaaggtccgcagtgcagccctccacctggcacgcggggccactaggactgcctccctgcaccctgatctttttgccattcctgtcttcctcatcagcaccaccacccacccctgctccatgggcaacagcatcacccccaattctcaagctcagtgacccgccgccgttctccaccagctcgtcatcctccacatcatcatcatcaatgaccaccacccgcttcctcttatcggagtcacctctagcattaacatttctcaccgacgcggccccggcttcctcggaggaagacggcgagctgttcagcgccaagccgctcgcctccgcggcgggcaccggcgtagcgacgaagcggtcactgtcccaccgccagtcgttgaggtcccagccgaacagcctcttgtcgcgcctgtccatgtcaggctcgcctagccctccgccgtacaggtggcggctctgcgccccgacccgggcagcctccatggccccccgcccccgaaaccctagaacccctcgtcaacctcaacctcaaccaccacctccctccccggcacaccgcgtaaaaggatctactcggcttccctcccgcccaagtagtcgacgaacgtgacgcccacgcacccacggatccagaccagcgaaacccacatgcccccctcttccccgcgccgccgccctccgacgcggcggagcaaatcaaccaacccgccgcgaaaccgagctcatacaccccgaatcgccgcgtaagaaggtaaaaaaaaaacaaaaaaacgagagagtggatcagcgaaccgccggaccgagcgaattggcggcggagacggcggattcgagcgccgaatcgagcggcggagggggggaattcgccgggaggggtggggggaatttgggagtagagaggaattttggtgggaatggagtggactaaactgcaagagtcgaagaggaagacgagagaagtgggggagaggggaaagagcagaagaaggggagggaggggggatgggatggggacgcgtagcgcggtggtatggtacaaatagggggcgcctattttgcaaggagcaccccgggttggctacacgacaattttctccgcgcaggttaggggaaaataaatcatatgcaggttactgtaatttactctctctgattcatattactttttattttattaaattttatagaataattagcaacagttataataccaaattagttttattaaatataacattgaatacattttgatagtatatttgttttgtgttgaaaatgttgctatattttttttttgcaaattcagtcaaatttaaatgaatttgaataagagaaaagtcaaagcaactttaatttatatggtctaacttgatatggatgatgtgattaattgtttctttttgcatttttttatgattttacagtgtatgcatacaattactgagttgcagaatatttatgaagttgggtattggacttttattttatgtccaatcctcactccccaattcccattgcatttttatagagttcaaatgtagtgacaacaataaggttatattatattaaactataattactcacataaatgtttggagacatttgttactttgtggggcatatgcaaagttattgtgcggtactgctacgtgttaagaagcattgaaatgtatgacactcacattggctggcgacgaagtacgcagtctacagaagatagatcgttgtgagaaagtcaaatgtgagttgttggaccaaagtctgcccgttccaatttacgtaggagggggagaagcattcaactgcgtgcatcatgcaaattgtcattaaatcatgtgtaagtacatactggtatctaacaagaagtacccatcaaataaggaagttcttttaaaactatggagatcgatcggaatattcaaatcgtcaaatgtaaaacaggaggatttttagccataatgagtactggattaaaactttctgatcctaactgcataaaattgtgtgataacaatagatggtccatagatatatatgacaacaataactggcaaattaaataatggatcacatcatgatggtagtaaaagatttaatcgttccaatcaagatgagatgattcattaccatctcgatcaatggcacttttccggcaacatgtaagaacttggagcaagacaatgtttgtgttcccatggaataaattaccaggtgccattcactatcttgatatggacacattatttgttctacaattcttaacatagtaaaggcatataaaaatatattgctgtaaatatatactattattgtatgccattctcataaatttattgtataatgcgctcccagagcggaacgttgataaccaaatattgaatcatactcatgcatttatatttttataaatccacccatataaccattgatcacatttatcaatggacgtgtctctcgtcaactctagttggaagtactcattatagtcatagtttcggcatcataaaaaacgacaccatcgtagccacagtgccatcatggccgtgtcacttttgttggaagtaccctttatggtcatatagtctcgatatcatagcaaatgacaacgccgtagccatagtgttgtcacgagttgtgtcaataagattgatataacctacaacgtggctatcttgttaactacacgcggcactactcatgttatcgtggcaagcatatgtaccacgtgttgccatcacgagtttctaaaatccgccgagagtccaccgcaaaattataaaatccacgctatctctagcagcacttactattatgataatgcagtgacagggttaattaattaatcattttatcatttgtgtggatgtgatgtagcattagtttcattccattcatctaaggggaaaaagttcacctccatgggtcagatcaacgtggttatttgtcaatgtgctagctagtgtatcaccacctaccaagcccataaacctatagcaagtgaaaatttcagtttaattgatttagttccctctttctgatgacaattaatcgtggccttatcatgttagcaatcatcatcagggatccaccatatatatagttgatgcttccattatggctagaaagtatgtttaattaaggccatgacttggagaatgacatcatgtttgaggcacccgcgctcgcttattgtcgtagctaattaacatattagattatcacttcgtcatccagcgatttgccctaaatcaagtcaatgagaaagatgtactggcatagatcagaactgttaagtagtagtttttcgaacggtcaggctgttgccgacgttttatataaagaagaaggtgtcttattttaaggagaaaacgagactaaaccttacaatgcacagttaattagggaaaaactggacgaaaaccacaacactctaacctaagctaccaataccatggaaaaaggaaaaatggcggagcccaaaacagctatcgataaagagcttgttgtaagcgatacaaaggcttcgacttcgtgaggcaaatgttatcgttgccgggcttgtcgcctggcgacacagcagcttcgactccacagctatcacaacatcgttgccaaatgcatcacagaaaacaagcaagacaaaccgatcgaatcgaaacatctgtatgttctctttaaggaaacactgacaggcgagcctcgcccggcaggccggcagtgacatatttatattaaaatacagaaaaaaaagttattacagatagttttataaagattctttcttgttacaatctttattctgcaaaatacgcagaagatcaatgtccttcctaaatgcatgaaatcgatgttgtgtggaggagaatttcgatgtttctgatgagtcttcatgtccattttacctcttctgaaaacattatgctactcaagaattcagtatgagaaattgagaatccatgtgttgcatttgcaaacacggtttctaggttcttgctgacgcttccagttttcaagcaaaaccatttgaattagcttcagaatttgagtctccaggtttgcatttgcattagttttcggacgttcagactttcagtagttttcactttagaagtcaggatcggtagaacttgcagtcagtgagatgcctctcgtgcgtccatcgccacatcggtctgttccattgctgactggtgggccaccccgtgcaggggcctgactgcttgtgggccatgctggactgttgtacacacaggatcagaaactgttgtcagattgttgtttccgctggctttttatatggagatgctagtggagtatagtagtattaatttttttcttctcctgtccttatttccacctactgtcaaaaaatgcagtttgtatatggaccactgcatgtacatgtagtagcaataatgcagtactgtctgtgtagtgcttgcataaatcaagaacaataaattatcactaaatataatcaagagaatcttaaagcaattgagatggtgccactacacataatataattaaaaaaattatcactgggaggctcacattatatactccataatatatcatgaatatagtactacccatcctattttaagtgcagttgtggatttatgtgtctaacgtttgaccattcatctaataataataaaaatattaattataatttttttaattagacggatagttaaacattgatagtagatagtgtaaaattgtgattatgggatggaggtagtagtaataaagtgctaggtgcattggcagtttattggttatagtcactgattgggttgtaccaaataaataattgttaggtggagcaagaaagcagcaagcatgcacgggagagttgatgttggagatccctaatctagactttctgtcgcgctaacgacggcgacctggtttggactaaactgttgtttagaaaactcgcacagtatcatcgtactctcatgatagggagaccactatatattatatgtatgtttattgcttttttttccttgatcatgtatatatatttacaccgtccatagtatttaattagataattgttaatgccttctcgactagtttcagaaatgcaattaagcgaccaagaccggcggaatcaaggagcggcggatcacaagtaactgaggcatgggaaactacggaaagttgagtaacacagcctaagagtttacttggttgagaagacgtgaggaaagaaaaagagtaggatgccaacatatgaaaagcactgtcagattggagaatgtaacggagaattattgtagtgaaagaaaaatccggctctaattcttttggtaaattgatcaaatagatatttggatagtaaaaatagtaactctgttgaagatgttctaaggtcgtctcttggtcggtttatgctgcatgcagcgtacgtgcacgactgcacggtgtatgtccacctagggaaaaggatgccgggttgccgaccgatcgctcggcttttcttatgggagaagctagcagtagcatatgcatatgcacggttggtctggatcggaccacacgtcacacatatgcatgatttgaggtccaggaacgcccaaggtgatcgttccatcgagttggcatctgcacctacgcatgtgagggaaacatgaatgaacagtaacatgcatgctctttgggcagagaaacatgaatgaacagtacacgcatgatcttaaaattgagatcctctgcagtaaaatgcacgatgtttttgtcagggtccacatgtcagtgacaaagtcacgtgtctttgaccgcaagcgggatgtatctggtgtatttgtgattttatagaagtgggtctaaaatagttaattattgttaaagcaatttctataatggatagaaaaacgtccgcattagctcttgtccatcaaatatatgagagagaattgctttatttttggttgtggtatagcacggtaagctaaagctaattttcacgatatgtatgactcactttacaggatgggcacgaatcattgtcttgatgttttatatatatatatatatatatatgtgtgtgtgtgtgtgtgtgtgtgtgtgtgtgtattgtgattgcccagcaacctagtatctccttgggtcataaatatttaatatttagaatcaaattcggctaaaattttgatagttttatatttaaattcaacgtaaacagcaatatgcacaattacgcgcattcgtatacgtacacagcgatgaagtcaacgtcgacgcagacaccaaaggacgataagtcgataaccacgccactgttaattcgattattcctcaaactcgaggatgcatatatgcttaattatgatgctatcgccaacaatgtgagtggcaaaggggattgatctgctagctacgtagcacaactcatcgtctgtttattttatttcatttttgcggggcatcgtctgtttatttgctactcgatattactatagtactaattattttgcattcatttctttatgtgttccaataaatcaataattacttttatttccagtacctagatagactattattgttcttattacatgatagtagcaagactttttttttaaaaaaaaaagaacagatgtaacaatcagatagtgtaattaaattggttgcccctgtctgcttgtacgagaccagcagataagtttcctatatactcaagggcccatttaattactctggccccgtgaccatctgtaggcccaacgatgggccagatattatttcgtacggcccagcatttttcttgggtcctttctttaaggggaaaacacttttttattgggccatatgggcccatggcttgctttgttcagtttgttttcctaaggaaaaaaaaacgaggcatctcgaacaaagaaaagacagagagagaagggaaaaaggaggtccaggggttcggaattttactcaccgaacccctctggttcaaaaaaataacacattatgatcaaactaagcatatatttaacctccaaaacgatttactgttttgttaatcatcctaattaagagttgatgtcagctaaagcagctcataagcatgccgctatggtggcgttttaccagctggttctgacgaaggttttatatattcagtgtactgttagctgcatcctgcagggaatggatatatcgagttaatctctccataattaattttccttgtcatttcctcgctgcgatatgtgtctcttgcagatgctcttgatgaatcgaaataaacgaatcgatcgatctcgaatgaatagatggatgatgagggtggtcaaatggatatattggcacgttccctttgcctaaaaagtcaacttactaaaatttgataatgttaaatttttgacacattttagctttagcatatttttggcagtgttatgtgttttcgtttatagactaagtatagtgtttcttgataagatactttcgaaaataccaattttaataggataataatgttaaggttatctttagtttattagttaccagaactatcctataagcccaaaactgtcgaaaaaaaatacattataacacattgtactgtcgaaaattattttaccatgggtgaaccgataaaaattaccgacgaaatttttttagatcatttacgggaaaaaaaataacagcctacagacttactaggaattgtgatagtgtccaatttaatagagttaaaaatgataataaagtgaacatgccatgtatccgaatgctccatgcaaccaaccaatatgcctcttggctgcttaattcaccttcggatttgatgcatggatatatggccccatgcaaccaatgcacataagcacatgcctgagtatatagccatatatgacattgggttgctctcgtgcatgtttcaatcctacgtgtaagtgcgtatgcaaatgccaccttttttttaccccttgagatacatgcatttgcatgcatggcttggccttagccattaagcaagccaaattaaagtgtgtgtcatctgctctgcacaccacaagtcaatcgcaaagcttgcttaattagtcaattaattacccattcgatcacttgctgcattgcccattgggtgctcctacgattagcctagctcgctagctagctcttcttttaattggcggcgataataatccccactaacccacccagatactgctgcttttcttttgctaatataatatgaactgaatctgccattaggacgtttcttactttctcgttcctttaaaggctttaattacttaattaattagtctctgtgcctgatcacaaggaattaatcaaatagggttaagaaaaatcaatcccttaaagtacgtactcaaccactgaaccaggagaagaagaaaatatatagccacatatgcagagcgtgtgtgagaaaatatagaggtcaaatggggttcggaccccatttggatcgccgatccacccgctctgaggttccggcttcagaaactacagatgctttaatttgcttagtcacatgcaacgcttcatcagcagaaacacgctgaaattttcctttcttgatacgagaaaattgctgaaatttcgaagaaggaacaagaaaaagaaaatgagactgcattttgaatatacaaattaagtcccttactgtacttattagcatatcagacacaaatttaaattttaaaacttaatttaattttagagtcttttcgctgtattctagctattttctagcatttacttttaaaatactaataacacaaatacaaaaacttataaattattttttattagttcgtccatttttcggcatcttatgtgttgtaaccttttattatacactggtcgatcaatttgttcaccacgtgcctgtttagcttaattgttcatatttagaactaattattattttaatggtaggtgacgtatccgtcgacagcgagacggtcgtggtgacttcgttaatctcaagatttaccggtccagtcttcaagaaatgcttatagagatagggtgtacgtatatgttcatagaggtgagtgcacgtgtgttgtgagcgcctacatttgtaatgcgtttataagaagaaaaagtttaattgtgcatgcatgaataatagtttagtagggcgacaagatacataaaaagcagatgcccaccatcaattagttaattcagcacaagctttgcaccacacaccgatcaagctagcggctcgtttatctacactattatactatatagctaatgctcggcgaaagtcgcttaaagcttcactaataagttttttacaaattgcattattgcccttaaccaaaaaaaaaaaacgaaacagctttctgtttattcagcggcaaactgagctccagtcgacagcttcgtcgtctttatcaacaaagatacatatggatgctattgttaaagtcttgacattgcaatcctatatgatcatatagcatccaaaagattaacgcacttgcaaccaatataatcatagattagcattgacgcatgagaaatccgacaaatctgacgtttttctacgccaatagaaaagcattcatgcagtcatagataaaatgttagttcatggaagtgctttcttgtggtgtggccattcggacttggatgtgatcttatcatagctttggagaaagaagaggagtagctggctggcccaagatcgaggcagtgacacagagaaatctaggaaaaaagatactacgatgttatcaagcctgaaatcgacatcgttgatctctgcatgaacaatggcacatctctctcttttcctgtctgcctctccttatctcctaatggctcatgatgattcaggaaaagttgcccaagagctctgcaatctgctcccccttttcctttcaacttgatgcctctcaaaaaagtgaaaaccaataaaaacttcctcatccaaatttcagaaacaacatgaccacagttaacttattcagaaatattcagtgaacttattattcagaaatattcagcgaacttattattcaaaggaataaaccggcaactgatggaaccagttaactgctagctagctacctcctgattctagtagcaagatagatgtaacagaatatattctgctgacatgtgctgattcccatttgccttaaactcttcaaggttaagccatatcagcagctgttctcatctggtccaatgaaaaaactttgtctgaagaaggatacagaaacagatttctgaagagagatgtgcaaacatacttgcaccttttgcccatatgatttccagagatgagatgaggatctttcaagtgcacatggcatgagtgagtgaccaaggccagccttttggcatggtcatgcttactgtccttctgcaacagctggtccaaaagctcaatgttgctattgttctcaacttgtcatagtactacatttttttttcttcttccttcttgttgaattaaaggtggctctccttcagaatgtttgagagtttgtattgcagattatggccatgcatagatcagtgcaagaactagatcaggatcatgtgcgatagtcatcggagaagaaagcacctttatctctgaacctaaaacttttgtcaaagcatttttttgtgttggcaagaagcaatgctattggttactagtgttcagccacgtcacacgcattgccttctgtttgcacactttttttcctgaatgcaaaatgacatctcagacttcagatttcagaagcatggcgaatgggttagcaaacaaaaaatttgacaccattttctcctgaaaatgttttctccttcagagctgctgctgttcagctgttcagggttaaaaatgatcccagtgaaatttttttctcttgaatgcaaggatagagaatgcatttaacttcatctgctcaaatcccagacatattttctccacaggaaaaaaggatatatgcacttcaattctgtattcaaagtaaaaaagagcatgcattgtatttaaaacaattattatccactttgccacttttcccctattgcatatgctttttccactttgcagcagacaacctttgtttccctcctccttaagttccattgccctcctttctcctactcttccttccacactgcccaatttccatctccatttccttcatcagaggttgttctgctcagtcagaggcatcctttgccaaaaacatttatctgcttcaatggcaacttcttggtctgttgctttcactatcttcttctcctgtattctcctgcttgaaaccatctcttcttcaggtcagtatcccatattttgttttctgaaatcatagatcatgatcagcataatctccatctattgatgcaattagcatgcacctaagtgtcaagagcatgtgtcagattgtcacagtagaacaagaatcgatatgaatctctatcgaagtatttatacctctgaatctgatgacaatttttttgttgttggtgatatttcgtttcagtagcatctcttgattgctcatatggttcagctcaagtgaagatactgtccagctcggtggtcagtgagcagcaaaatgtgtacctcttcttgaagccgtttcagagcacgagatcatgcagcgcgaggcggctcgccggcgaattcgtcaatggcgtcgtcgtgcccaacctgcggctcaacgtcaccggcgtcgtggtcacggccaacgagcggcagctcggcgcgctgcgctgcacgctggagtcggttcaggcggagctcgccgtcgccggattgggtcggagcgtcaaggtctcgccggagctctcgctgccttctctgcgagccatggcgaagtgccgccgccgcggcgagaagcattggcgcagagtcatggagttcgtgaggaggtcaggctcgtttgtcgtggtggagatgggtgcagaagagaaggcagacctcgccgtcgccgatgtcgccgccgcgttcgaggagggcgtcggcgtggcgttccgtatcagcggccgcgcggctcggagcgcggcggaaatggcgaggctgatcggcgatgcggataaggggaggaggtggacgggtgttcttgcggaggttgcgtctccctctccccggcgggagctcgccgcggcggcaaggacgacggcgcgcgacgtgttcgcgccggtgactaacccgacgacgacgccggcgacgaacccggtgacggtgcccgcgacgaacccggcgatgaacccggtgacgccgggcatcgtcaccgtgccgtcgaccaacccggccacgggatactccaacaaccccaacctcccgccgctgtacccggagccgacgccggtgacgatgcccgacccgacgacgacgacgacgccgacgccattcatgaacccggtcaccgcgccgaccatgccatccccggtgaccaaccccgccacgacgccggccgtcacaaacccaacgacgatgccttacccgtacccgccgcagcaaggcggcgtcatgccgacgactccgacttaccagccgccggcgacgatgccggcggcgggcgggcagacgtggtgcgtggcgaaggcggggctgatggacgcggcgctgcagagcgggctggactacgcgtgcggcatgggcggggccgactgcacggcgatccagcccatgggggcctgctacaacccaaacaccctgcaggcccacgcctcctacgccttcaactcctacttccagaggaacccctcgccggcgagctgcgacttcggcggcgccggcatgctcgtcaacatcaacccaagtaattattcattttacttcgtctgttttatattataagactttatagcattgtccacattcatttatatgttaatgaatttagacatatatatgtattcattaatatttatatgaatatgagtaatggaacgtcttataatatgaaacaaacgaagggagtattaattaaccccactaaacttcgtataattactcgcgttagcgtgcatcactgacagaatcacactgaatgattcttgcaggttcaggaacttgcttgtttcaggcatcatcagcagggtaagctttgatccctcacttatgcttatgcttatgagcaaaaatttaaattttaacattaaatttaaaactgatttaaggtttttcatggaagtttatttttctacatttgtttttatatcgctaagaacatgtatataacaattttatttataaaatatttttcgtttgtaaatatgccgttgaataagccaaacgatgaggccgataatatcgtgctagttactgcgatgcattgatcctgatcaggatttaaacgtttgcagctacggcgcgggatacagcccgggggtgacggggacagtgccggtgggcggcggcgcgggcgccggcgccggggtcggcgtcggcgtgacgccgatgggaccggcggtgggcggcaccggaggcgccggagtgacgccgatgggaccggcggtgggcggcggatcggggtcgacggtgctcaacgccaacagccccggcgggaactcgatgtacggctccgacagtaacccgacgagcctcaccggcgccgccgccgccgcgctgtcatccggctgggtcctgtgccttgtctggatattcacctttgcatatgtcaaggagaaagtgtaggccttcttcttgctgctgctgctgctactgatgatgaacaacttgttctacttgattcagctgtgtacagatgcatactagatgatttgagtgaattttcataggggagaagaaggatagatgttttgtgagtctgtctgtaatctgtatatgactgtttatgagctgggtaggcagaatgatgcttaggcatcttagccatcatatatgttgtaggtgagcatagagatccttctctatggagacatgcttcttgttgtagtgcttgatatgatatcagttgatactattcttgttcttgggcagctttatctttgcatctcttccatgatgacactacctcacatttgggtttcatggtgcaaggtgagtgacatgtaggagtaaatcagtgtcggtaattgctagcaagacctgaaaaagttgtcctgactttgacaaattgttccccaaaaatgtgcatatgatttccttgggtgagtaccctgggggcgtgacacgacagggtccagcaatttttgttcccaagttatcatttcaatataaacggtttatatatgttgcagcataagcacatccaatgtgcatactaacaacacattttcgatgtgcctaaacagcaatatttctccattatactagtatttcaattaacttaaagcccaatctcaatggcatcgccgtattagataaaggagatacaaaagtgtgacaagacatgatggtatgatcagacaaatcccagcaggtataaaatgcttgggtcaaatctacctatgacatataccacgcacttcgacaaaattttagcccaggcagcaaatgaaacctctcaacttgttgctttgcagttacaaacagagcttacaggagacccagtgttcttgctgcactcatccatcctttgatgggattcatcatcctgttgttcacgaagtcttccgagcaagattcttcactccagcaccaacacatttcaatgtaacagtatttgaatttggatcaggcttgataatgaacttgacatcaaggaaatcccgtatgttgcgaagtgtttcgatagcgtatggtgtcaactgaccaacacgaacctttgacacatcaggtgggcttagagcacatagaataaacagaaggccctgaaaagtatttagaagaggaacacaatgtcaaaaggtaaaataatttaaacaaccatccgtttttaagagggaaaaacacaagttcaggcatcaatttatatgaaaaagaataggtttcttggcaaactttctaatagactaaatctatctgtactatgtaaacactttaacagaaaaaatattttcctacaccatatgacagccaaaggaacaattaccaaactggtgttgcagggctgtattatagtagcatatagagaataccacaaaagataatgattgtcaatggttcaaacaacaaagaaaatgtttgtttcaaagaccacacctgatgtgctgagtcaacaactcccccttgagcaacttcttctagcaacatcgatgcaacttgaacaccaagatcctctggagatgttagctccaaattctcagattcctcattcatttcatcaacattaggataacttacagtagcatctgcagagagcaggcagcctgtggtagtctcagcaactacagatacgccatagcctgctgacctgccaaatagatgaagatggttaaaaaaggactaatcacaattattgagttgcaagacatcagagtatagcaccattataaatattcaatagaactatttgacagtgaaaaaaaaatacctgccaccagcagaaccagatctatgatcagtgaatatatgaacatccggaataaagcgattgaagatcccacgtgcagcataaatgatgcggttttcaatttgtggagatactctagttgaaaatgatacacctcttatcctcttgaccataccttcatcagcccagttagctgcctggaaaggcatttagcatcagatggaaatgccaacagacatggcataacattagaggggcagcaaacaacacacacctttaatgtgctctttatgttgggaactcgaagaaacacttcaccaccaccaagaggaggagctccccggctttcaatctttaactccaatccctccagaggaacaccgaattgtttgagcatatgcaaggtaaccattcggaaagtatccacagaagggtcctttgtatcattagtaattcctaaaagcagggtgacaaatttaggtctcatagtaaagctgcttagggaaaaaaaagtctgcatgatcaccaattatggccatcaattttgtgcagaaggtagagggtaactataagtgccaatttcaacatgtcagtaatatggtttcaatagataagcatgtacaaacattattgatcaccaatttctaaacggatagataagtaatgggatggaccttccgctacttctaaacggatagataagtaattccatctccaatttctaacgaataataatacaagaatgacgagtaagttcaaattagtgaaatcccaatcagacaatctctatcgaatccaacaaggcccttgaagaatatggtccaggaacaaaattccactgcaaatttcgaacaatctatctgactaaacactagacagaaccataacttccccctgagccacgaccatggtgtcaacctaatacagcagaggtcccctaaattttgctaattctgcaccactattgcccaagtgttacctgaacaagaacaaggaaagctcacctttgagccgaatggagatgggcgccctggcgaagagcccaagcagtataagcggctcaaggaagtagccgatcccccggtgcaccccgcagtcgtgctcgaggtccctcccgccgacgatcacccccggcttgtacctcagcttcgtccctgcgaccgcacgcacacacgcacaaaggaatcagccagccaccgatgaaaacctaggcgagccacaccagacagagataagcccgcgggaggaagcgcgcgtccttgcctgtctcgttgaggtcgagggagtggtggtcggagatcttgtggaggaggtggaggagggagacctcgtgggggcggaggcccggcgcggcgccgccggagcggatgtcgtcgatggtgatggcggtcgacgtcagcgtcgccagcaccaccctctgccggaagtggcggctgccggagagcctccgcgctttgtcccgccccatctcgccggccgttcttctcgcgcgccgctgctcgtcggcggcgggaggggctagggttctgggctttcttccccgcgcgcgccgccgccgaggcggctactaaacccttgagctcttcttcgcggggtctcgctgggctgtgggcccacacctcacgttcgtgggcctcacgcaaacggcccatgaatggcctactactcctatatacaggaggattaggcccaaatgcagaaaaggaatggccgtcaacttcgtctagtggaaaatcagtgtccgagagtgatcaatcaccatgaagacttgaaaagtaatctaaaactaaaaggggattaaaaattaaaatgtagtctttctcaataaaaataaaatgtagtagtataaaattatgttaataaaagaaaggaagtgcaaaatttgtgtgtgtgtgtgtgttttgaagaaagaaatgtgatgtatctgtatgacatgcaaatcgtttcttggagatcatgcatgttgtttaggttcagattcaggtggttgtgtgtatcttagttatgcagaaatcgaaagtgttttgggataattctatcggctcgatgaaattggatatttggatgagtgcaataaaccttctgtcatccaaaaagctccatgttcaggttcaggatccaacgtgactcaggtcaggctccaattcagtgcagagacagagaaaggcagagatcgatacggaatcagttcagttcatatgctctcttgttaggaaacgatagacgaacaaacgataaaaaaaacagatcaatcataaaaaacacaagatttaacgtggaaaaccctcctaaaacaggaaagaaaaaaccacgggcgccagccagtaaaatatcttcactatatctgaggtaaggttacatcgccgcacagcggcttacaagagctatatatatagtggaaccctaaaatggatgatgatccataccgcgggagctccgcccccgcacccccgggcatccccatgcgcacagcccaatgggccagcttcagccttcgctccgctacggcaaaagctggcttttattaagtgcaaatgaatttggatcacaactcaacatctctattgtttactagccagccatgtgagagaagctgatgtgccaagatacagagagagatagggcatcagagagtaggtacggcgccggagcagctgagagatcatccacggcaagcacaacaatttcggtgatgtgcagaaccaagtacatatgctgccatttttctccacgtactttcttcagtgcattacatccactgcattcaatcttcttcttcttcctcctccctccccgtgacctctccatgttcctccatgtgcacccaaattaatccttcagccttcactactcacactgaatatagtatatctctacctatctacctgtatttttttttgactgaattaaagcagatactgtgaacacatgttgtttcctgactaaaaagtcaagcatatacagggaaatggttttttttatcattggacagttggattggtacactcatcgtacatatcatctaaaatatcatgaaaaacttttaaaaaattctaataagatatagataaaaatatgagatatcgctccacaaatatgtcagtttcaaattcaaataatacaattcgaaacaaaaacaacaaatgtcaactatgaaagttacgcacttttggtagccacttttgttatttttgtttcaacttgtgtaaaacgaatttaaatttgtatgcttgtagagtgatatatcatatatttatctatctcatcaaatggtttcaagatatttgatgactttttgagtgctgtgtatgaaacgagggtacatccacttgagcaataagaagacttttctatataatgtaaattaagatcagattcttcagttaagacgtaattttcatggctgaagaacagctagattatgtctccattcatgtctcataccgatagatgcatgcaggtgacactggctacggttagctggttagctaatcctgcatttgtagcagaggcttgtctaaagtgagaattattggtggccatatgcaggttaattactgcagctgcagcactacactgctgcagtgccataatgggcatgcaactgcacactcttggatcatccatcaatagtgtctgccattggggaggaaatcaaaagattaaatgtaggagaggaggtacctgacctgcatggtgctaagctatatatgagagatatatactcatctgttactactactttatccataaggccaaaagatgttaacagcttagctgctagtcatggaaaaaaagagaagaccaagaaagaaaaatgagtagccatcaagccatgagcctcctccattacttcttgcaatggcagcataggattctttcagtttctggatgccaggttgctcaactgttcatgccttgccggcctgaaatccagcacacaacaccaaattttcagtgatcagttttcagtatctgtattttgattagtatggctagctaagctccctgaagaaaattcatgcatgtctatgcagttgtgcacgtcaagttccaaaattacccccaagcttcatctatctgatagttacgaatttatgatcatctaaattctaaagtgaaacttttagataataaaagtggtttacatcttcggtctctgctgttgggacaaacccccaagtctctcttataatagatcagctgagatgatttttcaaaaacacatagattttagcacttaattctaattccaaagtgatgaattcatgtgccattgcccttcctctgatactccatgctacatggccgattgcatccaagagccatttgctttccttcaatcattaccctttcttttgatctctagaaaactagtgcatgcagacatgcagcttctcttgtttggattcagctattgttctagatgcatgcattgtagcctacctcttgtctgtttcggtgttgtttcgcgaggcagtaaatgagtaggggctcacacacacaacacactaataattcttttggtagctagttaattagaccggccgatcaaaatatatacaagtacacatggatcaccagatcgattcatgcatggatcgatctccccaagaactgttggtcgatcattaggcatgtgtccaaaggtaataagaatgagatgtcactttgctgcgttgggacctatctagctatcaagcaacctactagcttgattcaattacacttgagccatagcaaactcttccatcttttgttgcatgcttgccacagctaattgattacacagaaagaaaggtaatcggtcggttgattaattagtactgtagttaattaacatgcatacccgtatatgtgcatgatttaattactctaaattggccggcaaggctggttcgacttacctgtccttgtttgtcatgcaggctcgcgtgccttctgcttgggaccctgcatgtctgctcctgtttgctgctgttgctgttgctacatccaattgcaaaagtttcagtgccttaattttgatgtccaaacacttggcaacaaggtcgagatgatcagctgcttttagcctgacagcaacttggaaattagcattagtatgagatcgacatagatgccagacagtactgaaaatgtcaagaagttcagcgagccccataaatgaaatagctactactggtaggcttgttaaggatgatactacatctttctatgtaagttgagcatgctggtcgttggaggaatctgaatctgtcatcttccaatcagcagctagctagtatattcatgcagacacaaaagacacctgcattttttggggttctctcatctttcctggagagataggtagtaatttgatattgctcttttgtttttatttctagagatgatcaaacaagataagatagacacttggcaagcatgcatggatgaaaggagaagaagatctcaaggtagtacaagaagggtttcagtaaacagtagcaacattaaactctgaaaatgttcatcgccatgccctctagggcaggcaggcaattgccaatcaggaattagctgtgcaggaaaacaaacagtacagcatgctgacaatgcatgcaattaacacagtgacacaaatgattgacatttatcatgagctgccaaatagcacgaagcctgtcaatagaaaagctaaccacagttttgcaagttaaaaacagctggctgttacctgttaaccccagtgaatgaaaaaaagcttttgtctgacagtaacaaaacacctacactgatcaccaacagagaatgtgggcaatatacactggcattaattaagtgaataggattagcttgagcagacaaagtaattaagcagcagtaattaagtgagtgtgtactcacaggatgaacagagagcagaaggaacacaggataccgttgggccgatgggagccaaagccggcgcttttggacgctcatgccgctggaatccaaagacgagacctcaagaagattcctctccttctctctctagaacacagtcacattctctctttctctctctctctcatggccatggccatggccattggccatgctgttggttggcgccgttgcagcagctgagctgaggctgacgagatgagtgagtgaggtgacgctgctgaaaggcacaccacgtttcatgcctgcctctgcggctcgctgaccagtgggacccacgtttcatggagctaggggggaagtagcaagtacggactggaccacggccgctgaccggtgggacccacgggccagaggccggctgttgcagctgcagctgcagctgcagctgcagtagtaagaggggagtaatttagtcttgtgtcgtttttggctcattcatttcatcagcagcagcagcgcatcgctgccaagatcacggttcacgactgctctggaattgtacacttttatctctctccttttcagggcaagcacagagccatgatacagcctgaaaattattaatgtaaatagtaatcttcgtgcaaaggagagtctctaataatttgatcccatcaaatttgttcatgaacaacaagaggagagaaaaatagtttttttagcgattatttcaacagagttgtatttggaacctagcaatcatgtagtataatgctgagtttagttccaaactttttcttcaaacttctaacttttctatcacatcaaaactttcctacacacataaacttctaacttttccgtcacatcgttccaatttcaatcaaatttttaattttgtcgtgaactaaacacaccctaatttacggagaataaccttattctgatatcagaacagagaatcccgtgtattctgaatttctgatgccaaaactgttcaggaacaacaagaggataagaagaagaacaaaaggaaaatagcaatcgtttcaatatgtaagtatttggaacctatagaagtaacaatcatgtgtaatttgcagaaaccaaatccattttcagatcaaaacaagagaaaattctgcactatgacagcatcaccatctgctcccccttcagccaactgccctgcacagtttgcactgccactataaagcgctccctgctcctcctcctcctagcttggctcgcctctgctccgcttcgcctttgctccgacccggtcggcctcgccgccgtcgccgccgccaccgcatcacgcgcgcgcgcgcgcgacggcgcgagcgcacgggtgaggtgagagaggggtagtagagcagcagccgcccccgaccgcccacgcccgggccgggtggtggagcacaccgtggcatgattgggtccatggcctcctgaccccgcctccctctcctcctcctctgctccccttttgctgctgttgctgcttcctactctcactctgcttctgctgctcaatccacctgctcctctccttctcttctctctcccgagcggccgagaagaggcgaggggagaagggaggacttgattcttgcttgttgctgatccattctttcttgctctgctctgctcttgtgtggtgtggtgagcaatctgtgctggctcttctcctttcctgctctgctgattcttcgtttctttcttttctttttctttttttctgacgagcttggctggtagctgttcttgcagtgtgtccaggcttgccgcattaaaggagaggtggtttttgttgaccctgtttagcagcagcagcagcagcagcgaccaagatccgtctcgtcggggaagatgaggagatctgcatctgtatgcttccaatccctctttagctttgggataatgaggttgtgctctgctgacactgtagctttcttgatctctctgggggagatggatgccggtttggagggtggtagcagggttttggtgggatccaatcatccaagcacacacattgcagtttctgttccttccttctttagtgagtgagtagtggattggggattggggctggtgatctagctacaggctattacaacacaccattttgggggcttcttctgcggtggcatgggcactggatagattggtgttggtgctatgatgattttgtttggcattgggtagcattggcgcgtgtttgatctgttttgtgctaaggttgtgttgagcactggcattgggaggaactagaggccagatgttcatgctgcttgcgtttttcctgccacttgattgaaatgttcttttgggatcataatatcatgtgcttggctgaacagtgaacacttttgttgagactcgtcatgattagttgcgtttctttgatccaaaaaattgtttttccatgtagcaacttcagaggatacatggacacattgtttagctaaatatttggactttctagtttattcatgtaaaatattttttttgataggaaaaatacatgagactaccctaaattgtgcttgattggtgtttctgacacaagtagagacaagtttattcagatctatgaagaattatgctctcaaagatgcataattctggacaatttgcatcacttgtgttcatagatggaagtattcatgcttaatctgtttagtgttgatgctaatatgtgatggatactgatactgttctatttgaatttatgctagctactccgagtccttttggttttcataaccatggttgggactcaatggtccaatgtatccagtacatactgcaaggacatggcatcaagcgtatatcgaccccacagtgtcacaataactgaatttggtgctgttggggatggtgtgactctcaataccaaagcattccagaacgcaatcttctacctcaattcatttgcagacaagggtggcgcacagctcttcgtgcctgcgggaaggtggctgacagggagttttagtcttatcagccatctcactttgtcactggataaggatgcagaaataattggatctccggtaggataactcacatactttgcacatgataattacagccaaaatatttttgtgtgcttatgacatggtgctcgtgcacacagtatcatatattgccaaatcttatgttgatcaattgttccctaagaaccttgatatgaacactaaaatggtatttcgtagagacttgcacaaattcagttttcttgaagtttagaaaaaatgattaattaaatatttactttaattgatacagaatgtttttgttataatttcccaaatgtatttttcaggattcatccgattggccagtcattgatcctcttccatcctatgggcgaggtagagagctccctggaaaaagacatcagagtctaatttttggaactaatctaacagatgtaataattactggttagtaagtactatatctgcaccatgcatttctcttgggatgttactgtagttattttgtcagtatgtaaaaatctggtactcttggcaggcgctaatggtaccattgatggccagggagccatttggtgggattggttccacagcaacacactgaattatactaggccacatcttgttgagttgatgtactccaccgatgttgttatatccaatttaaccttcaagaactcaccgttttggaatatccatcctgtatactgcaggttggttgtctgaatagccacttgctttctgttaaatataagaattcattcacaactgtaaatttattgtctagagtgcttttgctaaataaacagccaagtgcttgtccagcatgtcacaatcctagcgcccctgaattcaccgaacactgatggcattgatccaggtaatatgaagttctgaatcattatctcccttcaatttaacctgattgttcataatgtcttacttcctcacttttcccatttagcattgcattgcattaagaaaaatggcaaaagaaaaaagtgactgcaatatcaatatgtcattcacaggctctttcttcaatttgccctgctttgtgcttcaaaatttgaaaaaaaaaaagaatccttagaacttccacttactgctgagattctggacatagaagttctcaaggaatcttcacccaaaaaaaattctgaaagaagattaaaattgttcttttgtgaagtgatcgtttatactctgctagagttttgaggtaccaatagaaaaggtattactgttttatgcaaaattaccaaaaaaagatagccctttaccactttggcaaaaaacactgctatgcaacagatacatttattttgtgatattctttcttgagatgcaactttaaccaaggttacggtacaccagttatgtattaacactatatatccatttagcatatttgcatctataactgtggtactaatggagcttcaatccattcagattcgtccacaaatgtctgcattgatcattgttatgtcagaaatggagatgatgttattgtcataaaaagtgggtgggatgagtatggcatttcctttgctcgtcctagcacaaacatcagtatcagcaacatcacaggagagacaaggggtggtgcagggattgcctttggaagtgagatgtcaggtggcatatccgaagtccgggctgagggtctccgcatcgtcaactcaatgcacgggatcagaatcaagaccgctccagggcgtggagggtatgtgaagaacgtgtacatatctgatgtgagcatggacaatgtttcgatggccatcaggatcaccggaaactttggtgaacatcctgatgacaaatatgatagaaatgctctcccaatgataagcaatattacaatcgaaaatgtggtcggcgtcaatgttggtgtcgctggcatcttggaaggaattgagggggacaacttcagcagcatttgcctgtccaatgtttccctcagtgtacagtctatgcatccctggaattgttcgcttatcgaaggttattcaaactctgtgatcccagagtcatgtgagcaactcagaacagattgtggacagacaccaatttgctatgatggtggaagttcttcagcaatacatgcacaggcagccagacatagattgtcgagtgccagcagattgctaaatcctttactgaagttggcgatgctgtagagtaggtagagagatgctctatttatttgctgcagaggggcttttgcttcgtgggatgcgtcatgtacatctgattcttgcgattgttttttttttattagcacgatgtttgcttcttgtatatagttgtgggagatgaatgttggtgtaccatgcatgtttttgtcaccatctttgatttgtgatgtatctgttccatagccttttgttgggaagaaaacagtatgatcctccttccaatatgtccagttttgtggatagggtcatcaaaattgtaacttgtaagttgagtagcaacaagagagaagagtcagttttaatcattcttttatttaaagatgaagagagcagtcagtttcaggagcgtgaaaacaaaatgagtagcaacaagaggcaggatgtctaattcattctctctttatttttttttaaaaaaaaagatgaagagaagagtcagttttaatcattcttttatttaaagatgaagagagcagtcagtttcaggagcgtgaaaacaaaatgaaaaatggtgatagctcctgaggtccaaggaaggaagcctcgttcaccagcaatatattaccccgggcaacaaattttggggtcaattctgcgtaggcactccaaactttggggccaaatgagcaatttttttccccaatcaataaccgattggacattaaacaagaaaatgagatagaacaattttctttcctcataatgagagtaacatatatttaaattgatagcttatggtccactaatggcagaatgccgaaggttacattattctttctgacttctgaacgtttggaacttttgcgatgtgaaatcccacaatgtatttacttacaattagtacatccgaaacttctccttagtgttctcgaagacttgttcagcaatcagggctccattgccatctgcccgccttatctccaagttggccttctggtagtaagcagttcccctcaaagcatcagcaatgaagtcatcgaatccaatggcaatagcagcttctgccttggctccatacaccagcctctgcattgcagcattgaaaaatattgttaattaagcaaaagctacattcttccaggtgaaccataataaggtaaggaactaaccttaatccgtgatagatgcacagcgccgaaacacattgggcaaggttcacatgatgcatacatttcacagtctgacaactcaatttttccaagctttttgcaagcctatagcacagaaaaacatttattatgtgaaaagataaccaaacaatggaaagaaactaatgttaaatgcattatcggcccaaattggctggcaaagaatacaatagtcatactgctgccaatcagtgtctcagtgaattgttcctaataaataagagcttgttttattttttaaagcatttctgttgttttatccgccagcttgaaattatctactccatttacaccatcagccaaagaaattctgagagtgcaaaacaaaaactaggaatttctgtattcactcatgaccttgttttactggaatctaaacaatttttaggccaataagatctctgtattttaagttaccacctgccaaaacatagctatttacagcacttttctatagttagaattgagtacctctgatgttctgatacaaaggatgaaaggaaaaggacaagcatacaccatcctagctgttgtaacttgtgaagataacatctagtatatttttcaagctgcggcactaatatcaaaatgaaaaggtgaatctatttggctgtccagtatatttgcattctagttttaagttagagcgtgaatcaggcacatttaatcagcagagatgaggccactactaaagaatgctaagtatcaacgaaatgtaaagagtaaacaccatgtagctggtagccacagtacacagggcaagttacctctcttattgcagttacttcagcatgcgcagttggatcagtgtaatccaaaaccatgttatggcaactaactactatctcatcattacggacaacaactgcaccaaatggacctccatggccacaatctactccttggtaagcttcttcaactgctttagacaaaaatttgtgatccctgtcttgtacggctgtttaatgcatcaaagattaaataagtgagtgtttaacagtcctccaatcagcagaaaataacagatgttggacatatataatattcattggtcaatcatgtccataagatcaaatctggtaataataccttcctgatgaccagcaaatgctgaagcaactgagatcgttccgtccttggattccacaactgttaaaaatgaagaaaataattcatttgactgcttggaaatgattgtttcagctcctcccaacaagaagtgattatattaaagaattttaggctggaggactgaagaaatcaacatgcaggccattcacaactatggtaaatagctgacaacagaacaagatttacttccatggccatagtcccatgcccccatgtaagacctatctatgatgaccaaagccacatatctatagtccccaaattgcatcatgtcgcagaaaccaccacagttcctaattctgacaaatgcagaatcctgttttggtttaattgaaaccatggatttcttctgaatgagttccaggaaggaagcaaagtaagtagcatgccagaagcggcataacaactatagtatgacaaatttggaagacatgaagtgcatgatctatactcctgtgcatgagaaaggaaataaatagcatggttcaacaccaagtcaccatcagcatcagccaacatggaacactccgtttgtcttgcaatcacccagagcaactcaaaactcttaaatcctacccctcttaccgcaatcacacataaaactaagcctaagaaagtccatcgcagcctacccatgaggcagaaatgagcaatctcttcctatcccaattgcagcagtcggttaattcaccaaacacagaatcgaaaatccatcctactcctaacaatactcctaacaggtagatagcaaatctctcggccccaaatcctcaaagaactccaaacttgttggatctcatctcactcacgccccccttttctagaccaaatcatcaagacacaaagcaggaaacaaaatccaacagttcccgccccccaagcgccgcagcaagcaaccactggtgtgcccgtatcattgacgtcatagcgtaccctgagcctcctccatggcaggagcaggagcaggagcggagcgcgagatttgggggagaggagaggtgacgggtgtgatgagatgtgttcgtcgcttgcagggatggatgggcttgggtggccttgtctcccgtgctggctgtacatatagggcctgggaggggacactgacgggtgggccagcccatgggcctgcgcgaggccgacctcgtgtggacggaaaagcgaaagggaaagcgcggatggcggatgacgcaacgaaggggcgccttgtcaacagaattaggggggccccaccagatgtctttgtccaccgtggcacggcctgtgggctaagcacatggtgtccaagggcccatttgttactagtagctcaaaaatattccgtgtaaactttaggtgcaaaggaaaaaaaaactagagaaaatccaaataatgtaattgacaaatgtacgagcctaaaaactgtcatcaatgggtgtaaattctgtaaaatatcatcgtacaaactaatttgtttcataaatgttatcgttgttagggttttgtccagcctgtcctgttaaatacgttgttcatcctataacatttaaaccttaacaatgatagtatttatgggataaagtcaattgtacgataacattttatggaacttacacttgttttttatatttcttagaattgtgcgccttgccaatgatatttattgcattttctcataaactatagtgcacctctctaatagtgactatgtaatgtgtaatggtattgaggagatataacttcttgattttttatagacgatagttaagaggtaagaacaaatttattttaggatatatttggaactctatgaatcaacttattttatgatggggaaattaactgatatcaatcatacgctgtccctctttcaaattcaccacttttgtattttctgaaaaacattacaaatatttttgtttatcatagtctatcttaattcgttgtaaaacgtgaaaccatgataatagttaacattgtcggttatttgaaaatgaagggaatgctagttcgagttggatgtaaattagtttaatgggtaagctatcttaaattaaaatagacgctctaaacgtgattcgtgtgtattgttctggtttgatttgtttcgcacttaccaccaaacttagattatactatccgacacatctgccattggatgctccctctttatcatgtcttttgatgaaaaaaaaggagcacaatccctctctttttacctactcctttttctttcgacgattctgcattctacacttggcagaaaatatatgttatttaactcttttaacattactaacattactttcgacggccatgttttgcacgttaataatggtatattatactaacttgaaacggtgctatgctctgtttaaaactgaagttgctttcggctcgaaagagatgctagaataaaaaaagataaggggggaaaacgttagtacaatgtactcccttcgtttcaaaataattttatttttcatccacactacatatgccaatacaaaacaaaaaaaaacccactttattaaatctcaatgcaattattctctactttatctattcacaatacaattatttcatatattttaaaattctaatacaatgattacttaaaaataaacttatttaggaacaaatggaggagtaattttatttatggaatggagggaatattattttttaaggggaaaaaagggagaagttaggatttaggtgggacccacatgttagctcggttggactaagtcaacgtgccgccttagtaaaaatcgctctcaaaaccgtcccatcaagaaattcaaattataccaatttaaatagttgggatcaacatatccgttatcgatacgaatcagtgtagacctatattaagggaatcaaagtggacttattcgttaattcaatgggccaactaaaagtaattatggccatttgcagaagcggaaggtggaggcccatttatagcattgcacggaaaaggcccaagttaggtactatagcccattccgaagtctatcgctatccacttcgtccccgcgtcgcgtggcccgaagcgagggagcggaggctgctcgccgcgccgcgccgcgccgccgcgcttggtcatctccgccgccgccggccgtcgccatgggcatcaaggtatatgcatatatagcacgctcttatcaccgaagcgctcgatgtgacgtcactctcgctgactctcctctgcctgcgcgcgtgttcgcgatagggtttgacgaagctgctggcggagcacgcgccgggggcggcggtgaggaggcgggtggaggattaccgcggccgcgtcgtcgccatagacaccagcctcagcatctaccagttcctcgtgagtttccccggccgtggcggcgtccctccctctcttatctactctactcccttccgcttcagttgtgagtatgattgtagcaatcgtgttatcttgttttgggaatgccttgattcggggaaaatttagtgatacctgcctccgtggttaagtggtggcgatctacagtcagttggagttgggttttaacttctaattcacattaaaagtttgagcaaatgcaaacagtggcgaatggtggcgattgtgcagtcagttggagttgggttttaattcgcattaaaagtttgaacaaatgcaattgtgcaaacacttcgtatcaccagtagcttctatgtataggaagtcagtggcttaatgccatgagcggagcctcaatttctacggtgtaagatagtagcaaacttatatgtagaattgtagacaaaaaggacatggctaatgatgtgaattcactgccaccaataccctttgcattgataccctgttctgattgactgggaaaccacttggtagcgctcgccatctaactagtgatattattttatgctgggaaaaaagcttattgatggattgttttgggggtaaggggattcagatgttctgtgtatatgacatttctgtagattgtggtaggaaggaaaggaacagaagttctgaccaatgaggctggtgaagtcacaaggtgagggaaagtacactgtaccctgctggtgaactcatgtggttatgacttcttttagataaaagaattttacatgcatgtgaattgtagtcatctgcagggcatgttgaaccgaactgttaggattctaaaagcaggaataaaacctgtg

SEQ ID NO: 26599 - DNA, 4156 bp, Oryza sativa
tagattcattaacacctaaatgaatgtaggcaaatgctagaaagtcttacattgtgaaacggaggaagtactgttgttgacaggaactaaatgctaaaatttcataccagttttgtgtttgatggtgagccacctgacatgaagaaaaaggaactggcaaaaaggtatactctgaatagtgcctttgctttgattgtttcttgtgagtgtcagtatttttatttcctatgtttaccactctttaggtctttgaagagagatggttcttccgaagatctaaatagagctattgaggtcatctgatcctaaccgtagtactattgcctccttcttattgtacctttttacttttggggtgatttatctgttattgcattgcacctctgaggcagcatttatgttacaggttggagatgaggatttaattgaaaaatttagcaaaaggactgtaaaggtaattacctacgtttgggggaagtgagccaatcaaaagtttttacagtaactttaggaaatacttcctccgtttcacaatgtaagtcattttagcatttttcacattcatattgatgttaatgaatttagatagatatatatgtctagatacattaacattaatatgaatatgggaaatgctagaatgacttacattgtgaaacggagggagtaatatgttaatggattttttataaagcagcatcacaaaatctgccatttcgagatttgtcttcacaactcaattagatcgtctataaaatcctgctgttgtccaaagcattaatcaccttttttttcttcacaggtcacaaaaaagcacaatgaagactgtaagaggctgttaagcttgatgggtgtccctgtagttcaggtacaattcgtgcttaatccatcagtttcttcctagtcttcgttttaccacaagatgatcagacgagacaatcaactttcctctttgatatgctttcccaactccctggagagttagcagaccatttggaaattcttataaccaaaagaaggaaattgcaccagcctcactcatagagttgctgcttgtgatccggtggtcttaaacttatgggtcaacatgtcataaagcttagattatcttacatagggttctattgcaatggcttcaggcaacagtaaactacgtaagaagtccagcttatgagaattctagatgttaaggcctgctcagcttttgcatgtgtagatgtttgtttggtattggcctaagttggacttgctgttatgcttgagcgctagctaggataacccggctttggtatacatgcagtattagattggtggaactttagcaatcaacaattggttcttatgttatagacatcaccacacgtgggacataattctatttctttttgctccatttgagcaacatgccatacctatgatctcagggcaaagatgcaagcatgatacttggctttaatgagttttcactgttatttctaatcaattcatggtatcacatatgcaggcaccaggggaggcagaagcacagtgcgcagcactctgtgaaaatcacaaggtctaacaagccgatgattttattacaaatttatgtcgatgccctcgtcacatgaccgaattatattttactctgagttgtgactgtcaggtctttgctatagcttcggaggatatggactctctaacttttggtgctagaaggtttcttcgccatttaaccgacctgagttttaagagatctcctgtaacagaattcgaagtgtcaaaggtaatgctttagtaaatttcatcatcaacatttttccgagcatcatggcaattatttgttggcttccaggttttggaggaacttggactcacaatggatcagttcattgatttgtgtatccttagtggctgtgactactgcgagaatattagaggttttatcacgttttttcttttttcacacacttaatattagattctaccaatgatatcatattaccatgctgtattcagaatttagaggttgcttcattactttctcatgtcatgggtgctttagacatagcattctccattgctaatgtatctataatagaaatgtggaagtgtgatatcctattcttgagttaaaaacttcaaattatattttctgcaattgcttttatagctcaacgctttgtgcttctgttggctaaatcttgaataaatgccactcaaagttctaagaagattgtagagatatcataatgctggagaattgaatgttgtgtatgctgcatccttccttgactatctttatcataaatttatacaagtccttgcattttattattacttcttgtcttgttttgaataggtattgggggacagagagctttgaaacttattcgtcagcatggttatatagaagaagtagtgcaaaatcttagccagacaaggtatgttttccatgggatttatgttaaattgatgacctggttcaactggcatttctttagtttgttgttccattttctgagtaatcttagtttctaggttttaccatatgcttcattttttttttgagaggtaccgtatactttcttgatctgtaggtatagtgtcccagaagactggccttaccaggaagttcgggcattgtttaaggaacctaacgtttgtacagatattccagacttcctgtggaccccaccagatgaggaggttatgcttggtagttgcccataccacacggcccctgttgtttatcatgctgacagttcttgttttctttgtccagggccttataaactttttggcagccgaaaataatttcagtcctgatcgagtagtaaaggcatgagtgcatcttttatttcacttatatattaataattccccttatgcatattattgtgaaacaattgaccctttcccttatattcattcaccagtctgtagaaaagataaaggctgctaatgataaattttcccttgggcggtaagcaacaacagttaacatgttatcttgtggagaaatatccatgcagttctgaagtggtgttttttaattgtttcagagggaagcttttggcaccagtagcgaacttaacaggatctacatcaactgcagggaaggtacagagctacttattgtttcatctctcttatttactttggctcactaacatattgcacgggctacacatgcaatcatgatatccagcctacaccctagctctctgaaaattggttctatcgcattattgcataacttactgttctttaggtttcagttaattgtggtgtgtattttctctatctgggctgaaatatatctgctgttccatgatttgaattctgatagccgtttgtagctccagaaggccagggtagtgttgttttctattttactttttttacatggattctttttttacccttaaagtatatttcttcatagcaacatgggtttaatttttcgttgagttaacggatgctacataccactgcaattcgtccaattgtaacttcatatatagttgattatcatcttttcgctcctactgttctattgatacgtgctcgtgttctttgttctttctttgttgttctttcttctgccatcttaccatgtcgggatacattttgtgtaacatatggaaaaagtaggattagtgtaacatggatccttacctagtccatcaattgtcttggataacaggaacccaaatgtatcctgggtggtccagggcaagtcatgaaggttaggtcacctctacaagtgtgcaagagctcaagcttgaacttcatacatgacaattcaaaagcgttcatgctgggcaggcgatcaggatttctcagaatatctacatatgcttccatctgaatctggagctgctctatttccatgagttggttggctgaagctttgactgacaccatctacagcttcatgaagaattagtgatttcttgaaatgcgttgagcctatgctattattgtagttcagccttttgccttgtaaaatcaagttgaatgcttgagctttctcacatttagcactggttctcgcttgagtgttgaacggtgaccatgaagaatttgatcaccttttggctataatctgaaattttgtcaaggtgccagaacgagcaggaaactggttgaggctgcttaactttcctggtgt

SEQ ID NO: 26600 - DNA, 2173 bp, Oryza sativa
ttaccttctttattactcttgacttcccctcttgaccattgtcattgagacatccacgcccatctcttcttgtacagtctctttcagttctctagctttccatgacggattagccttaattacactctcgtacttatcacaaattctacttgtagacaaccttttgttttttagatctgggcagcaactatgatttccattatatgtcacgatctgaaaccaatcactccttgagttgtaagaagcatgcagtaaccatgtacaacctttccgcatacaaacagccctaagtctgtctctgtcatttttgataaattttatatttaccttctttttcaacgcataccttgttattgcatccttcaattgcatctttcctctaaagcacatgtcgactgcattttgtggtaattcagcatggttatcaaatattggaaaccgacacttcctcctctctgcagaatccccactatcatcatcataggatgcatcatcctctgaatcaaagtatgcaatgccatctccctcgtcatttacctgtgttatggtgttggcatcaacactttgaggaagatccaactcaactggggtgtcaagtggaatttcttctctccttttcatttttttcttgaattgcttataattaattcttatctcatctgcttcatcatcttcatcctctgtaaaaccagtggcatcagaaccactatctgaatctaagccttcagtttgtatgttcgcgatactgctattgggattatcacattgtgtgttcgtaccgccctttgcaataactagagagtctggaaacatgctattattatcccgaaatagatcaaatacagcttcatcagaatgagcctctaccaatgtagaactgcaacccatatccaatttaactatttcagtgtaaatgtccacagctccagtagttccaacaattttcaccatctccaagcaggactgatcatctacaagcagcctcattccattatttagtgcatcaccaggtggtaaccagtacattctaacaggctgttgaaaggttgtgtgatccaacagatggccttcaagttctgggattcaaattttctcaatgtctatatgtgacaagccctcatccccattaatgtactgaacttttgacccatcaagaacgaaatgaccattgaaataaaatttaatagctaatagctcagaatctgccatctgctttcgttcctagacaaatctgctacacagtagtggtgaaaaatcaaaacatatccaaaaatttaatgcgatcgaacaagaaaaatgagaacttgcctctactggtgtgatccacgacttctgcaaactagcactccaactgatcgcttggcaaaaccccagagcagtgcataccatgacagagcttggcgaagcttcttggagccgtacgtcggcgttgccccgtgctgcggcgacgcggctgaacaggagcaatcgttgtgcagcgctgcgatgccgcgaccgccgttcgccagcgaccaaaccctatcagggtttagacggagaaaacaaacagtggagtaatgggccggccttttttttcttccttcctgttgtttcctttttttttccttttctttcttttttatatggtaagggtagaatggtcatttcatttgtattgttgcatgcaagaatgacttggcatgcttatgtggtatttttgtgggaccaaggactatgttaacccaaatgattaatttggaggacttatttggacgttttgaaacctcaaggactaaactgagcccgaagcgaaacttcagggaccatattagctattcttcccaaaaggaaccacattaggagtcactactagaaaaccaattttcccaagcggccaaaactaattttcgcagacgggagggaggttcgcctgcaacacaacgactgtaaaaatcgatgattttcgcagtcggggcaacggccctcctgcgaaaatgcaaaaaaacgaacaaaaaaaaaaatcgccgcaccgccgccgccacgcgactcgccgccgcccccctcccccggccggatctgagaggggaggggaggggagccgccgctgccgccgtcgtcgtcgtcgccgccgccggcctcccccctccctcctctggccagatctgcgagggagggagggaggggagaccccgcc

SEQ ID NO: 26601 - DNA, 38650 bp, Oryza sativa
ccagccagatctgggagggaaggggcgaggggagacgccgccggccgcgcgtcgtcgccgtcggccccgccgcgccgccagagatgaggggagaggagagtcagtgagggagaggagaggagaggagactgagtcagtggagggagagggagagagagagagagttgagtggtgggaggggtgggaggagaagataagggtgggttttttttttgggtaggtacgatttttgcagtcggaccacataaggttcacaagcgccgcttaagtaggccgcctgcgattttcgcaggcgccgcttaagtggtccgcctgcgaaaatagattttcgcaggtggacatcgaacttcaccccgatttatattttttgtaggcggtcatttagctataagagtcatgtccgcctgcgaaaaaaaagtccatacgttggggaaaatgcgttttctagtagtgagtttaatccttcagtgataatatatgatttggttttacgaaattgaatatttaaaactctgactaataattgaactaaaatttaatcttggatgtagtatcattatacttccttcccttcaaattggtaatacttgttgttttggataaaactatggtcaaatttttaaaactttaactataaataacatttaaaatatttatcttagaagtacggagagcatacatatggattagtcttaaaagtagtttaataaaatcatatatttattgatatttctatatatatattatattgtaataaaaattagtagttaaagttattttttggagaccatgttattgtccaaaacaataagaattaccaactcgaaaggtgtatttatatttaaatatattttcatatgatattaactttatagttgttgataatgcattatgaaaaaaaaatcaaaggtctaaagtaattattacgaatgaaatcaatggaaaaaaaatcattactactaccacagcaactaaagtatcataaagatgctctatagaagacaaattttacctgccctatacgggctaattggcaggcgtgccaattggcacgccaattttttagtttatctcttattcggaatgatttatcatcctttctctttggggttccgtaagaacttaactaaatgtgttgaaggctctcctccaaagagccaatagtcaacctcctatcccctggtggtggctctcccgttatactctctctagggaacaactcattactcatagattgggccggcgtatctcatcatcagagaattcttcttgacttctccgcatcctcgaggcaacatggaaaggcccacaatggatagggcagggtggctactttcatgctcgttcctccaggacctcgaggccacttcgcatagggcccacactgagctagagtgcgatggcaacccgccatgtctttgctgcatccgcgtaggcatgtgatgagcaggaatgactgcacccggttgggtgttagagcaaggctaataagctggtgattagccggtacatgtcatcttgatctgatgtggaaggaaaaattactccctccgtcccagaaagagacgaatcctggggggagagctttgtcccgaaaaaaaccgatttctggacagaaaacgagaaacttcccatctatctcatcctgtgtgggccataggtggaccgcgtatcctctcgttcacaccacgcaaaccttatcgcctcccagttttttttctgtcgcgtctctctctctcgttcctcctggatcgattccatcgccccgtcgcctctctctcgcgtttctctccatcgctccctcaccccctcccggatcgattccgtcgaagcggcggcgtccagatgagcgacccttcgaagcttccgactccctccctactgccgtcgtgctcctccccacacatctctccccgctccacgccgctccccctcacttccgcaactccctgcggagttccccatccaccaggatgcgggcgcttcgatacagcgggggagggttgcgagcggttagatccgatgccggaggcggctcctttcgaaggatttgcctcgatggcagagttcgaggcagcggcggaacagtttagggttttcattcaagagacgaaagccaaggcggaggaggcgtatcagcttgcggttttgatccaaaaggcggcggcgggagggggctcagatgtggcagcggccttggaggtttgcaagaaggcggcggaggcaacggcggcgggtggagccagttcagatgcggcagcgacatcggagatttgcaaggcggcagatgtgatggtcaaggaggtggcggcgcacgcggatctgatacaggaggggtcggcggaggaggaggcttaccgacctcctgttctgattccggtggcaacagctagggactttggcggcagtatgcgtggattgactcaaaggtatcttcaccttgttttccctacaaccaatctgttccccttatgcaatgagagatgctttcaatgacgtgtgtagatcagatgcactgggtgcggttgcatcccaaaatttttttgattgtactgcatagaatatcctaggttaatgttgttcggtgttttgtatctttataatcatccagctgttatatgtcggtcagtgttaccaatgttgaagtaatgcgggttagctgggttttacattttgttttctgcaaaatttggcatggagtgagaagggggttatgatgacatgtttcaaataaaataaattagtgttaacaaaaatccaagcagttttaaacctaaccaaagcattcctttctgttttgttgcccataggtatattctgaaattagaaatttttattgagtataggaaacaattataaactgtaagaaatttgatactgaacatgcgaattttatttctcaaagttttttttgactgctttattgctcaatcaagaggctgatgaaaaatccaaaattgtggtgacactgtaatgcatgaatattaatacctctgtttttaaatataaaacattattgacgtgtaggacatgatgcttgattgatcatcttgtttaaaaaaactaagtatatatggttaattattttgttctgacttgtttcaatatcagtaaagaaacttactcctgaatgcagctcgtcgtactcgctttgttggctgcagctacctagccagcgtatgttgcttgcttgacttgttcattttaacactgaaacctatcgttgagaagcttcaacttgctccaatagtacaactgcacccacagatagttaggctgtcattcatagctaattaaattaactaggtaaccttgatgttgttctacgagaattaccgtggatgctatactttgatttctgcaaatctttttcgattgttatacttctattattcactggatttgatcctttaactaggccacgcatatataaactgatgtactctacttttggctttcattgcgttcagtagtccatttggtctatacttcaatttagacattgcttatttacatgggtcagcactatctttttaaaaaaaatgtatcgaatatataatgtaatcgaagtacatttcagtttgattccatgatagattcatctttacatcccatcttgtattaactgtcactgtgttttatccgttacaggactatgttgggagatgatagcgaccacatggccatgttcgagaagaaggcaagcgtcacgcaaactgacatgaaggagaagaggggaaaagctaaagatgttagcatcgacgaggacaagtcaagcgatgatgatgttgatatggtcattgggggatatgcgcaagatccatacgatgatagcggcctagaagaactcctacaagaccaagacgcactggaaaaatcggtaaaaaaatttctagagtgttttaatagtaaaaaatttagatgaatgcttcaattatgtgttgattgtgtgcctgtttggtgattatgaatggtggcctaacaaagtacctcgaagtaggtacccttttggtattgtatgaaattatgtgtaattatggtagtactttagattaggtggttattgatagcagcctaagaaggtatgttaaagtaggcacccttttggtattgtatgaaattatgtgtaattgtggtagtactttagattaggtggttattgatagcagcctaagaaggtatgttaaagtaggcacccttttggtattgtatgaaattatgtgtaattgtggtagtactttagattaggtggttatgaatagcaacctaacaaggtatgttaaagtaggcacccttttggtattgtatgaaagcatgtgtaattgtggtactggatgagattaggggattatgatgatgcatgtaatgttgattttacattgtgacatatatataaaactccctcgttcccttttgatcagcgcataagtaaaactgaaatgttccaatttgatcaacgcattagcctaggacggtggccatgactcttagatttgcatgctgatttaatttttgcatgcatgcaaggagacgctggccattcatttcgcatactaggcactagttttaataaaaaaacggggtctctctctctctcttccgttttgcatgcaagtaactgaagtgctaattgtgccttttatgaggtgggctttaaatgataatgggagaaatttacttcaccttggtctcgctgcacgattgcaatacgtcgatcaaaagggaacggagggaggatgaaatttaggcaaaagctcaaaccatgataaaactttccacatgacatgatactcaaatgctgatactgcattgtcatatatacaatctgaaatgtagccaacaaaagctgaaaccatcataaaacttcatattacatattacaaaagctgaaaccatcatagaacttgccacattgcatgattagttgcatttacttgagtaatactgatattactttatcatatatacaacatcacatttaaccaaaagctgaaactacgatagaccttcccattttgcataatttactgcacttgattggctaatgctgatatgaccttttcatacagttcacgaccacaactaagggtattagggagaatgtccagacgctctagcctctctttacccatatgaggtattctgtatccatttccaccatcagcttccataacctctaacaagcaagattgtagtgttaggaacaccctatttagcttgttgtcatcataggcctgaaattcctgctcaacattatgtattagctcatccatattcctagatatccttctatatgttaatgattgtagcgatgcaaagaacccaagatctaatgcattcatatctggggaattaggaggctgatgcataaggcggatgtcaaaccctgtttgggatactgcataggcaaattgataatcatccactggcacatgagcaggagcattgtcttgctgaatccatatagtgctgtgtgcatcgtctcgaggccaacttgatataatacctggtagtactttagcaatcagaaacgaccttacggtgtctcgatcaaccttgattgtcttggtgactagagttccccttggcctgttttgacttgtcctttgtgctggttcctatgtatataacattaagtaagttagataagcaattaagtttcacatcacatcactaagtaaaaatgcatatattaagaggttataatacctttttggtgaaaggccacaagcctatcttgccgtcaaaagtgcagataccttcttcattgtatctaggcctagcaactgctgccaagaacatcactttatcaatagaattcttgttttgcacgggtctgtacggatcatcctcccaatggaccaggtaaaaagttcttgtctttttagtggtattgaaccatttttcatcgatgtgcacaatgttgcgcatatcaacaaacttcggttcatttggcaaagtatgccaatctaacatggaaatacaccattgcagccttgatcgtttgttctcttccttcaacaatggctttaatgtgtttgagtgacgtcttatcagcccttctttcaacatcctatgaagcgtgctttttggtatacccgcggctgatgcaaatgaccgtaatgtgccccttagttgcagggggacattagcaacatctgacaagtcaatttcattcttcttgcgaccagaattagttttctttctagaacttacattgactggaattccctgtgcacggcactgctttgctcttcgccaaatatcttgcactctaccccttttgatattgaacatttcagcaacttcagttgttgctttttttcttagtcttccattgatagttttcttaaccaatgcatcatatatctcttgcctttgtatgttggtaagatttttgtttggatgttcatcttcctcatctgaatcatccaactcctcttgttcaaaaacaatttccacatcaccagcatacacatcgtactcctgcatgtctacaacaacaattacaaggtgagtcgtctgtaccaatttagatggtggatattttattatcatggatcaacatggttgtaaacttatggctgattttagatttcagaaggacatagaaacattgacacaatttactttatgtgctgaaatgtcaaattgacatccataatttgcaactaatgcatccaatgttatgtttagattattctaggtagttcgcatgatgtcatattagtatcttctaattaaaaacatggtttcagttaattaatcttattcttcagtggtgctttatgtacaaccacattttattaattttactaagtttgttatccatgtcagctaaaagtgctttacctgcttgcatttgtagatgttcctcataggcatcagagttaacatcaaaaggaaagccatgttggttgtgacctccataaatttgcagaatttcatccatggcatcggcaccgtctacaataacaattaccatgtgagtaccaagtctaatatcaatattttgttaggtacaatactattgcagctattttattacattctacaataaaataattatgggccattatactcagatagctcacacattgcattattacaaccaatcattagtgctgatacttgctatttgacatgccatgcatattggcctaactggatatgtgtgactaaaagtaataatgcttatactactcttccaatgtagccaaatagttctatgaataactgatctgttatgctatatatataatggaaccaatgattaatataggttactttgtgcagtacaacatcagcaaaggagattatcatatctgaaaaccacaatcaaggtaccaattttatatccatctcaaatttagttttgttgtctacctattttgttattgtactcttcaccttgtttttcaatagaggtccatgtcagctgtaaataaactcatggaagtgctcatgtttctttttccctaacttgtgctattcatgattgtgattttatcaaaaggtgcttgtgctgtagtcaggagaaccattgggtattttgctgctttagttatattatggccatacttgaatgacttttctacattgtacaaactttggtgctgaagttcagggctttttgtgatctgtattgaaggtgcaatctaactttgatatatactaatactagctcaatatcagtggtactgtaaaggaaattatacatgtagaatctagcatatgaggattgattgtagacagaagataagcatcatgtgagcactatttgattagttatagctagatacatgtataacttgtgatattatggaagggaatgaacttcaatatgcccaactcattcacagaatcgagctggtaaagaacaaagagaaaaaaaccaagaacatagcagttccatcaatgcacatggtatcttttttaaaaaaaaatgccaaagatttagagtgatttatgcaagtcatatgtacaaagatcgatcgtttactattcttgcttgcaaggtcacctggatggttatggttggcacctccctgcacatcacctccaagttgatcctcctcttgaccaacatgcatttcaacttctgcaaccactggttcattaaggtcaggcacatcatgctcatctccctcatctgccactggttcattaaggtcaggcacagcttgctcatctccctcatctgctagttcatttagatctaaagccatgaaggtggtgtttttgcagactcatgaagtgataagttgggagggaaacttgtgagaatggttcattttgagcttttatagggtatcttgtgctggggtgtgctcaaatttgtatttcttgccgccaagcaatggtgttgtttgattcaaattagttggcgcgctggattagtggcctgtacagatatttggtgcccatgattggtgtactacttgtactactctactcaagttggctgcagatattcaacttgtattattattttatttgtaactaatgattggatgtacttgtattgagggcattgttgtcttttgtcacttgtcctaaagttgcattgggattctagggtttgtgattttgtgggacggagggagtaggtgtgagagaaagaagttggctcttctgcaaccgcctgctctgcacaagcgcctagacagactgacaacctaagcccacattcagcgaggggagaaagagtagaccccgggtccacaacaaatataaaagatttatttactaatacgtatagcgtctgcctttatttaggttggctattacatgtagcgcccgttccgtcgtggcgcctagcgggaaaactatctcttaaaaaccctatttgtgaaatccgtttctttgcttgttgtctagtgtccgtgccatctcagatctcaaatccccgatctatcgtcaagttcaatcccgaatccaaatccttcccaaatcaaatccctccgcaaagtctatttcgcctccctcgggttcgatgggccgaatccctctcggcccatctccccctccctccccggctctctctctctctccccgctctgtcgtaagccgcgccgagccctccctcccgctctcgcagccgcttcccgccgatgccgcccaaatcgccgcgccgcccgcgcgcgcgcgcgccgtggtggccgaccggccagtcgccgccgccgtcagcgcctgccgcgcctgccccgcgtctgccgcccgtgtcgccgctccactccaaaccgccccgccgtcatcgccatcgtcatcgactcggccccgcctctccccgcgcgtgcctccaagggacggatgcagacctcccccctctgccgcgtcgccctctctccctcccccttttccccaagcggcaaggaggcaagccccctttctctcccccccttttttctctttttcctcccgccggcgtcatccttccccccctcctgtcgccattttggccgcgagcgccgagcgccagctcgctcccttgaccgcccaaggtcggtttccaaaccgacatcgccgccctataaacccaagcgcttcccttcctctttcccctcccaatcttccccgtttctcgcccgcgccattgctgtctctctcgccggccgccgccatcgcgtgtgccggaggagccggtgcgcgttaggacgcggaaggggactccggacgcaccctctccttcctcttccccggcccgaggccggagagatcactcccgtgccgtcggcctcttgtcacagcgccccgcctcatctcggtagtgcattcccccgttctccctcctcgatccatctcctccccttagttttcggtagtagcatgtgtagccttcccgtagctagctggtgccgccccgaccgttgccgccgctcgctgtgtgctcgccgctgtcgccgcccgtgctccgtagcgcccgctcgtcgccggcctcgctcggcatagctcctcccaatccgacgctagtaacggattcccgtagccgcgtagatgctctcaccgctgggaatcggcccctcgtgacctcatcgccgtttcccccttctcccgccgtcggttgccgccgccgctgcaatccgccgccgtcgagcatcccccggcgaatccgagccattggctcgtctcccctcgtcctgtgcaacatcccggtgtgctcgccttcgcctgtatcaccatggttcgctccgccgctcgccgccgtcgtccgccgtccgttccggccggcgtcgtcgtctacctcccgccggcccgcgtggtagccacgtaggcgccacctcggccgcgaccgggtcaagcagaccccggtccgctgcttccctccgccctctcgcgcgcgcggtccaccgtgagccgtgaggctgcgcgtgggcccgccgcaccgcgtcctccacgaaccgcgcgcatgcgctgcgcctccctccccaaaccctagcacgccccgcgtgcacctcgctcacggtgagccaagtcgccgacaagcgggtcccacccaggatcacgcgggatggacccggcccaccggctctctctctcccctccccgcccgcgcgcgcgtcttgggccgccttcttgggccggccggcccattaagcttggacgagccgccccattctctcgggccgcgccctagccgcccgagggaagtctaatttccctccctccttcttttcttttcttttctttttcaaaaaggatttaaataaatccttttcctttagaccaaaaatccaataatcttagaaattcaatatcttcccaatcgtaagtccgtttgactccgttcaacttccaaaattcctcaaatctcgagatctatctaatggcacgcttagaggtcaataatagggctttattttcgccgtttgctgagttgtcccgtttcgcgtgtagtttcggagcccgaagacccgcagtgcgaggatttcgaggatcaagctcaagatctcgagtgaggcaagccacctttgaacatcttgagcctatatttgaacttaattatgttgcttaaaaaatattatgcattgataggattacacttaatctgcttgtcccgtttgcaaggcagattgacggacctacctaacttgttgcatttgacccttccattgtaattgttatatcatgttcccttgtaaccacctagttgcgcctcggtaatcgtgcactctgtacgagtatcgacggtcgccttcaaacttaaaatctgagaaacatcttgggtaaaacttgggttttacaaaagacttggaaaacccgacacctgggtcggtgcttgcgaacctaaatgaatttccaaaatcgcggaccggggaacgtaccgggtgtacggtttcccgctcttgcacttaaggaccgtttccttgaaatttcatccgaacataagacaagtacgaccacatgggtggaatgggacacccctggctgagtaactagcttatcgggggagccatgatgctaagagacatgtggattcgccggggtggtgtcggggaggacccctgggcttcctggcacagtatggtctggaacctaatctggtgttggtctgggacccctctcgttggtatatggtgaacctgtgtcggctttcgaaatgccttgtcattaaagccttaaggtctctagtcgtggccgttctgcacgggctggatgatccgggttagtaatgtcgtgtgggtaaagtgtaccccctctgcagaggttattaaactgttcgaacagccgtgcccacggtcatgggcggatatgaggtgattcctagcgtagttttgtttgactactgctttgtgaaatttgctgttgtggaatgggtttgatgtttggaaaatctgcggctgatgggatcagccaggcccgggtggccgtttgaaagctgttggccgggtgccaaccttgatcgattcaaaagactgatacattgcacatactccgaccggatgagacgcactgtctcatccgtgtcgtttgagaagcactcacttagttgtttcagaaaagagtttaaataaaatcaattgcaaaaacaacagcctttctttgaagcctacattaaacacttatttcccatggcttgctgagtactcccgtactcacccttgctctatataaataatcccccccaattgctgaagaagatgaagcggatcccgctgacgaggagttcttccaggagcaagccggctacgatgagttttaggatttcggcctagttcccaagtcgcgcctgtgatgtttggtccaagtcttggcttccgttcccctttttaatgcagttgtgagctcgggatctgtccgtagcccaacatgactgtactcctactctataataaagagacctctgttgctgtgatattctgtcttcctgtgataccagcactgtttcctgggactggtatcgattaacaggttaatttggagcgtcacgggctagttccggtcgggactagttcggggcgtgacaagagaggtgtaacatcctggcctagggcttaataggattaatagaatactcatatcaacaagttgtaacttttttttcggaagccaatctccaaagaactccagggttaagcgtgcttggcctggagcaatttgggatgtgtgaccgaccgggaaattcttcccgggtgcacacgagtgaggacaaagtgtacagaaaagacatgtgttggtctggacacatggacgtggccaagaaggacgttcctggcctggggttgatcaacgggggcgtcgatctctcttaagggggtgagggtgtaacattctggcctagggcttaataggattaatagaatactcatatcaacaagttgcaacttcttttccggaagtcttggcctggagcaatttaggatgggtgaccgaccgggaaattccaacttctttttcggaagctaatctccaaagaactccaggggcctgccaatctctaaagaactctagggttaagcgtgcttggcctggagcaatttaggatgggtgaccgaccggaaaattcttctcaggtgcacacgagtgaggacaaagtgtgcagaaaagacatgtgttgatctgtgaggacagtctataacctatgaaagctatcagatgtaagcggacccggtctgggagaggcggaacgttacattacatcagtgattagtcgactgcgggcttctctattatccatgctcttagcccccttgccattgcttggtgaaaatgcagtaaaaagtgtgggtcccagctggcgtgcggtagtcaaccgtgcgcccttggtttcctacgcccgtgtcagagcctacacggtggatcagtggatgtgatcaatggcagtggcaggagttgtcgtgctactagtactacctttcatgttgtgtgccgtcaagtagataaccatcacatctatcttaaaatgaagggatccttaagcggcaccaaggcccaaggaagcagaatggttccgctttcatgaagagttgtcctcgagatgtccgagaacaacaaatttctccgatcattcacaataaatggtcgcaaagcaaacaaccctagcaaaaaaaaaaaaaaaggttggtggaagggacatgtggcttcttgttggcgcgagccatttgctacggggatctttggttcatacttcattggtcaccgacactatgacactagtccctccgtctcattataaaccatgagttttcgcgtctaaatttgatcgtctatcttatttgaaatttttttataattagtatttttgttattataagatgataaaatatgaatagtactttactcgtgacttatatttttaatttttttttaaataagacggacgatcaaagttgggtgtgggaaaccatggctgcacttaaaatgggatggagggagtatatacctaaatatataaggtggttgtataaatatatgtgatccactagattagaaaatacgaataatctagcttaattctactactaataaaagatgatatgctaccaataccatcataaaacaccgtagtatttaattgtgaggactagaatattgctagatgataagtgtttctttttcaacaatggaatatgcaatatgtgagttctcatataattactactacattttttttcaagcaactagcaccattacatacatgctactagatgtgtttttgcctaccacacagttcttacaaccatccgcttcttctcaaccaagagatgaaattctatatcgaccataaaaacgaaaacagataagagcttgaacacaccccaattttcataaaatcccatgaccacaatcctcaacaataaacggaacagataaacccaataaaaaaccgtataataaaaatcgaaagaatccaaaactcccaagcccaaacgacaaacctcaggccgggaagcatccaaaccctaactcgatcaccaccgctcgtttcccttccatccatccatccatcgccgtcacgtgtcctcttccgccttcctcctcgcccctcgctggctgaatccccccaacccgcagtccgcaccaactcccgcaaaaaaaaagaaaaaaagaaaaaaaaaagagataagaattattttctttactaataaaagaggcggcgcctttcgattcgattctcgaatccgaattttactacgaccaggttgccgccgccgccgccaccgccgccgacgagctgggcgccgccatggcgctgctccccatccgcgcgcggctctccgcgctggacgacgacgacgacgacgccgccaccgtctcctcctcgcgctcctcctccgccgccacgtcgccgtcccgctcgccctcgccgctcgtcccgcgcgcctcggtcctcggggcaccgcgcgtcgcggcgcagctctcgtccaccgaggacgacaacggcggcggcgaggatgaggtgttcgacgaatccacggactacggggacgacgaggcggcgggggaggtgctggatgagttgtcgaacggcttcttccgcatcgccagggtgccgccgccgagcgaagactcgagcccgatctccggcggcgagccggtggtgagtgtctcctctccgaccgagagtgggtacttcggcgcggcggagggttctctgaaagaggagggcttcgtgggcgccaggaacttcgccgacgtgttcgacgctggctccagggtcgggtttgaggatgctaatggtgtcactgcgggtgccaagaatacaggcgtcgagagctcgttggaggggagcttccagagctcagggagcgtcgtcggcgtgttcgatgacactgacgtcaccacaataggtgatttggtgagtgcttcagatggttctccgctgaatgttgataagcagggggatcaggattctggtgctgaggttgtcaatgacgagcctgttgatgctgaggttgtcaatggtatagagcctgagcctttggtaggcgagtctgttgatgctgaggttgtcaatggtgtcgtgcctgagcctttggtaggcgaatctgggggctccgacggtggtggtatgcatgttgaggatgaattggagatggagggtggaaagtctgacaatgggattgctgaattgcctccagtggtgagtgctctagagaaacaagatactgatctcgagcttcgcaatgatgattctggtgcaaaagatggcgcggacaatcatgaggatgcaacgaattttgttgattccagtactggatatgttgccacaggagatggcgcatctgagcttttagaggttcctgccaatgttgacgacttgcattttgtcaccgatgacggtcataatgatgacgctgaggaaactgatggtggttatgaagcttctgatggttatgtgtcaatgccaacctttggaaacaacaatgctgttgaaattcctgtaaatgaatcagagcacaatgtacctgcttccaagggcaggcgctttggtctgggtgattcagatgatgagtttcatgatgatgatgtggaggaggaagagggtgaggtgaacggaaaggaaatagagtttttcgactatgcagctttagctgagcttctaagagctgccacacctggacaaggcatggccaaggttttcccaattgaatcatctgtgcccctgcaagtccctcctactacggtcagtgttcctaggaaaaatgtggcttctagccctgtgttggaagtggctcctaaccctgataatgagatgactgaagaggagaggaagttgtacagaaaggtggacgtggcacgaatcaagtatttgcgtcttattcatagactggggtatgacactgaacatcatatagctatacaagtgttgtatcggcttagtcttgttgaaggattcaggcgcataaaggtggcaaatcattcctctgagcttgagagtgcctggaagaaggctttgcaacttgaagcagagggaacagaggacttggaattctcatgcaatgtattggtccttgggaagacaggtgtggggaagagtgcaacaataaactccatatttggggaggacaaatccaaaacgagtgcttttcttcctgcaacaactgcagtgaaggagatttctggggttgttggtggtgttaagtttcgtgttgtcgacaccccgggacttgggactactcacatggatgaaaaatcaaacaggaaagtgcttaactcagttaagaagtatatcaagagatgccctcctgatgttgttttatatgttgatcggattgatacccagcgtcaggatgcaaacaacttatccttactgcaatgtattaccagtgtgctaggctcgtcaatatggtccaaaaccattattactctcacccactcagcagcagctccacctgaagggcctagtggcatcccgttgaattatgagatgtttgtcactcagcggactcatgcaattcagcaaagtatccggcaggcaactaatgatcctcggtttgagaacacatcagctcttgtggagaatcatcacctctgtcggaggaacacagagggtgaaaaggtgcttcctaatggccttatttggaggcgcctgctcctcctcctgtgctactcagtgaagacagttgagactaacagcctgtcagcccgggttgcttctcccgcaaacctctttagcctgcgttttcggatgcctccacttcctcacttcttgtcatcattgttgcaatctagagagcacccaaggtgtgctgctgaccaagatgttggagatattgatcctgatgagttgataaatgaggatgaagaagatgactacgatcaacttccaccctttaagccattaagtaaatcacaggttgcgaaactctccaaggagcaacagaaattgtactttgatgagtatgactaccgaaccaagcttcttgagaagaaacagttgaaggaacagctccgaagactaaaggaaatgaagatagagggaaataaccatgatgtacttggggacaatgataatcctgatgatgaatatgagacagaaagatctgtcatgccagattgggccttgccatcttcgtttgactctgatgatccagcataccgttatcggtgccttgaccctaagccaaactttctggtgcgtgctattaccaaccctgatggatgggatcatgattgtgggtttgatggtgtgagccttcaatatagccttgatgctgccaatgcgtttccagcttctctgtgggtccaagttaacaaggacaagagagaatccaccattcatttggtgtcctcaatatcagctaagcatagggaaaatgtttcaagccttgcaggcttcgacatccaaaccataatggaccagcttgcttacactcttagaggggagagcaaattcaagaactccaagaaaaacacaactaccggaggtttgtccatgactttcttgggagatactatggtgaccggagcgaagtttgaagacaagctatcagtaggtgatagattaacattgttagcaaacactggtgctgtgtccattagaagtgatacttcatatggagtgaatatggaggcaactctgcgagagaaagactatctgatgggtcaaagaccttgcaatttggggagcatccctggttagatggcataaagaatggagcatggctgcaaagttggattcccagttctctatgggaagagcttcaaacgtggctgttcatgttgatttgaccaacaaattaactggacgggtcagcataaaggctaatacatcagagcagttgaagattgccctattaggtgtctgttcaatgacaatgtatttatggaacaggatgcatccttttattgatcgtaattattaatagcactggttagtacaacaatttagaatttcttgaccattttatgcttttcttgccaattctgttgtgtttctgcttgttatttcaaacttccgttaaaattcctccagctctactgtcaactcatgttcgccttgtgttcttgtttattttgcacatgtataagtaaaaaaacaacataggagggctatgtttttttgttagagtactattgttgctgactagatttcctcctattcattactcatgtacactgtggcttttcattgtagaactgttttctacatgttctttcttttttaacaacaaagggactgtctatctgttatcctttgtattgtataattatccttggttccttccagccttccatatttaaatcattttgagaagaatttaggagctcatataatatactgtatatatattggaccattttttccagactggttggaaatagggattatgtgcataaaaatgtgatgggctaaattcaatttgtattggccaattgggctaaatggctttgagagaatgagggttacggggtcaaatgactaaaaaaggaacaaacttcagttgatggctacatttcaactaaattaacaaactctaattcccaagtgttttaaggtcaggttataaatctaattcccaagtgttttaaggtccagttataaattagtgttgtatgacaacccattagacaaaattcaaacagctatatgaatctactttcttctgctcaggttatttatatttcaaaactgaatttctcttggaaggtcatgtaaaggttctgtcctttcttggagtcctccattccaaggtaaaccatcatagtgcccaatctttttaagtcttttataattttagtagataaaagtcacttaagtgaaaatcagtgttttagctgataagttgctatatgggctagtaaaacttgtcagatgtgcaacgatcattagtctgtcggtaaagaagctgggaacttattgttggttacttaatggaaattgtgatggtgaactgtgttttacccaaatacttattagaagtagtgagtgaagctttgttatgtgaattttgctgatacatctagaaaatgatattgtgcccaagttcttatacatcattttcacccttaacttgtgattccataggtgcgttgggaagtgctcggaagcttcagagttcaggctcctactactcagctagggatataagttgaaccatcactttcagtcaagaatcaagacaagtgtagctgtgctgccatttgatgtttgcttccctccctccgatgtgcagttggtggacaactttaagagcagaagaagatctactcttgttttggagaaacttgtgatcagtagcagctgttaaaccataataccattgtaagttattaccatcttaccatctttttttttctctgtgttgcccctttcgatgaagcaactaaagttcgacaaatacaagaaatctagatgttgggtaaaacaagggccatcatattgtgctatgtcaatggttggtaaactttttgaactactatgcttatgccctttgtgctggacatctgataagcatgacacctgagaaattatagtttctgttagttgttgccttgtgttagacaatatatatgttgtcctgatctacacactgaaatcaaagcctatcacatcggttgtgccctttttttgtttggtaatatcaatgacaatttctttgtggatatccgaagataagataaggtgctggggaaagagagcaagaggattggcccactcggtgttggtttatcctttgcaagtgggaggggttttctttcatttcttgtcttttagaataggattctcaagtgattagtttatacaaaaggagaatcgaattcaaagtcttgccttctctctcttttctttctttgaagtgggggcttataacaaacatatatgatatcatcagattttattagggttgcaaattatgttcgaaaatatgaattcctgtgtttctggacttgcataagcgaaattattgcttccatatcaaaagaaacgacacataaaagaaacatttgcacaattagcatatcagaatgtccttcagagcaggatacatgcttcctgacatgtaacagccatcccagatcacaagaaatgaaaacgaaaaatggataatttggttgagaaagtattcacaaggaccgtctgttacgtgtaatactgaatatagcagatatagttttttagacgcaagattcggtcttccactgaatgaaaagcagaacttgtgataaacagcctgtcactaacccaagttcccatcttatttgcatgaaaacatgaacatgaaaagaacatgttctcatgatgagtattcatggctgagggttccaacagccatcagcttcccagatcaaaggacaaaacagaaagataataatttcatagttagaaagctcaccaaccacatagtatcatcagagtttttctgcataggtaatctgaacaagaacaacaggcaacaaagtgggacatggagtaggttttctcataactttgcacaagactctactagtccatactttcttgagttcatgttcatggctaaaaggttttaagctccagcaccacatgaacatctcaatatctcatcttgccaagaaaaacacgaactacatacctccttgttttccttttagattacacccacccatcatcactacctagttagtccttcatgcatgagttcatgttcatggcctcatactcccatcattcataattttacaagacttactcaatttccccccgttttcggttcagtttcttgcagatctgaccaatcaagacatggccatgcagcatgcccatgcatgtttctttagttcagatctaccttttcttttttatgtgtgaccccagggagccaagaacatgactctccttatggggtcctccgcggccgagccccggcagtcgtcgccgccgtggctcgggccgcggctgacggcggaggcggccggcctcgccgcgccggcggtgccataggcccgccggagcttgtcacggagggcctgtttgacctcgtgagcccaagaacctgaaccttccccggtaaagtgaggaggcttcatggcgagacagaagaaaaaaaatcctaatggcaactcacagagagctagaggtagacgaaggcaggtgaggtggtggtagtagttgtagaagagatttcattcacaggcttagcggaggggggctatttataggcgaaatgggagggtgcaaaggggaattccactagcaaaaacaaaaggtttggtggcttggtgtggtgctcacggaatcgggttccttctatggcagatagatgcaaattccaattcccaacccgattagtagtagacatgataattatcgtttggttgtggctttggtggcgttgtgatgttgatggaaatcgttaatcagggttccagttggtattgtgatgtttgtttaaaactgttgtcgtcaaattgctttttgataagcagctgtatagaaaagtgcgagtggatatttttttagtgagtgctaatacatagctactgtatgatctgcttttgtacctcttcgctcttccttatgatctgctgttcttgttccttttggtttgctgttcttgttcagtattgtataaccacaaaccatttctctgacgaatcttctaatttagagaggtctgtgtgttgagtgtggggttagctatacaagcaaaactagatgacacctcataagttgatggggggaaattgtatgaagcatgcagaaaattgtataaagcaaaatccaacagtttgagtaaataactagagtatgatagacaagaataaatagaaacattagtcgagtttctcgatgacgtggcctcacatatatttgtgggttgcaaacttgcaattgtatggaaggaaaatattggtattagtatagaagatgattacaattaattatgcagcatagttgtgagcttgatggtagagactgaggatgtaatacattttcattatctaaaaacttaattatgcaacactcaatactttaattgtgaaattgaagacttaattattattttccaattaatactaaatgaactgtgcgttgcataccgagatgtaataaatcgttgaacgaggcttatgtcagaattggtgtgtggtcgccttcctagagaaaatgacattaagcagacagagagtatccaacaataagaaccactattacagagatgttgatggtgattcaaaatgttggagatatgaccaaaaaagtgacagttgtatagtagcccagtaaaaacttgttagtaaaaatgttactgcgaaaatcgcctttaaataggtatattatggttgaaatccctaactatcctctgagcccataacaaaatgaaagaattctgatttatctgtggaagataaatcgattaaatttaaattcctctgcctaataccagataagtttgaagtttccaatgcgttcgtttgtgtgagatagggtgagaaaacaccttattttccgcgcgcacgcttcccaaattactaaacggtatttttttgcaaaaattttctataggaaagttgcttaaaaaatcatattaatctatttttgaaatttaaaatagtttatactcaattaattatgcgataatggctcacctcgttttacgtatctttccaatcctctcaatcccctaaccctcaaactcaccctaagtacatcgttgcgtaaccttaatattccgcgcctccataactgtaattccaatactccaatcgtttaccctcagcttataaactgcaaccaaaacttttaactttaaattttaattttgagatattttttcactatagtttattttttagtatttgtttttaaatttctaaaagcatatatataggttttgtatctaaattatatgctttcattgatgataaattgatttataattagcaaaacgaaacgatgacagtagcttagtgaagttatagagaagagagtaatagagaagattgcgataagatattaacgtataattaattaaatattaattttttaaacttaaaatggactaatatatttttttagagaaagtattttttaaagaaaaataaaccgtttagcagtgtgcgtgtgaaaaaggatgtctcttctcttttattcaactcttttttgccggaatcttctgttcagctctcaaaagcagttttaaacaaacaggtcatgggtgcatgatagatgcttgtcgatcaaacagctggatctgggttgaaaaggggattgattgggtcatggtgtatcatcaactcaaccgtattgcacttgggcgtttgggttggcttgtcgtggcgttgagagggcgaacaattggggtgtgtgtgtgtgggcttcaggattaggaggggagcgattaattggcgggcaattattgacttgtgttctgggtgtccaccatgcaggtggccagctggctatcatccactgccctgtactagactctagtaccggctgatggtagggcagccctaaggacacccataatgattatttataggctttttacaagagatccatgtcagcatatctttctacttgaaagagattaaatgaagagagagagcaaagttatctactaactataaaactcaggtgtatgcaggaaagcgtcacggtggacgcagggtttcgtgttgattcactatatgcaaaaacgcgctgagtttacagatatatatgcgtgcagatgtgttggttcggtgatcctaattacaagggattagagtcctatcctctatctatccgaaccaacatgcatccgtgcatatccatacagagaatgataagatatgataagatctaacactcctcctcaatcttaactctttctaggttaagattgttcttgaacatctccatttgtctcactggtatagcttttgtaaaaccatctgcaacctgatctttagtagatatatatgcaatttcaagcaactttctagctaccctttctctcacaaaatgaaagtcaacttctatatgctttgtacgagcatgaaagattggattagcagaaagatacttagctccaagattatcacaccatagcttggctgctcgaggcgattctactcctagttcttgcaacaaagtctgtacccacataatttctgctgttgcattagccagagctttatactcagcttcaatactagaccttgatactgtagcttgttttctagcactccatgatacaagatttgggcctaaaaacactgcaaaacctcctgttgatcttctgtcatctggagatcctgcccaatctgcatctgaaaaaccactaacaagcagagagggattcctacagaacttaagacctgtatcaactgtatatttaacatatcttaatatcctttttacagctgcccaatgagttgtagttggagcatgtaagaactgacacaccttatttatcgaaaaagaaatgtctggtcttgtcaaagttaaatactgtaaagcaccaactacactcctatactgagtagaatcctgaggtccaagcaatgttccctcatttactgatagtttttctgaggttgacagaggtgtactgaccggtttacactcatacataccaacccgtcgtagaagatctgatgcatacttctcttgactaagcatgagaccatccttcactttatggacctcgattcccaagaagtagtgcagatcaccaaggtccttaagagcaaagtccttgcttagttcctgcagaagtgttgaagttgcatctggtacagaactggccacaataatatcatcaacatatatcagaagaaatatagaaacctgtcctttcttatagaagaacagtgatgtgtctgcctttgaaggtacaaagcctaactcacttaacttagtacttaacctggagtaccaagctcgaggcgcctgtttaagtccataaagagctttatctaatttacagacatagttaggcatagacttcttttcataccctggtggttgcttcatatagacctcttcttctaggactccatgtaggaaggcatttttaacatccaattgtctaagactccaacctctagagacagcaagagacaaaactattctgatagtagcagctttaacaaccggactaaaagtatcttcataatcaatgccatacctttgcttgaatccttttgcaaccaaccgtgctttatacctgtctagactgccatctgctttccttttgaccttatacacccatttacaatctatgacatttcttcctttctgaggaggaaccaaatgccatgtcttgttttctatcagtgccatgtattcagcatccatggcctccttccagtgtttattattcactgcttcttccagactctgtggttcaccagaagaagtaaaatttagccatttaacagttccatcagtatataccttttctttcctgatcccgctttggagacgtgtttttggtctgatcggtgcaacagctgcttctggcatggcctgatcagtttgatcagactgatcagtagtcacatcatcatgcacgccagccgatgatgcaacagatggcgatgtggacgacgctgtttgtggggacgcctgcaccaggtgctcctcctggattggattgccatgctgctcagctgccgacgccatcgcatcatctgtcacaggcgaagagtgctccggcgacgcatcatatgccacaccatgcacgtcgtcctgtgcaccaccatttgctgctgctgctgcattttcatctgctgctgctgctgcattttcttcaccgtttgctacaatttcttcaccgatttctgcattttcttcaccaaactgatcagtaacattaggcggataattaagcacatggttattctgttctccccctaatgaagaaagatgcggaaccaaggatggtggaaggagagatatttccgctctaaggcgtgcgccggcatttgagtggagttcggagaaaggaaaaatgctttcatcaaaggttacatccctggagacatagactctgcctgtggcaatttctagacacttgaaccctttatgtaggttactatagcctagaaaaacacatctcttggaacggaaagctaatttgtgtttattgtaaggccgaaggttgggccaaacagcacacccgaatattctcaatgctgtatagtttggtttttccttgaacaattgttctaaaggacatgcaaagttgataaccttgctaggagtgcggttaataaggtatgccgcagcaagaacggcttcgtcccaaaatttaattggcatagatgcatgtgctagtaatgtgagtgcaacctcaatgagatgtctatgttttcgttcagctgaaccgttctgttggtgagcataaggacaggaaacatgatgagagatacctatcttagcaaagaaggtgttgagtttttgatactctcccccccaatctgtttgaacagcaagaattttgtgaccaaaaaatctctcaacaagagtttgaaactcctgaaacttttggaatacttccgacttatgcttaagaaggtaaacccaagtaaatttactataatcatcaataaaactgacataaaacttctttccaccaacagaaataggagcagggccccagacattagaaaaaataagttctagaggttgacttgacacacttgaagacttaggatagggaagctgatgactcttgcccttttgacaggcatcacaaattgagtctttatttgctacggtagaacaaggtaaattattcttgctaagaactctagtgactatgggcacggctgggtgtcccaaacgactatgccatcgggagaaggaaggagttgtggcggcatggacttgcttggcaggtgatgtaggaagggagtagaggcgacggcggcatctccccttaagaatcgtgttcctcgtggctcgatcctttatcaaaaaataattggaatgaacctcaaggaaagcaaaattatccatagctaaacgatgagcagagataaggttctttttcgcttgaggaacatgtaaaatatttttgagatgtaattcacgagtaggggtatgaatgacagaatcaccaatgtgcttaatttccatacctgcaccgcttgcggtgtgaatcttgtctcctcccttgtacttctcccgaacatctaacttgtcgagttcgttggtgatgtggtcggttgcccctgtgtcgaggtaccaattggtgtcgatgccatatgcagctgctgcagccgcactcctttcatcagggacataggtctcatcgtacctatgccaacactctgcagcgacgtgccccctcttcaggcacacttggcagatggggcggtcattaccaccccgagtctgatttcctccagtgccgcgcccacgtcctggagcagcaggattgctgcgcccacgtgtgccacggccgccgctgcgaccacgctgaaaaccaccacggccgcgttcgccgaagcatgagcttgccgaagagcttgcctgttctcaaagttaagaagctgagagtacacttccgccattgtggtcgactcattgcgtgccacaatagcagatacaacaggttcaaaatcatcatctagcccattcagaacataagcgactaaatcttcctcatcaaggggtttccctgaactagcgatttcatctgctagtgctttcatcttgccacaatactcagatatactcatgttacctttctgggtattggtgagagtaagccggacgttgagcgaccgggctttggtttgtgcagtgaacatggcgcacacctgctgccatgcctgcgccgccgtggatgccgtcgccacttgggtgagaatgtctcttgacagcgtggagagaaggaagcctaggacctgttggtccgaggcaaaccactcctggtaggcggggttgacgatcttctccgtcgtcttgtcgctcgccgtcttctcgatctccatggatggagcggcggtggcgccggtgatgtggccatcaagacgggcgccgcgtatcgcggccaggacttgcgccgaccagagcgcatagtttcctttggtcagtttctctgaaacttgaacgccaaagagaggattggtggaggcagtgcttgacgaggaacctgccatcacgccggactttgaggctctgataccatataaaactcaggtgtatgcaggaaagcgtcacggtggacgcagggtttcgtgttgattcactatatgcaaaaacgcgctgagtttacagatatatatgcgtgcagatgtgttggttcggtgatcctaattacaagggattagagtcctatcctctatctatccgaaccaacatgcatccgtgcatatccatacagagaatgataagatatgataagatctaacactaacctggaaatagtctagagaaaaacgaggcaatccattagagagctatacatacccatgtagacatactattgagatggtttactattaatctagtatattgctgagatgtacatgttttatagagagcactttactttaccattgtgggtgctctaatgggtggccatcgttctcgtgggccccacggctgactaggattcctattctttttctcccccgtgtgggccccacccatcactctcactagctcaggtcatcgtctgtttctgcctgcctcgtcgtgagtgtgagtgtgagtgtgagtgcgaggtctcactctgtctctctgtgtgtggccatgtttttgtgtttggaggcgtgtagccttcactgatgatgacgacgatacaaagcattcaaactgtatattgtgacttctgtaaacaaatcggtcctgtttactagaggctaagatcaaccacacaggaaatcattatagtctgatactctaatgatcaagtgataacatgatttagtttgcaaactggcgtagctctagttagattctagtggaacccaagttcaagtaccagacttaaacatatgctcatatttacggctaattattttttaaatagtaggcaactacccgtcaataatgaaacacatgtgataatctatgtgtcgtcgacttaatctctcagacatgattatagagataaagcattaaagcgtgcacatgtatatataaacattattgttcgcactatgttttatgttttaataaaaaaaaacatgatttaatttgggcatgggtggccgagtagatcattttgaaattggaaacaacaaatcaacagttttgaaattggccaatctattgctatggcatagaatattgggcctattcatattgaaagcccagcccaattattacaagtttcatttactgcaacacttattaaatcactatatttgctaaatttatttttaaaatataccccatccgtccaaaaaaaacccaatcctaactataaacctggacatatgcgtatccaggttcgtagctagggtttgtctttgtttaggacggagtagtattttttttatccctaatttattaatattgttacctctgcacgcaatccggcccatttgttgaattgaatactagtgtggcagaaatataacattgaatacatttttgatacattctcagtttttgttttgtattagaaatattattatattttagtaataaatttgactaacaaaaaattacaccgattttaataattttgggggtcaagatatctgtattgtggttaagggatacaaatcagacttggccactagttaagggagtcaaagtgacttactccactgaagctcctctgcaacaatccggcccatttgtatggcagaaaagctaggcccacttgaatctggtagattcctcctggttggttgctgggctcgccgccgtcttcctctccctcgccggagtatagtagtacaaggccgatgcaacactgacgtggccatcaatttgatcccgtcacgtctccgccctcttctcctcgcttcttctcgccgccgcgcccgcgcgctgctgctcttcgcttcttctcggcttccctccgatctgagagagcaagcatagcaggagatcgggagacctgtgttgcgcgccatggcggcgatggtggtgggagcgttgaggaggggaacggccaccgccggggggagctcgcggtccttcgcccgatcgctccctagacctgtaagcttcttcttccccttgtgcattcgattcgattaataagcggttggtggaggaatgtttcgagacgatttctcctttcgatttcatcggattcgtcgcttttgcgctcccacgattggctccgactgtgcctaaccgcgtacttgctctcatgccctgatgatgctaggtgagcacgctggtcgtagcggagcacgaaggtgggttcgtgaagccctcatctctgagcgcattggcggccgcagaagcaatcggcaaggatgataatagggtttctcttctgttgggcggatccgggccggggcttcacaaggctgccgagcatgctgcgtccagccatccattggtatccgaggtatggtcatgtgctacatcttgttcctatgtgttgttgtgcttgagcgattgaattctagaagcctattattgattcatttcagggatggagatgataattgataacctctgctcttcgatattgtgcttatcagttggcttgctttcgctgcaggttcttgttgctgattcagatgtctttgcgcatccattggctgagccttgggccgagctacttcgttctgttcagcacaaaggtggatactcacatgttatagcgtcatcaacctcgttcgggaagaatttgcttccacgtgctgctgcccttcttgatgtgtcccctgttacggatgtcacttcaatatctgagccacgagtctttgtgaggtttgtcgtcatacattcatactcctttccatgaagcttagcatttcaaggagaattgcccgtctgccattctgtgtagtgcacacctttcgcagatacccaaggttatagcacgaggttttgcaacacacgatgcatacatgttgtgtagtacatgaagcattttctatgcatttcacatgttttgcaacttagctacatgcaatctccagacaatctaaccactatttgatactgaatctgctaaatattattacaccactgtttttcccttttctaatgctgattaatagtggtttttccattttcccttttctttggacactgatcttattaatttatggtatcctatgggctaaagattaatcttatgagcccatttcccatgagtgcataatggcattctacatttctttctgcttgcaaccatgtgtttcttttgtggggatcattttatccgtatgaagaacaatggtatgcagggaaccttgggtggatgaaccattagccttgtgcgcgcagcattgcaatttgcacccccaagagttgttctctcttctaatccatatgtattgtatacctttatggtataataatatttatgcttctgaattcaggcccatttatgctggaaatgcgctttgtactgtgcgatatactggagaggatccatgtatgatgagcattaggtcaacatcattttccccaactgaggctatgtcagaagcaaaagttgcacctatcacccaggttgatctctctttcctcagtgaaggtttgtttggtttcttcactatattcttctattaagaaaacaacgttcttatccattatgttttgctctttttggatattgatattgaacatactgttgagtgttgagttctgcactgaactctggaaatcaacagataatactagatcgattttgttgtctatgtccttattgtgtttctgatgaagttgaaccttgctgcagggaaaataaactgttttgatccttaatatggacacttttctgacatcaaatataggtgtatacatgcttacttttttcttgtcaatgtacaggaagctctgggaaatctgcatgggtgaatctgaaatcccaagatacagaacggcccgatcttgcaaatgcacccgtagtagtaactggaggcagaggtttaaaaagtgctgagaatttcaaagtattggagcagcttgctgagaaacttggagcagcaggtttgagcctttttttttccctttgtccatctatacctactaggtagcacccatattctttgcggttggtatttgaacctatcaaggctcgtgaaattcatttcgctgtgcattcgttttctgacggattatgtttctcctctgtagtgggtgcgaccagagctgccgtagatgcaggatttgttcccaatgaacttcaggtaagctctacaaactgagctctatgccacgtcaggagataattaaatagatatgattggatacatgccatgtcagaagataattgaatggattcagctgatatgaaactgtaggttccagcatgtgctactacaagcgtagtgaagcttactgcattagcgccctaaaaaaaaggcttactgcatcagtgcattgccatcatgatagctgcaaatttacgcgcacttttatctctttcccttggtgcttaatttattacttatgttgcaatgtgttctatctcccctcaggttggtcagactgggaaaatagttgcgcctgagctctatatggcatttggagtatccggagcaatacaacacttggcaggaatgagagattccaaggttatcgtggctgtcaacaaagatgcagatgctcccatatttcaggtaaatcttgggtctacagagcttcatcaaagattttgttcttcatgtcctttgccagtaggctttcaaccttaggattttaagattcttataatcatgttggccaggttgcggactatggcattgttgctgatctattcgaagttcttgacgaactgttaaagaagctacctgacaagaaatgagcgtgctaacatgatgatccgtgtccatgtcatatttgttctagtgttcttaataatatgaagcgcccttgtaatgtgattctgcaaaaataagtgtcatttcatatgatcacacaagcacaaacaatagacgtgatgtcgcttcctgtgcaaatacacttggactagcaattaacaatcatcattttcactagcaggtgtcgctgaaagtacagtacaggacagcgaaacaggtacagataaatcacaggctaacaacataccatgaacatttcacatggaatttgccaaaagttcatagttacagtggcgggcccagctttttaaacttgggtattcgaaatgggaaggggtaaaaaaatgtccatacaccaaaaagccaaaaaataggcttgtatattatgatacactaataattataatttagagcgtatagaataaaattgatcattagttcacacagtgatagaattgatcatcactagaaattgtttaacttatagaaatactaataccaaacatatcaaagtgtcaaaatatggaatacaaaaatgatagagaataataagttaggaagaaaacttacaatttagatattaacttttcgacgcttgatattttggaaataattgatgatgtccttgtccttagcttgcaaaaagaattctctttcaatgaatgtaaccaaacaatcattcaaatactacaaatttgctaatatggtatgaactatgaactactgtccagtgtccaatatactcaattactcaaatactcaaataggcaactagtcaactacaatcctacaaactaaatgtctaaatcaagcaagcaagcaagcaagcaactacactaaaatactaaatgtctaaatcaatgaatttttgtgcttgtcccgttgtccggagtttagtcactcactgtgctaatgtgcttatccggaatttgcaggtcaggcagtcgccggcgagcaggatgccgcacggccgcagcggcagcgcgcagccgccggctgcctcgggcctcggcgcggaacggcggacgccgacttgcaggctgcagctgtgcagcgcctgctcctgctcggctgacggcctggagcagcctcctgcctggctgcctcctgggcccctgcaggctgccgcgccggctgccgcacgcggcacgccgtcgcccgtcggtcacggtgcgcctgccggtcacgggcttggcgccttggccttggcggctcaccgcctcaccggtcgccgtcgccgccgccgcgcccgcgccgttgcacgccgcggccgcgccacacgccgccacggctcccgccgccggccgccgcacgctgcacgcagcccccgccggccgccgcacgtcacgccgccgcacgcctcctcccgtcgccgtgctgtactgctgtgttgtggtctagggtttgcaggtttgggtggccaaggcgccaggcgggtggggaattgggggaaaattgcaaatgggctgagatgtggcccaattagaccacaggtagagaggaaagagggaggggagtggaaaattttggcccaatagagaagaaatggggaaacaaggcccaatataagcagtttaagttttctttttatttttttaatacctatatgaactatatagtatatataccttttttttttccaaaaatcttgggtatacatctgaatacccatgaatacatagtgggcccgcccctgcatagttagatttgacacgcaaacataatgtccaaagaatgcccacaaaaaggtgtatacaagcttttttacgacctaataagaattgaatgcgatacaaggatgagctaacaattttctatgagaatatcagataacgcttgccaaaacgccttattgttttgtcgccaaatgaacacgaatgccagaaaacgataaaaagaaaaaggaaaaggaaaagtgtagaagacattcaaaaagtttatacatgttacacgtatatgaatctgcgcgatccgtatgagattgtcgggtaaagatagataggtgatcaagactcggacttatcaggtggggttcccaccagccagccccacatgccactggaactttgcctttgctttgcctccaacgctgcttgctcagaggcagccttctgtcttcgaagcagctcaacctccctttccaatgcatccatactctggagcttctgccgtagctccgcaacatccacctagaaaagcattttggggaaaccaaagtgtgatcaggatatactcatcacatgtgctacacaataaccaaattgtttactactacttgttgaactcatttgtctgccacaaaacacacacacagtgcaatttcggaaagaaaggactaggaccctgtttagataagttttagttcctatcacatcggatgtttgaacactaattataaatattaaacgtagactattaataaaatccatctataatcttggactaattcgcgagacgaatctattgagcctaattaatcaatgattaccctatatgtgatgctacagtaaacattctctaattatggattaattaggcttaaaaaatttgtctcgcgaattagctttcatttatgtaattagttttataagtagtctatatttaatactctaaattagtgtctaaatacagagactaaagtgaagtccctggatacaaacaccacctaggtttatcatgttctcccttgggaaggtcgttcaggaggttatttcttatgcgggttaatccgagctattactgctggcaacgtagtaaaaatagcaaattttgttaatttgtacaatgtaagactccatacctcaagtttgaaacatcttgactgttcagcagcaagttggccacggacagtttgaagttcctacaaaatccaaaccaacaaaattgaggatatatcgttccaaagaagtgattcagatctccacatacaccaaaactcgtgaggtgtgcatagcactatgcacaccatgtaatccaaatgtacctttgcaaggtcaggtcacctacacggttcatcttacgttcctttgtggacatgtatgctaggcaaaatatgtagtgcaaaccacatctgtagtggaaacctgaaaactattattggatctaaaatggacaacggagatttgtccacgttaccaagaataaaaattttactcctagattcaaccatgactcatgacatggagaaatctcatgcgtccatttttttatccaacggtagtctacaggtttccactacctatgtggtttgcacttcatatttttcctatatgtcaggaccaagacatgttagaaacagcgataatacatactgctagcaatgaacatcacacactattcagtacagggtaagctcaatcctagtgcatgtgttaaatagtgccatagggtgttgtgtgtagtactcagactacaggttacaaagcagattataaaacaaatgaaaatgtaataataataagttacatgcagaagaatttgtaaaaataggttcattgcataattgaaagattatgcaggaggctcaccttcgtcagctctgcatttctagcctctgcttcagcaatctcttctttaagctgtatagtttgcacttgctccctgttaagtgctgcttctagttcctctttctcagctttaagagctactaaaagttcgtttgcgtcatccttcttctgaaaaacaacacagcatcaccagacagaacagctgagtgtcttaaagcatcattcctcatgggtaagacataatcagcatggtagcaacaaacaatactggaatgattattcacagaattttattttcacagacactaattttctacaaaaaacccatatttgcaaaaaagagtcaacacactttctgttcaatcgaagtgtactgcacaagagattaccaggtctgaatcagcactgtccatggcaatctcacggatcttcccatcatgagaaagttcaacctcgggttccagaacgctggatgtaccatctgatgcatgctcttttgtttttgactgcaaatctgatttgagggtaagtttaagagcaaagacctgtccatcaggaaaaaccttgttacaaattacctccacacatagatactaaaaataaatctaaaatcctaaagaaaagccagttacctcattgctgtatcgtccattgtatcctccaaaagaaatgagataatcatctccattgtaattgctatgcactaaagtcatgccctaaaagaataacagatcaaaacattaccaactgaaacaaaaccattctaagcactgcgtaatactcaagagtcgtacctcactggcaaggggaacacgaccttctacagagctaacaactgaccatgttaaagttgacatattaagcacaagtgtttcagagacacctgcaaagaataaagtataagctaaatacattctaactgtaaataaagtatatatataatttaaaattgatgaacctacagcaagtgtacaaaaaatacaatcaatttgttactatttaagaactccatgtggcattagaatgaaagtaaccttaatcttcctagtttcaaggtacaatttgcatatcaagatggcaaggatagttgtactggctttgtgggttttactggatatagtttctaggttaagtgatgcagattgtaccagacagtgaacattgatctaaaaaagcttcctgcatataaggcaccaagttgacaagttgcatagacaaataataaattctaccactatctaagtgttggatcagggctgaggtgctatacacagacaaggattggcaaaaaaaaaggtggcttccaaactctttgcagtgcagcaattgacaaggtacaataataagtgtaggaattatctaaggaggtgaaaaaggccagcagtagtatgaagacatctttgcattgcaattagtaagaaaatatttttcacactgcaagtgtacgcactaaaaagcataccacttttgttattgccaccaccaactatgtaccagttttccccaacggttgcacctgcatggccagctcgtgggcttggagccagaccctgttgtttgggtcttgaccactccatctgtaattccatcgataaaattagaaatcatgccacattgtatagatgccaatgtttgtgaattccagcaagctaacagttcttactgtttgcaaatcgaggacatgcaagtcattgaaacatgttgcatgagaccctccaccaaaaattaaaagatagcgatcagcatggcaagcagcagcatgatctgatcttggaggaggggtgcctttacaaaaagccaaaaaatat

SEQ ID NO: 26602 - DNA, 7865 bp, Oryza sativa
atattacctaggaataagcattccattccataaacttaacaaggagagaaaagaagcaaaatatgatgattatcccaaatgcttagttgtatgaaacaacaagacttgtaaatcccttgcttctaaaaaattagaatcaaacatagcaggtatccagtctccatacgattctgaagccctcattttactgcacactatactatcattaaataaatcaaactcttagttcgaacaaagcatatttagctgagcccattgtgcataagcactctccacaaacttttaaagtatttacgttacacgtagcaaactgtgttcaaacaaacaaactccgctaaaatcaagcaaagtacacagaattttcctttttaagacgggtttactaattaaagcacagtgaaacaaagaataggtagttgattacatttaaaggtctttgttcagagcttgctaggttgaagaaataattaccggtggttttccataagtcttgacaatagaccatgtacaagtatgcggatcaaattccttcactagcataaaatacaagaagaaaaataatagcttagaagaaaaaaaatgacagcaatggggacacaattggatcacagtactgtgttaaccaaaaagtgagttttagcaaacctgtaatgttctcagacggatcttttgtgtgcccagcaacagagaaaaatttgttgccccaagatatctacaaaatagcatcagaggacatcaagctaagcatcatctgaaacatagatagtgacatttgttccaaaatttaccaacgaatgtccagcacaagaagagacttgtgctgatttagatgaatcagtggatcctgcttgaaattttgcatcaatcttcgaccaagtcaaactcttcagatccaaagcctgtgctcaatatagatagtgaaagaaatatgcattaggtcaatgttacttaatgatacaaagttatttaaatatagcggatgaattgccatttttttgggtagattcaagttattttcatcatacatgtcttcaaactactctttctgaatattatgcaatatgagcctcccattctgcctaattgagtcaacttcatgcaggaaatgcttacatcataaatcatccatagtttcatttgtaatcccttttaggaatatttgttgttatcttctcgtttcaaaaccatctatgagtcatactgtaaattttgcataagcatgaaaggctggtacagattacaagttacacatggttgaacatcacaccacgattacaacatatcaggcttcttatcatgaacataaatgggcctttatccagatagcatatccaataaatacaaacacttcaggacaattctatgacaaacagcagaatggcaactgctcatatgtctccaagtccaagacaaaaaatacttaggaggtccacatgcaacctgcttgactgttatatttagcttcacatacctgaaggtcgctaaggtaacgcccattgtggtttcccccaaatatatacatcttatcttgcaccacagttgcgccatgctgcaggaataaaagttcatattaatgctatgaacagaggaaggggagaactgggataacagttcacaacttaaaaaataaaaataaaataggcaaggtagccaaggccccaggtgcatatggcatacctcgtaacgaggtttgggccgctgcccattaacagataatggagtccattcttcgtgaacactgacagcactaagaccttccagaataacaactttgtcctgtgtctccactgaacttccattctcagatatggttttaggttctggaaccgatgttccatttgttgaagccagaataaccttgggatcttcctttggtttcttgtaaacagaaatgcagtaagcaaaatgttaagtttatttcacaaacaatttattaatcagggcattgagatgaaactacagctgatagaccaatactttcaaagattagagtgaattctaaatagataggcaaaaaaacataagaaatatacttttgacaggaaacaacccatgcgtacccactgcatttatgaggttacagaatgcaacttacatgcatttcaatatctacaacaggctcagggttgaactcaggaacccttgagtaccatccaggatcttcctcctaccaaaataccagcgcattaaatcgttgtgcacagggtgaagaatacaatgtaaatagtcatacctctaagattttaacaaacagccgcatcgcctctgccgatggcatacttccaagcccatgccagctgaaaatacaaatgtgtaaagagacgatcatgctttaaagacatgcagtatcaacatttgattgaaggtctatggatattcctgccaccggtcagctctctagcttatcagtccaaaatttaaattacacaagacagaaatcctcttctaacttctgggcatgtgatagcattccgttctaatactggcccaatgataagcaataaaataaggcagcagcacaagacagatagcgacatcatcttatattaactaataactagcatgtgaagtttcaacctccaattcgatcaccaatgtttccgtttctccataaatttaaccagaactatcaagttcgctaatacggagacaacttcatgcaggatcgcactgtaggtgatactaaccttgtccatttgctctgctccacagggttccatgccctgggtttcggcacattgcaaggccccactgttgcctacaccaaaacgaacgcaaaaattcattccgacagccaaagcaaatcctccctcccaaaagccagtgatcaacaaactaacgctataattcaaccctgcgcatcatcaattccacctagatccactccacgcatttcccaaccccccatccaaccgagacaaatcgcgtcacctgctggtagaggccgtagaggaggagggcgacgtcgttctggaagcgggagatggcggacgaggaggtggccccgccggccccgaatccggcgtaggccgccgcggcgtagaaacggtcggggtaggcgagtccggagctcgccatggccgcgcgcccgcaacgcaagccctagatctctccccgcccacccactcggatgagatctcgcgcccactgcccgcgaggcggagagcactagcgttcgcccctcctcctcctcctcctcctcgccgcggcggaaatggaaatctgcagcgattggagacgagagaattcgagatctgggaggcttcgctcgctcgaccgacgctcgcttcgcgggcgatgaatgatggatggctttaacgctcgttctccgaggtggcgcgggggtgtccacgtgtcggtgacatggtgggggcgagtgacgtggtaggagagtcgtcgcggtcgccacgacgacggttaatatgaaccgggtctacggcgcgggtcaccgtcaccgtgaaccgcgtctagtctacgtagaggagggtaggcgcgggtgctggagtaacgaacgtgtgggaagaactaggaaggttgtcgtggtgttggtgggagatccatcctcattcctcgcaccgcggtaccactagcaaaaaaagcgctaggcggctttatacactgcaaatactgtattcaaatatgctaaaggtctcaaacaaaacaaacttctctgtgtttgatgattgcaagctgatgtgggatgggtttggtacaatttctattgagcactgtaatagaaactccaatcaggtggctcatgaattggccaggttagcgtttaggacaaaaaaattttgtacttgggtcgatgaatcccctggctgtgttctgaaccatctggtaaacgatgtaacaattttatcctatcaataaagctagccgaatggcattccccaaaaaaaaaaacttctcacgtacttcatccgtcccaaaatataagcatttttagcatagtgttaggtcaaacatttttaactttaactattaatagaaaaaaagttaaagagatcaataatgtaatattgttactagatttttcattaaacaaattatcataatatgcaattctttttatttaaaacatcttatttttatatatattgttggtcaaattagcatctcgaagactgtgtcgaagtctaaaaatgcttatattttcggcgggggagtataatttacactttacattactcaggtttgatagtgctagatttttaggttaattagatccatgttatgtcattgcaaatttatctattcaaaaaaatgtcattataattcatttattcgcagtcatgctaccaaaaatttacaaaattaggatcatgccaccgccatcacatttttcatccatctccttccctttctgtcttctactttctttctcccgtcttcttccctcccttctcctctttgctcagctccttcgatgaccttatgcttcacctccgttttgggcactataacgaatagcacaccattctttagctcggcgcggaccttgctcttgtcgcccacattggggagcacgagccgcatgttgtaggagctcatgctgcgctccttccaccacccatcgtcggagccccccgttccttctcctccttactgtgctccccgcggatgacaagcatgttgtcctccaccatcaccttcacatcttcccgtgacaggcccagcatgtcgaaccgtatttcacctcgtttgtcatcatccatgatgtcccgaagcatatccgcaccttccctgtcgccggcgatctccacagcgcgacggggaaccccagcgtgacattgttgaacattcagtctatcatgtccagcatctatcgtatcaaccgcatcggtgatcagatccacgagggcgaatggggatatgttgttcaatgccgagcgcgcgctgcacgacattcccctgctggttcccaccgttctattacctgacgtgctcctccaggcggcgcggatggggaggcacgccacaggtgagacccgggtgacgagagcaaatggaccaaccgttgcactaccaaatagagaggaaatcaaaagcattgagatggagatcgttggagaggtcgcgtccaccatggcctttactgtgccaagcatagaggaaaggagaggaaagaagataggagaaagaaggaagaagatgggaaaaaaggagatggatggaaaatgtgacgacagtgacacgatcctaattttataaaattccaacggcacggttacggatagtcgaattgtaataacatttttctaaatagacaaatttacagtggcatatatccaactaaccctagatttttagacatatgtttggctatgacctcatcaattttattttcaaatatataaaagtataagctatgcttaaagttcctttaatgtaaaagaaattacaatacaaataaacaatagctatgcaataaaataaattacatatgtttaaaatataatggtgtcatatattaaaacagaaagagaataatttttccataaggcttggtaaggttaacttgcacctatatgaattaaaaacattgttttatagcaatactaaacggatgcgaattaggtgtgtttagttcgcgaaaagaaattttttgggtgtcatatcggacgtttgatcggatgtcgaaaggggttttcggacacgaatgaaaaaactaatttcataactcgcctggaaaccgcgcgacggatttattaagcctaattaatccgtcatagcacatgtgggttactgtaacacatatggctaatcatggattaattaggctcaaaagattcgtatcgcgattttcatacacactgtgcaattagttttttattttatttatatttaatatatactttatacatatgtccaaagattcgatgtgatgtttttgggattttttttcttttttttttactaaaacatgctagggggagtcagctagagggccttgggcgggcagaaaaacaccaaaaaagctggagaccgaacaaaaccgagcggaccgaaccaaagtatcgatttattcggttgtcggattatgcttaaccaaaccggctttactctttgaccaaaccggcccaccccctctcgctccacctgactgcgtgtgcgtgaggttgaggtatccccaaatttccttccgccgccgtgctgctggtcaccgccgtggcgaggcgaggcgatcaagagctgagctaccgtggaggcgtggattgagagtctgagagagagcaatgacgccgcagctgcagccgaagcagatgcactgggcgagggccgactcctccgacttcggaggccaaatccccgcccctcggaggtaatcctctcgatccaatccacctcaaatccccgccgccgctgccgccacctgaaaccatgtgaattttcgtgcctctgcagcgggcacacggcggtgagcatcggcaagtccaaggtggtcgtcttcggcggattcgccgacaagcgcttcctctccgacatcgccgtctacgacgttggtaataagccccaccgcttgcttcgcctgattgcaagtgccacgattcagacgattgattctgtttagataagagcgctgaaccttattagctgtgtgaacttccggatgcaactcgtgtttgcagagaataggatttggtacacacctgaatgcaatgggagtggctcggatggacaggcaggccccagtccaagggcctttcacgtagctatcgtcattgactgcaacatgttcatctttggcggccgatcaggcggcaagaggtctgcgattcatacggctatttgctgggatttgaaaagcaccctataaagaattgccttatttgttgtttataacatgatgttcattgcgcagattaggtgacttttggatgctcgatactggtaaacttctatactttctcaagcattttaagaccccttccttaatttgtttgggcgtatagtggaggttcccgtgattactaataaccgtcatgttgcctctttcatattccagacatatggcaatggtcagagttaaccggctttggtgatctaccatcacctcgagagtttgctgctgcttcagccataggaaacagaaaaattgttatgtaagcattccatctaatgcaagtttccctttcatttctgggtaccatcgcttatgagttatgaagaacatttggttcatcctgattcaggtatggcggttgggatggcaaaaaatggttgtcggatgtatacatcatggacacaagtaagttaacttcctgttcttattcaatcagggttgagtatttaatttattttgttcaggatggcaataaaaaaatcaatcaattaataactacactctctattggacagtgtcacttgagtggacagaattatcagttactggatcagtgccacctccaagatgcggacattctgccacaatgatcgagaagaggttgcttgtatttggtggcaggggtaacttacatttcttgacttgacttgtatttgctgatgatttttaattattaatgaatcaatgcataacttttggccatcaacatatatttctgattatttcatatatttttttcaataggtggagctgggcccataatgggtgatttatgggctttaaagggtgtcactgaagaaggtacatcttcctagttgcttgtaaatctacttatattgagagggaaggagggtgggatactaactgctatttaaaactggaaaactcaactatttgcctgggagggagggggagaagaagaggagtggccgaatggggaggtctcaggccatcctaactgctatttacaacatctgacacacaatagttggtggtttaaccatttgcctctcaatag

SEQ ID NO: 26603 - DNA, 15021 bp, Oryza sativa
  unsure (1)..(15021): unsure at all n locations
acgcccatagtggtgagtactcaaggttgtttgactatgctcttgagctgatgcgaagtaaccctggaagtagtgtgcatgttgcccttgatcctgatgaaaatgagcatgtttttcagcgattttatgtttgtttagatgcttgtcgaaggggattcttggatggatgtcggagagttatcggatttgatggttgttttcttaaaggtgttgtcaaaggagagttattgtcagctgtaggaagggatgctaacaatcagatttatcctatagcatgggctgttgtggagtatgagaatgcaagttcatggaattggtttcttggtcatcttcagaaagatcttaatattccttatggtggtgatggttgggttttcctcacagaccaacaaaaggtattttgcagctcgttgctctgttgtagttcacttgtagtttatgacacttcacagtttacatgattaacttgttgtttctatctacaggggcttctaagtgtcattgaacatctatttccaaaggctgagcatagaatgtgtgcaagacacatttatgctaattggagaaaaaggcaccgtcttcaagagtatcaaaagagattttggaagattgcaaggtcatcaaatgctgtgttgtttaaccattacaaaagtaagttagctaataaaacacctatgggatgggaggatttagagaagaccaatcctatacattggtgtagggcttggttcaagcttggatctaactgtgattctgttgaaaataacatatgcgagtcattcaacaattggattatagaagcacgattcaaacctatcataaccatgctagaggacatacggatgaaggtgactcgaaggattcaagagaataagaccaacagtgagagatggaccatgggaatttgtcctaatattctcaaaaaaataaacaagataagacatgcaacccaattttgtcatgttttatggaatggttcttctggatttgaagtcagggaaaagaagtggaggttcactgttgatctctcagccaatacatgctcctgtagatattggcaaatatctggaattccttgccaacatgcatgtgctgcctacttcaagatggcagaggagccaaacaaccacgtaaatatgtgcttctctatcgatcaatacagaaatacatatcaagatgtcctccagccagttgagcatgagtccgtgtggcctttatcaactaatcctagaccattgcctccgagggttaaaaagatgcctggtagcccaaagagagcgaggagaaaagaccctacggaagctgctggatcgagcactaaatcatcgaagagaggtggttctgtgaaatgcgggttttgccatgagaagggccataactctagggggtgcaaaaagaaaatggtatcaatacaattacctttaaatattccttacttttcacttgatcacacaagatagtaacttttgttggtatcacaggaacactcatcctcacattacccatcacatccagatcaagctgcaccttctggagaagccaatgattcctcggttgctcatagaaggggaaagaccttgctctctcaaagccaaggaagtgccgtgcaattggcaattggagccacacgatctaggcaatccaggggaaaacaacctgctatttcatctaatagcaagacgactaaaaagggaaaaatgcctgaaggttatggattgtactatagtgaaaggaccggttccacatttcttcaggttagtaaagcgatcatgctaataattcaatctgcttgcattattcaattatagagatgtacactactttaatcgggtaaactaattttctttttgcagtctggacataaaaaaagattggtgtcttttccaagtcgagatcaatagctcaagcttcagctacctatggcgtggcgcatcagacgagcatcaacaagatgttggatggcaacagaattatttgttcttttttttaagacgagtccagggtacctgtgtgaacctttgcttaattatgtcatgcatgttggctataacttttatattgcaatttgagttgattgggtaaaatatagttgctacttttacctacttacacgattttgttatttctaggattttgataattccgtgcggtacagagttgaattgttctatatttgtttgcgtgcacgtttaactactcacaataaataaataacatatatcattagatacaatacatgcaaaagaagataaatggttcacacattataatcggggtttagatggagaaaacaaacagatagactgagagagtaatggtccggcctttttttcgttcctccatgttgtttcctttttttttcctttatttttttcttttctttctttttaatatggtaagggtagaatggtcatttcatttgtattgttgcatgcaagaatgacttggatgctcatgtggcattttttttgggtcgaaggactatgttaacccaaataattaatttgaaggacttgtttggacgttttgaaacctcaaggactaaactgagcccgaagcgaaacttcagtgaccatattagctattctcccttccttttgaaagtgactgtttaccatattatcactgtggattgtttatttaattaacgggataaattaaaatttaaagaaaatctaattcataaatagattacacatgtggtcaaacaaatgcattagaagaaagttgttttacaaaatgtattttcagaagcatgtagcaaataacccgtttcaaaaaatatggaaaacaaatctaacaagaaatggcctagttagtgccctactctctccacaatttgttatgacgaatttgaacaaacatctgtccagatttattctcataagttatttttttccgatatggagggtgtatatgcatactccgtaggtaaagagcaaatgaatcaataaatgacagtacattgctcgtactggtaccaggcaagtatatgtagctgcacctttccctctgcgtgtagccgtggatcaacaagtgacttttgttttggaatttgcaacacacatgagcccgcaaggctcttcgtaggtgattttttttttcttcagtaaatccacttttataacaactccacgtggcagaattttggagatttttagctaaatttttgggctgccacgtggtcctatgacaaggttaattcttaaccttttccggctggagggagtagcatatttattcagaatgattctggcccactggcccatgtatctttaagcagagcaatgaaatactctatatgcttatccagctgtaaaagataactgtgtgtgtgtatatatagccaagtattggtccttaaccgcaagtttttaatcaaatcatgaagcattgttggattggtggatcagaagaacatcttaaggtgggaaaaacaaggctaaagcactcaagtcaatccacttgttggtggtatgagaaatatggtgtgaacgaaataggagggtgttccaaaatcaagataagaccataccgcaactcctcaccaaaatacaagacaaaatcaagctatggagcatgtgtggggcaaaaaatattgcgagaatatccgcttagattttcatttcatttagtgtgtgtttcttttctatttttcttcatgtttctttttttctctctttcacctcccatggtgatattgtaaatactttctattctccttaatataactccagcttagcctggctacggtttcaaaaaaaaaatcctgctcatcaatatgctgaagtcattttacagattaatggtctgcgcctctagctacatagtgttgttgattgcgcttttgcatgaactgcacattttatattagctatttttctagatgatacattttcagagtccatggtatgttgtatagtataccttcatttaaatttgacgaaagcccttccttgaattacacacaacattacaagttaataagccacgcaaccacgcttaattaggctaactatttcttaccagaatacaaaacataacaatctctgtcaatcattcttacttagggcttgggctcttcagtttacttaggctcacacagattcatacttcctgtttgcagaaggccacacaattgatattgttagttactgcctccgtttcacaatgtaagtcattctagcatttctcacatttatattgatgctaatgaatctagacatatatatctatctagattcattaacataaatataaatgtgaaaaatgttagaatgacttacattgtgaaacggagaaagtaattatattactcatgtatagatgcatagaccgaccaggatggtcatcatgatacaacaaaataattctcatagctgaaattgcaacacatttccttagaaatttccgtggtgttttaatctgcaaattatattaatcacattttatctatttgctatagtaattggaatcatggtttgtaaatgtgatggatgattggatgcatagtagaaacaacttgttatttgttcgttctgggatctggaggactggggaggagctgaggagcttgtcggtggcaatacaacatctacagattggaaaaacatgtatatatattaagcttgtaattaagcatatgctaacaaactacaatagctcgatcacacatgatgatcagtcacaacttaatcaattgagtcaaatatggtgccatttattaatttccaagctgttagcaaattaaatgaagtggtggatgcatgcatgatgcatgtacataccagtttacataattatattggagaactcatacaggcgtcctcgactggagaagatgatcagtccgatctcagcatcgcagagtaaggcgagctcgtaggccttcttcagtagatcgttcctatgcttgccggatgtcacctgacggcttgtcatgctcttgattctccctatgtcgatcagtcgatctcccttcacaaacatatacacaaccgcaccctcctctattagcagttcattacagaagagcagcccgacgccgctgaagcttggaggagatattcatcagctcgcggcaacaggacgcctgacaacgacgctgtccgtcactgcggcagctggttcagtcgccaagcagtcccatgcgccattgtcaccacgcacatggcggtaaaccctggggattcatgctcgcgtgtgccgatctcgtccgtcgatagtggagggacggctgcggagagggtcgcgtgggaggagagggcctcgccgtcatcggagctagtcactgctgcccacctcctcccccctccccacgcgcagccatcgagcttattatcatccccatccagcgacgaggagggggcagcggcaggctggatctgcaccgcatctgcttaaggagccccgtcgccgtgctgccaccgagcttgatctaggagaggggacgtcgtcatcagatgtcgtcgctgccagtgacaacaaattttgaattcttgaggcgtggaagagaattcttctctctatattatcaggtagcattactaaagttgtgaaagcactgatggtctgatggatactcatccgggaagcactaccagcaatctgggcttcagatggaaggatatagatggacgcgtggcagaaatttggaggtgtctaacttaaatttttagggcgccacgtggcccaataggagacttgattcttgaccctataatcggttatagagatttgtaagatccttgtaagaagatataggaatccacaccacataagtagaatactatacctcggggtgacccgaacctatatagttttgtggtcgttcattctccattggtacgcgaggggcacaattattggtctcaagtgcacttggctccccgaccggactcacgaaaaggggacctagtcggatccccgtgatcgggagctctagcccacaacacataggcgtgtcatagatgttggaatagtcaagttcaaacatgtgaatatcacatttattttgtctattgcatattaaaatttataagatatttttggtttatatatccataacaaagcacgtgcatttttgaaaaaaatttcttactctattgtccaaaaagatagtcaagttcaaacatgtgaatatcacatttattttgtttattacttattaaaatttataagatatttttgtttatatatccataacagaacacatgcatttttgttagttctccaaagagaacacaaaggatataaaatattagttaaaacaaaacttttcttactcttattgtccaaaaagaacacaaggatataatactcccattctccaaaaggttgaagcaaatttttttcttactctattgtcaaaaagaacaataaaaagtacgaattacccccctgaactattgcggtcgaccgaattaccccctaaacccgaaaatcagacattgttcaccccgaactttcaataccggacgaattacccctctcaatccaatccggagcggttttatcctacgtggcgtacacgtggcaattcagtcagcattttcttttttaaaaagttgtgggacccatctgtcgtacatccccatcccctcttcctctctctctctctctctcacggggtgcgcagggggggaggtgggcggcggcccgagcggtggcggcgggcgcggctgggtggcgagcggcggcggcgacgccacctcctcaccatagccgctccaccccttcccttccccttcttcctccaggtccggcggtgacggcgcggaggagccgccgcgggggcgttgtcctccgtgtcgcagccggcgttcgtgcacaacgcgcgcgtggcggccgcggcggcgttcctgctcgacctcgggggcctcctggtgttcgtcgtgctgcattggccatgcttgtgcgtgctattgggggattgattggttttggtttggaacgattcgggcgccatgatccagaggaggattcagtgaacttccctcgcggttgttccgaccaannnnnnnnnnnnnnnnnnnnnnnncggtggatggttttcgtgtcatggggagttgcagcgaatggatgcgatgtagccacgcgtgattcttgcgaggtcgaagggcagagtgatggatttagtaaaagaagtgagagttttcctatctgattatctcgtcctccatatgttgtgctaattctggttaaagtgagtgccgacggttaaagttcttttcattcatactttagcaaagcacaccagtaatgcaaacagtcttagagtcttatgtgatgataccttcaatgcaaaagttattctgaagactgacaagccggcggcgagaggaggaagaaggggagaggccggcagctggccaaggcgagctcctcctcgtcgtcggtcgtcctccgtggcctcgtcgacggcgtcgtgggccagcggctccaccgtcatggactgggtgagccctgagacaccgtctcacgccgctgcccactgcccggcccgcgcgccgccgtctgccgctccctcgtctcgcgccgccgcctcacctcgcgcccccgcctgcccctccgcgccgcgaaggtgaggtcggagcggtcgcagccgcggtcgacggagaccaccaccttggcaccgaggtgcttcacgaggcggacggccacggcgttgccgagaagaagaacgccacgtcggcggcgatgagcgtggcctggtctctgcggccaccgcggctggcgtcgcgcatggcgacgagctcctgccggttcccctcctcgtttcgcgtcgtcgccgccgcacaccgccgtgcccgtgcgcgcctgcggccacgcgagagagagattgggaatagctgaataagtgaagagtaggtatgacatgtgggtcccactttttttttaatgaaaaatactgactggattgccacgcggatgcagcgtaggacaaaacagctctagattgagttgaggggggtaattcttctggtactaaaagtttagggtgatcaatatttggttttctagttcagagagataattcggtcgactacgatagttcaggggtatttcgtacttttttttcaaaagaacacagggataaaatactccaattctccaaaaagataaaacaaaaaaaattccgttgccgggactcgaacccgggtctctcgggtgagagccgagtatcctaaccagctagaccacaacggattctgatgggggagcactcattaattatttgtctgtgtatgacgttatcaggcgattacagaaacccgcagtgtataggatatagagggcgcgtgttacaaacaattaaacggcctgatcttgctatgattaagatgaagagcaaagattggctaatgcgaattattatcggagaaaaggtggctgagccgtgtttgttaatttgacggctcatctcgatctggggcggccgtgacactcggaatactgagacgggattgagagtttgagatcccctgataattttaggggttaataacaaacacaagtaaaatgtagatttatttacacacaagtagtataagatgtagtaatcggacggacgtggtagagggagacgagagagaaaatggaaggttcggaaacgggatcccgaggctgacatgtggggccacagttcccgtccgttctcgcccgcgtgaggtgtaagcagaaagacgatcaattcaattcgggtcggtttcgcctcgtctctctcattcagatcgtctctctctctgggggggcttcaaggagacgacgcgacggcggccagagagatgaacatcctcccatggcaatggcaagggcaagcgcaagcgccccgaacagccggcgccggaggaggaggcggaggcggaggcggagctcaactcgatcttgctccgcaagatggggtgcacaaatatgttgtcgccgtcgcagctctcgaaaataaagacgatgttgcagtcgaggcccgatatctgcaagaggaacagccacctcaagttctgctacagcctccgcaaccgcaatgtgttcgtctccaaaacccacaagccacggctaggccctctccagtacaagaaagggtaatctcatcccatctcatctcctccttttccttcgcaatttcatttcctcgcatacaaatgtgaaatactacaaatttgtatcagggggttgctataggattaagttgatgataggaatctggatcggggtccccttcctccaaacatgccctaatgttttttcttttactttgttcggccgatatagcattatccattttacaatcaaatatacactaaatgtttcactatgttcagtttaacatgatgttttttttttgaattagattggtgtaatgcaatcaagacttgattacctataaacatgtgaatggtcagcaaattgattaagctctctgcagtccacatcgatatgcatgcaatgcgcaaaatccagtttaggcattagttccattgaacatgatgtactcttcattattggaacacctgtaaacaagatgttgcatatttagagcattttgaaagatatttcgttgttcctgattataaatggcaacccaggagcatttttgttgtacaagtgttgttttagagctgttgcagttatcaacagcgtttgacaatctggttggtaatccaattgtctgtgcacttgttgactaacgtttgaactgtttttcatttcttaatatagttggtttgtagctcaaaaagaaaagaaaaactgaatcgctctgaatatagttttccttatggcagctatttatcaacaattaactgatgactatgctgtctttgctctacttccttgcaggaaggaacctgtgtatgatgggtcatggcagaccccaacatgtgcaaaggttgctctagaacactataacagatcaaatgaggtgtctgcttaaacacttttcatgtttattctctatattatttgtgccataggagtacccacttatgttggtgaatatgttggcaggatgaatatgagatggttaaagcactggacagtgtttcttccttcttcaatggtgtgtgggtgcatgtaaatttccttgctaaactcaaaggggccacccaatgtcctgaccttgttcccaagttctttgctgaagtgaaatccgattttgatggaaggtcatgtgtctcttgtgttaagattgacacaggtatgttaagttacaaaccacgagattgttgttgtattggtaacatttctatatgaatgatggtctacttctttctctttctactgctgcatatttcaagtttagtttggttcattgtaatcataggttctgttaagtcataggttgacccaaaaaataatttgataagtatgcatgcaacacttgtgaggttttactatgctaacaaaaaaatgcgaagcagataaggcttgttagtgaaaaataaaccatcgcatccacgttttgataaaagaaaacaagagatcattttcgctcgttgtttcatctctagtttgacagtattagtttttggactcaaatattattatcatattctgattggtgcaaatcattcacataaattaagttctaattctgacttatttcttgcaggtaatccagaggcaacaccaattcgcggttgtgggatttgccaaaataatgagatctaccatcctgctgttggagggcaccgaggagacaggaagagtgcatcataatgtacgaagggatgtaagcgggccgaccggataatctacttatatgttaaataagtggctaatccgcaggtttccgcatcatagcccgatttaccacacctagaaatgtaagtgggtcaattcataaacccatccataggttaaattagtaggtaatccgcgtgtcaatccgcggcctgagttacccactaattttgcctataaacggcttcacgggttagctcgcttgtatccctttaggctttaaccatagttcttttagacagaagacagctgcccagctttggattgcaagcataacagttggtacagagcttcttttttccccattaactacaagattacagattagggcgaactccgattgagttgtgtatatacagtgatcaatacaatactctgatgaagatgaacttcattaattcacaaacatcagaatttacagaaaataatcaattcaactctcttctcattaattacagatcgatcgagaagagaagcaatgcatatgcataacctgctgcaattcgatcggaaaaaaaatcactccgaatctttgatgaagatatttcattttagtcacaaaagggcgtgatatcacactttacagaaagaatcagttcaactcttctcattaattacaggtcaatcgatcgtatcttcacgcatctcagttgcaaggcacggatcaaacaaacacctaattgattgatccatgcatgtctaactaaacccgctcttcgatgaaaaacactacattactgagtgctagagccgctcactatggatcaatcaaactcatggcagttaggtttatccgggcactaaaaatttttctacaccggccgctgatttcagtacatttttggttccttctctgaaagtttagcatttttctctgatgatgaaacgtaactaccatgcgttgcatgaggcaaacaacgatgtttccaacagccggagctggagttgggacgtcgtcagtttcagaggggttcagagattgaaactccgaacaatctctatacaggaaaaatcatttttttaaaaatcttgttccttctctgaaattaatttcaggatttttctggttatgaagagtgaacataagtagcacgtgcgttgcatgtgaggcggcaaacatgtttgaagccggagctggagagtggagaccattcagttccagagagggttcggagattaaaactcccaacccctttgatccttcctttttcaggctatcttcttcttcttcaggtttaggacatagatcgtcccatttagatcggataacaaccatttagatatgcatgcaatgcacaaaatccagtttacacattcaaggtcagtggcagttagttccaggaacacgatgtatcatgtatgcatttttggaacacctgtaaacaagatgttgcataattagagcctcttgaaagatattccgttgctcctcattataaatggcaacccaagagcattttcttgtgcaagccatccactacatttacttctcaaagttctcactaatctatccaagtacaattgatacaattccatcaatactggaattcttttatccataatctcttacctactactatatgcatgtcagcatgtgtcttctgtttgcacccatgaatagcaatctttgatatactttcatcaaacattcatttttgcacaatataatatccatggggcaaagtatgacacaatcaagcaataaccgttgtctcagaagcagtggaagcaagaacaacatcagattcagaccaaccgtcccatatctcgggcaatgcttccttgatgttatgaatgctttcaagagcgtgatcagcacctggaaccagcgttggcctcccaacctgcagcaaattcgtaatattttattttaacacgattacacgaacaaagaaaggtaggagttttcaggttttgaactgtttatgcagtcttacaatcacagtgtgaaagcctgcagcttttcctgacgctatgtttcgaacgctgtcatcaaagaagatctgaaaatacaagttcaagaagtcagatttccgccgcttgatacggaagattttgggccatgtaacttaagaaaagattctcactgttttctcaggatcaacattcgcaatccgaatcgcagcttccatggcttcaatagagggtttgcagagaattggtgatttaggtctgaagccatcagattcatccaggtcatccaaatcagaagatagttcatcagagatagaacttaggggcttgtgtagaccatggcatgttggggttggtggattcagtgtctcgaagcatattatgccttcgaagcagtcctgtatacccaccctgcacagaacctcctctgcatgagctttatcagagtttgtgaatatctgcagcaagcaaatcaaagattataaaaaacctgccagcaaggatcttccaaaaggcaaaactatagggaagtatcatactatttttctctgtggaatagaaagtagaagggtcctcaaaacagggtcgaaatgcagattgtcatatggcagtgtaccatggacatttgcatgaaattcatcgttatcaaactcgtaacctaatgcctgcagtaacagttgcatgattagaaaagaataaaaaggcaaaaataatattggcaaaatcaagttttttttttctttatgcaaaatcagagaggtttaccttaagaccagccatcgtggtgccatattccttgtacagttccaggcacatatctgcaatttggctttcttcaattcgcagatggcgacgcatgtaatctggcagtcaaaattaccaaattgcagtctctcccaacatttgtgagaataaaagtgctttataaacaggaagatacggaacatgattagtattactacacaccttgtatatttttgcgacaagctagattgatgccagagctgaaggggtacagggtatcatccaaatctgaagatgccatagcaaacagattcattggactgtgcagttatattgaacaaacagtgtcctctggttttataaggaatggaattgtggaacataccaaacagcaagcactcatacttcgatccttcaactatagcctccattcttgatgatcaaagctgaaagggtgatttctaaatgaaatcacaccaatttgagagcctgaaattacatgaggaacttatagaatgacaatatgatctcaagagcaaaaattggaagggactctgcaacatgcctggtaaaacaagtaacacggatttcaagtacagaaccaatcaaactgaagctgccagacctgaacttcagcgattcacagtcatgttatattgtttccaggggcatataatcgtttttttttccccgagaaactcgggaggctgtggtaggaaatatatttacagggctgagcttttggcaggacactcttggctttgagtcctgacaaccccagcaaaatatttttgtggttagaatttggtgtgagcatgtgatatagacgatgtaaatcaaatccaccattgtttttactgagagggcatattctgacattagctaagtttaagtgtatttttaaagttcaatcaagtatcatcatctcacaactgttcaagatagaaccaataataggacacaacgtcctctgcaaaaacaaaaagggacaataataccaaaataaagccaaacaatggagagcacaacgagagagttgctcacctcaaaacagtgaaggcttgaaggctcctgatgaatggtgttgaagctagcactctacttatagcattccaactccccaaggctccacgtacagaagagatgcccactgcatttgaaggctgacatagacatgaagaacaggatatccagccaatttgttgcccgtcactgtagctgtacatcaaggcaaggatgcctcttaacaagagaacagatctagtgttcaactttgaaggctggcatatgctcccaactcccaagtaagatctgcatgccaggttcctacaaagtggcaggggaatatatggcaacaattgaaagaatcaaagaatacagagtacatcatctgttttgaataccgtggaattttgcgtagatgaagaatattggagcactttgaataccgtggaaatttgcgtagatgaagaatattggagcactttggtagcagttggatgtaccattcgtctattccaagtgctgttgtttatccagcaccctctgttgaagtcataaaggatgagaaagaataagaatataaaatggatatattgcgaatcagaattcagaagcttccaa

SEQ ID NO: 26604 - DNA, 3547 bp, Oryza sativa
  unsure (1)..(3547): unsure at all n locations
actcacttcacatttgaattgatctagtgcaacacccgataaatcctggtcaagaaatttcttcactgcaacttcctgcaatagatgaggacaataaattaccagagcaagaaactcacaaaacaatggcaatttaggtgaaaatgaatcatatatgttttgtttcttccagcttggtaaatttgttacagtgggcctgatatttccctattttgttttattggccttcctaggcaacaaacctttgatatccaatagttacctgttaaaagtcactgctttgcaatacaatgaaccagtggtggctctatttatgagctagttcgtacagacacagtagttatccagtcctgtactgtcttactatttaagctatagaccttacgaccacttcgtactactagcaaaatataatataagaattgctcttcaaatatgtgacttacagtgccattccaatctgcatgatatacttccccatatgaacctgcaaaaataaatttagtttagaacacagagagtaatggtacaaaagaaaagtatccaatacattacagagtaatggtataaaataacacaaaatttaacttagttcagtatgtaaaaaaaattaaaaaggaaataacgatggggatcacattgcaaaatccagctaatttattccactctctagcctgaataagtgcagttttatttttatttttcagtgtctccataatacaactttggccaataacacagaaaacaccattggttgacagcgaattataacgcaatgaaagtggtgttggtttagttgtaaaagttcataatttagaacaccttcattctaaaactgaaccattagcaagttcctgaataaaaaaaaatccatgatacgcgcagcagatatcgtatattttggaaattagaggcattcagacaagcaccagtcgttaaaatagaacaatgtctgtgaaacaagatcgatttcacaatacanagcttcaaagtggatgactaccanaaatgttaaggaagaaccataaaaagtctgaantttaatcaaataaatgaatgtatttattactaatgtatttagtgccatgtagagagcaagagacatttactctttctgcatatatattcatgtaacttggtgttcattgtaaacttgaaatgcagtatgttgtccccttagagaagctacctcttaataactacttactgctatactagtaagtggtaatataagatcttggaattaatgcagatacctagaccaatgcgctctccaatatgaagatcttcccatggtatttcatagtcagcaacgtcatctataacagagctgattgttttcgtgctagaacagctcgacttgtccaagtttccattgctacttcctggcatcttcaccaaagagtcctcagaaaacctttggtcctcgttggcaatggcatgagctgtatgatcatgcaaatccaaatttctgccaattgcttctgtattccccacatcatgctgtgcatcttcatggaaacaattcactactgctagtgttttggtattgccatgttgcaatggagaatcttccgctacatgaccatttggcaaattttgacctgttttagcgattaccaaccatcctgcagttttgtcatcttcagaagcagtatgtttgcatatttcaggtttctcataggtgggtagcaatgcagtgccctccaggagcaagtcttgcaaattttgtgcaaactgtgggtccacttctgtgggcactaaatacatgggagcatcgttgactttcatcagatgcggaatttcccctccatcagatatggtactttgtttaagcgggttctctgtgtggaagatgtcttccagctgtgaacttgcaagtgctaaagcagatttttgttcagatgaacttccccccatgtcacttgtattcttacatccagcactaatctgctcaagggctatgcatagttctgcaacactctcctcgatggcatcattgctcagttgactattgttggagtcctgaaactgactgccagaaatatctgaagggattaatgtgcctggagctcccatcagatcaactatatattcaacactgcaataggatttgattgttatatatcaacacagaagatgtcctaatattaaatactgaaagattgtaaagatacaatgtagatacctgtcaaaatcaattttaaccaagttaatagccccttcatctgtccccgtataatatattcctttgacaagcttgcatggtagattaactcgatcagctagtacctgaaaccaatctgatcagttattttctttgtccaacagaaacctacttacgtagaaagctgtcaccaagatatgtagtcaatgaaacaaggttcaaaggtgtttctttttcatcaaccatttcaattatccattccatacagcaaattcaagatttaccgatgcccataaatgaactagattggcttccacagttggactaccacagctcataatggacaatataactggttgaaggtgagtactaaacatctaaacatttttcaatatcataactggaatcgggaatcatttgtgctttaaacaaccattccacaatgtaaattgtgcaacaagatggaaattgttaccatggggctattcccatattttcttacacttgacataatttaatgccctatgtgaatgactggattgaagtagaatacagtacttctgcagagatactaaccttaaatagcaaagatctgtggcgcgacaacccaatgcgaagcaaaccaagagggagaacaatactgttgcgctgaaggcatagcgcgcggctcttcactccccattccctgttcatttcatcagcatcatccaccggaccgcccatagcatcaaccacaaggtttgcaatcttctgcacgagctccggcgaagcgactccaccatgctccgccctatcctgcgcggcaattgccagagccctcccttcgagccgcttcagcgccggatcacgctcccgattgaccaaaactgccacgtacgcggcgtctccaccgacgggaaccgccctgagggtggtcagggaggggaatttggcctggaagtgcggatgcatcggcgcgccgcacacatcgtagaacccgtcggagagcctctcgtcgtagttgacgacgcagtggttccagtaccgcgcggagagggcctccatggggccccggtccccggcggcgccgccgaggctgatgcgctcggcggcccggatctggaccgagtcggcgtccacgagccccgcgtgatccgacgccgagatggccagcgcgagccgcacctggtactcctcctccagccgcgtcatcgtcgcgtccgcccccatccccctcggctccgccgccgccgccgccaccggagccgcaacaggagccatcaccggcgccgctcggccgccgccgccgcggcgacgaccggaggaggcggcagcggcgggggctgcgccgacgaccgccgatgctgccgcgggcggtggtggtgctcccccgacggggcc

SEQ ID NO: 26605 - DNA, 24403 bp, Oryza sativa
tcctcctcctcctcctcctccctgatccgatccgcctacccaacccaacgaatcagcgtaccccgacgaactcacctcctccctcctccgagcaccaccgccgccgatctaccaatccattcccgcgctgctcgatcgcgcggcggccgctgtaaattcgttgcttcgcgtcggcttcgcctcggcgcgcggggggtagcagctgccaaggtgaagcgaggaagaagaagaagaaggcatcggcatcttcccctctctctccacttttttttttccttttttattatttttggattattattattattattattattattattattattattattattttgggttgctcgacgtgtagtagtggtagactggtttgggttgggttgcttgcgcggtctccggtttggggggatcggatgatgatggggagcgtgggtgacgtggcaggtttggatcgtgcggctgggattgatccgcaggcccgtggtccagactagaggcttccgagtggatggatggataactcagttttttggatggtttgacactaatccccacttctagattaacctagctctgtatggacgtgttcggcaaattgtgggtttataataaaaaaataaaaggtcattttagtttagtgtcaattctcatcgtaggagtaccgactattttttttaaagcaactcaatgtgtagttttggataatactttttttttttaggctgggaatccttcccctcagcgcttaaaatggatttacagtctcacagattaacataaattattaagtattgattaaaaaactttaaaatagactaatataaatttttaaaataactttcctacgttttttttaaaaagacaccgtttagcagttccgttcggaaaacatacgtagcaaaaatgagagaataaaagtattaaaaaaggaaagaaaaagcacattcttaggcagtcatttggattggaacaaacttttaccaaatctatagagctgagatacatctgttcaaataaaaatttggcaacattaaaagttgaaatattacacctaataaaagatgttttaatcttaggcatccttacatctcacaccttttattctaaccctccactagtttgtattttctaatcttatcctttatagccctaaatgcccctattttgattagaaaatcatcgctctatcggcaaaagtttcttctaataacttagcatacattcataatattcaaagttgaaagcgacaagttaaaaatgagctatgtatatcatcaacccgattctctttgttttccctctcacaacatatatagggattttttttttcttctcaatacatccttacattcttcccctctattaagaacttaaaaatgacaacgaaaagtaggatcctcgtcatgccggcattagagagaaaatgtgcgattatccctgaccttctactacgttcttctccatcatgacaatgtgcgagtatagtggaagcttaatgtcactttacattccgatacaagataatcactagggtaacaaaaattcagctggtttcaaaaatcaagattcttcgtgtaccatgtgtgttcaacaaatgaacaacttttacacgtctagaaaaaggaaaaccttatatataatgatctaacacctcattggtttatatatgcatttctctctcagctctagataacttaatttttactcaatgctataaaatcatagtagttttaccaagaattttacgctattccttcaaagatcaaatcttcataaactatcatttggaatttctaggtttgaccaagacagctagacctactaacgttggtcttcatctactccaaactctgttcacgtttcaactttttatttatttgtaacaaaatagaagccttcagtttttttttctcctttaattttcggtaaaagtggttgcctcctggcgatgatgagttgtattagccggcaagtatagccatgaaggttttgtttgactttcaacggcagatttggaaccatgcagacacccacattcattggccgagaagcgtataagcactggggccggctctcctgttgcttaatttgtcgtttaattaattacactattttagtgaccgagtcgccatcgtcttaacggactgagcgtctcaagctacagtaaaagaatttacttagctgcatccaggtcaagcagggcggaggtaggaagttatcaagagtaggaccatgtagatgtagtttcattcattgtgtttaaatttcgggtttgtttggtttggaaccaatttttactctaccaaaatcttggtagtgctaaaatattagcaaatattggcactaccaaattaggtagtgttgaatttgaactattgtggataaaatttggtagcaaatcaaatatgcacttgctactattgaagttaccaaaattttggtagggcaataagttggtatcaaagcaaacaatcccttcatctaaattttagtgtttttccattgattattttttgttacatatggggcccaagactaaggccctgtttgattcagcttaggattattataatctagattattatgagtaagctgaaataaacagatagcttattatgatagattattacaatctatacgccagattattataactagctgggtggcccgcgcaattgcgcggctagcacccaaacaaattcatataatttttagtatgattttacttaaaatttattaaatagctatctcattatcttaagactttgaaagaccaaaccttatcatcctcgtgtttgtacatatagtttttaaaagtcacaccagttgctacctcttatgtcatctccttttttatttgcttgctcgatctaccactattttaattcattcttcttgaaacctttaaaaattggattttataatttttagagtttattgtcacgttgggttttgcttttataatttccatatatcacgttaaacgttgctattatactgctctacggtccatccactgtttcttctctttattgtcatgagatattaaaaatcgaacataattatcgtttgggttcatttttactttctagaagtcccgccaaaccgtcagcggctttgcgattgtactcctctacggctcacgcgctgcctcccttctttattgtcattgagattttaaaatcaaacatgattatcattggggtttttttttacttttttgaagttccaaaccttttaaaattggacttgtaattttattttttataatttttagaagtcccatcaaacggtaccactatgcccctctacagctcgtccgctgcctactctttattgcactgtgattctaaaaatcgaacataactatcgttggaatccattttttattttctagaagtcccatcaaccgtcggcggctctgcaactatactcttatacaccccgcctgctgcttctcctttttattgtcattgagattttaaaaatcaaatatgattatcaatgaggtttattttttttactttctagaagtcccggcaaccgccttacttgtttgcttcacggcctgcctgacgtccctccttttaatcgtcattaggattctatttagtgttttattaacagtttttatatgtcgtaacaaccgccaccactatactcctttataggcatgttacttaatttatctcgtcatgtgttttagatggtcatttcttttaatagtctttatttttatcacaaatttagttatttataaattgtatttctaattgaaatcttatttttctttttctaattttagaatttatttttttaaaaaaattagttaacatcgtattgtgttcttttagtgtttttattttttattttcaatttcagttgtttcaaaattgtattcctacttgatctctcttttaatttttataattttggatattattttattttttattcaaaattttaattaatctcgtattgggttttttatatggattcttctttcaatattgcttatttttaattccgaatttcagataatgttaaattgtattcctacttgaactcttcttttattttcttttgcttatttcggatttatttttatttttattctgaattttaattaatcttatttttaattctgaatttcagctatttttaaattgtattcctacttgactctcatttccttttttaattttggattttattttatttttatttcgaattttgattaatctcgtattagattcttgtattagattcttatatggaaacttctttcattatttcttatttttaattccgaatttcagctatttttaaattgtatttctacttggactctcctttccttttgtaattttggattttatttaatttttatttcgaattttgattaatctcgtattgggttcttatatggaaacttctttcaatattgcttatttttaattccgaatttcaactattttttaaattggattcctacttggactctcctttttctttttctttccttttctaattttggattttattttatttttatttcgaattttgattattttcgtattggattcttatatggaaacttatttcattattgcttatttttaattctgaatttcagctatttttaaattgtatttctacttggactctcctttccttttctaattttggattttattttatttttatttcaaaatttgattaatctcgtattgggttcttatatggaaacttctttcaatattgcttatttttaattctgaatttcagctatttttaaattggattcctacttggactctcatttttcttttttttctttttcttcgattaatgtgagaatttctagcccccacagcgaacgtgacgccacctttcaaagctgttttaataatataatagatctggtaatccactctaaatgtgctttttttaattattagatagctaacatctaacaaacagctaataatctagagaaacaaacaactaacagcttattctatatcaacttattataatccagcttatagtaatttggctcaataatctagattacaataatctcaaactaaaacaaacagggcctaagctgccccacaagtagctccgtccctgagcgcttgttgcatgctatgcaagcatgtatgtaaactcagtggcggagtcaggaaatttactatatgggatcaattattattattttagtatggtcatttatgtaaatttgaatggatttataggaaaaattaagattcaaagggcaatagtgaaaaagttgtggggttagccgacctcacaacttacacatagatctgccattctcagcgtaaacccggtttgtgccatcaagcaaaacaagtaccggttcgatggaaaatgtatgtcatcgctattattattggatcgccagtattgacgtaataggctattttaagtaaaacaaatttgtatttaaaaatgactggctagcatatatgagagcatagtataaccagtaagtttttttttcctggaaatatcttggggagtgaaagggagctagtggcatcgtggctcatgcatggctgtctacacatgtgagatggtagatggtactatctcctagttgagcattaatctataattatcgattgattaatcaaacgtgtgcttatgtgtgtgcacaactgcacatgctgatcgatgcaagttgacttatgcacacgggttcgtgtatgtgtatccatagctagccgacctattttgtcttgaagcaaagaattatacacaagtggctcgacctgttgacttatagtattaaaaaagggtacttttactttgcaacaaaataaagcacttgaattgtttatcgaacaaagagaagaaggagatacatgatggggtcaatggttagtgttatccaaatccgcttgcatcccaagggagagacggcagagcaaaatatctagagaagttttaacatctagacatatatatgtttagattcattaacatctatataaatgtgggcaatgttagaaagtcttataatgtaaaatggatgaagtatttcatatgtgtggttggtgtagacggagaaaaaagctattattttggaatttgtacaattatctaggcgatttcttaactcatccttttggcgtatgtgaaatgagaaattaaataccgaccattataagcttggaaaataaatttatttaattatttttatacaacttctatatagaatgcttttaaaagagtatcattttaacagtttaaaaacatgctaaaaaagagaaagttgaagtttgaaatcaaagaaaataagtaaataacatagcctaaacattctacaatttgatccttttaaaaatttatattacaaacagaccttccgcaaaatttgttctcccgttctctctctctttttttccacctttcggtgttatcatcgaatgggcctccggtgtaggcccatcatttcatcatgggcctcattcctgccagcccattcgtcagcccaagccgtcgagcggcggcgcgtctccgccgcgagcggcgccggcgagcggcatctcctccccacgccgcctcgccgtcggcgacgacgtccccagcgccaaggtcagccaccggcgccgccgccgcgcccccggtccctcctcccctttctctctggcttctctcatgtcccccctctatgccctccaccgcgggctgctccgccgcttcgcggcgcgcggccgtcgcgctcatccgcatcgagaagcggtgagctacaacccttgccgcattgcgatgttgtgacacgggcgagtcatggccgtcgccgccgccgccgccttgtcgtgccatacgccatcgcaacgcgccgccgcgcagcatagcagggcacgcccgtttggttccctctcaaatgggttcatctcgagcgatcggatgaatcggaatcgtcgaggcgctggaaggttcggttcggtcggttgatgatcgatttccctgtggtacgtacgattcaggaatcccatgcctgtattttttttctctttgcaaaaattccgtttcatcttccgctgcttaattctgcttgtgatgcgtacgaatcaggaatccacaggttctcttcagtgccaactagtattagttggtcccaatcttccagaatcaccatttctgcttggatgtttctaagcatgatggtattagtgaggtttgctcaatcaaactctatcgtgcacctgttcttctattttgacgaatcaccaacgattattttgtaataatcaggtgtcgtcctgctatgaagattccggtgccggaaatagaggagatgtatctgaaggagcacctgggtgttgatttagtgtatcattactttttttctttgacaaagaaagaatctatcatcactgatgatgatgtgaagaattgctagcacattgcttgactcgctcagcaatactttctggatcggtgagtccttatccttccctttttttttgctgcttctttatgttagcttccctgcatattgatctagattggttctgaaagatattacacgtggtaatacaggagttcttattcacattctggacagttaatccttatccaacatctctatcaaaaccatgtaactcttggtcactggctgggtaggacaaacacaaaaaaacaataagtaaatcttttcaggatgattagcctgacttttatgatgtgcaagagaagttgtacggacagtggccagcaatttcatagttaaatgaaaaatgaatagtttggtatgatataggtatgactttacgtatgccagcacatgaatggcattgatttcttctttctttattgttttatgttgatgaagagtcaaggtacaaaagtaaggaaatgtgaaaagagacatgcaaagaaatcacattaactgtgcttattctacagtatcctcatttaccaactaaatgcatgtgaactgtgaagtatcctacactatactcattttcttcctgctgacatctggtggaaagatttttctttttattttttttacattcatcaaccttgggctgcattcacttgcagttatttattgatgatgcatttttcctctcgatctctattccttaggaggttacatgaagtcaagtgcctgggctatagcagattcaattataaaaagaaaaacttgattaggtatctagtaatagaaattgagtaatgcccggcgaaaaagaaattgagtaatcgtgatagatatatatgcctgaaatgcatgcttgacggataaattgggttgtatatgaagtagtgtgtgtggtctacatgcactgatgcggatatttcagcatgggatcttgccaacaagattgttgaacagaaaattatttgcatttgaaagctttcactacatgacattatttttgtgtgaacccttttaattggctccgtgttcataactgtctcttttgtttcagcaatcctgtccatattcaaggtcaaaacaagaatgattctaccttaacatgggaaagctcgtgctacttgacaatgtcataatgaatcgcagtcaatctctgatattcgtatctgaagtctcctgcttgtgtccatttaccatgaaaccatcctggatgaagcccaatgaattgtggctgagaacagttgcctgattccagtcattttcatgtgccctcagttcactggcacttgatctgggaagaaaggtacacatttgttcctattgtattgctgttgacttgtcactatacacttagttctgcagttcctttattgtgtaatatcctggcattatttgtgatgtatgactctgcaatgtttggtaggcaacctgtttgagaggaactgcccatcttgaggtaaaccctccaggccttgtcgacaatggattcgagtcagcagtgctttatatatgcaggtaatttgttaagaaaactcatatcaatcaatatgtcactttcatctgtagactacccagacttagatatgtctatgcagaagtttctcatggcattccatacttcctaagttcctagtcccgattccaacttcagtttgcattgccaattgcccaattagcgtatggaaatcttttcatgcttttttgtttggatgtcaagtctgattgattagtctaaccaaatactgaaatactattctttattgcatcagctcgcatgatggttatttatctctgaattttccatctttcaagtttcaaacatggtcagtagtccaacatagcggcatacatatatattttttctttcgcaaataagcagacatgctgcttagcagggagcagatctggtgcagttgtgcgtagtccttaacgtcaaatctttttcacttccattgaacggaagtgcctgtcacatgtccttagacaattctttgctcctttagtacctttccaaccagattaatcctcaaggtgcatgacttccaagtactttcaaagtacgataggggatcgatggatacttcggtggttcttagtccctcgttctgttctctgactggaatattatgcatccatggtccatatggatctatatctggtccctcatctagattctttctgggtagttttccaacaaaattcaatgatcataacatcaatgaaaatccacaggaactcatcaggcatgtcgggtttgacagcaatgcgaaaggatcctgtctatgattggtgtctggtgaccatcagcagcggctggtccgggaaaacggatgccacagaaggatatagcggctcaaattgcgacctgtccaccccaccaacacaaaggtatatttggtttttgacctaagttcgctacacccaatcttagccatgccatttcatgccacaatttatcaggaaagcgtttgattaatttgattaatttctgcgacaatagcaacccatctttgttagtgttttggcccacttgttaagttgttattctaaccagactgtcaacaacaaaatgtcacggtttgtatgccgcggcacaccttaactaattttgttgtagtaaagttacttatcaaataaatccttaaccatataatataactttttaaagatgaggcgttccacaatttttatggctaacaaattattttccatgaggaaactgggtctacgataagagaggtactaaatataatgttttgtggtgtgtgaaattttagcagtaaactagttggttagtcttgccaaagatgtatcgaagtgtggccaccaatcgaaaacccttagtagccacaagccggcaatcctgaacttccactgttggaggatttccaattagaaaaagggcggtcaaatgttacagttgaccaacaagtgaaacattaagttatatatgaaaaaaaaaatcagcaactgaagcatttaaaaattttgtgaaacacggtgaagatacacattgaaacatgttgctatcacatataaaacaacgagtgttaacggattgaaaatatatgttttttttcatcaaaatataatcatgtgatatcttattataaagatttaattacaacgaatacaatggtgcgatcggattgtagattggataactaggtaggagaaaaatcattttgaagatcgctaaaatgcatacatacatgcatagagtggagagagagtagtgacaagtagtcccgtgaattttgtgaaacacaccacatattgaaacatatcactatcacgtatgagacattgagttttaatggtttaaaagacatggttatattttattataatataatcgtatgatatcatgttgtaaagatttatttacaacgaatacaatggtgtgatcggatcgtaaatcggataagtaatttaggagaaaaaaatatttaaagagagaagaaaggaagaataagaagaaattaactagttaggagtatgcatgtgagagtgtagggtgctcgagtctgggcaatctctcatgcatatgcaaacaattctctatgtatagaagggggaataagatgaaatttgttgctagggtcttagtggacaacgcaattggtgttcggatctcattgtatcccaccattagagtttgaccagtccccaaaattattattcgaacaaacatatagtaaatccgtagaaaaaattgccagtttaaaatatatgcatctgtaaggccgtttacacacaaagttccatctcttcctctctagaacgcagttcaaccatgttgtaacaccgggctagctttgtcacaagtcacaaccctgttgaactacatcaagaattcaaaaagaatgcaaaattgcagcaatatctgctcccataccatccgcccatccccaattagatcctaatcgaatggttatatttctcctccattttacctcaaaagcttaaaaagaaaatctaagctgtgtttggatccgaatcccagaaatttcccagagacgaaaacccctcatcctccaaacacccgcttcaaaattccaaaaaaaaaaaagagaaaatgatcttgatttgaaactgatctacttgttcaagccccaaatgcgtacgtacgtgtgcacgcgtcaccaaccccaacttctcgaagaaggaagcgcacgcatcgatcgatcacgagctggccggaccaggtcgaggtgagggtcaaagccgacgggctacggcggcggcggcggcgccaccaaactctcgacggccttcgcgatagcttccttgagcgacgcttcgtcgaattcgcccgcctgcaaaggttgtcgcaagaatataaagatatcaatcattttttttagataatgataaagatatcaatcatatgctatatacacatggttttggtaattaaattctccagcatataaaaaatacacatccacgtgctgcactgtctactacagtactccctccatctattttctataaacttaatcaaacttaacgaggtttgactgaaaaaaatcaacgacttataatataaaatagaggaagagtatatacaacctcattttaataaatgacgccgttgatttttaatcatataattgaccattcatcttattcaaaaaatttatgtaattataatttattttttttataagttgttttatcgctcaaagtattttaaacatgatttatatcttatacatttttataatttttttaacaaaactaatggtcaaacatgcgtttaaaagttagtaacgtcatttattaaaagacggagagagtatatgtttaccgtggagaaacatttttttttgtgtgtgtattgtaacaagtatttcttgattattgatacggtgtgaggacctaattggagccttggaccactactactttctactggaatatagcgctaagttctaatttgattttctttttttgggtaagaatctagatatatgtagaggagtaaagatatatccatactcaagattcaaaagttttgccgcacatatatctgacattaattaggaatggacaaaaagaaaaatcaaatatcatggctcagcttggatcggctcattgcaaacttgaccatggatcgacttgaattcatatatcgtaatgagttgagctaagcttgaggttgagggaatcatgcgagctacccgttcatagcatacaaggtcaccatatctttttatacttcggcttattaattagtggttaaccctttaaattactttcaatccatcggataattatccactggtttactagttagtgtttattattttaaaatagatgataaattagtatatgctgaaattatagaggtgatataaatgagcctaataacgagcaacgccctatgaaccgagttggctcgttatgaccgtatatgtcacaacgggctcataattaagtagttttaggcaattttggtctaaggttatggttccatcgtttgcttgttggcttatcagtcacaaccaaaatttaaattttaaaattaaaaattattatactttatttttgtatattagctttcaaatcactaatgatatactgacggggttaatttcatggactcataagaggggcaactagccaaaccactggcctggtcaaagtcaaggcgagttgattgaaacggcccggtaattttatcttgttcctcctcctatggctagatgaagctcttcaagcaattctgcagatttggtgcagttaccagatgaagctcttgataaactgtttgctgaaaggaacatgacatcgattgggatttggatggaaatgaattgaaaacccgggcctctagtgttttggacttgtatgctgtctgtccgtgacgtcatgcatcccacacagcaacagccaacaggggcagtcaagttttccagttgagttttctccggtgggccccacccccgtcgctgtagggtaaactaggctgatctggttgactttgacctaggtttgaacaaccaaatctctctttcttcgtcactcacctctctctcatgagcccatgacaatgaacacaaaatggagcagctcaagatagtagaccagctaacagtttggatatatatatatatatatatatatatatatatattgaaataattgttataaacatttgtgatcattgattatgactagttaggtgagatatgcacaacaattaacagacgtctggaacggaatccaaatataacatatatacgaaacaatacaatctctatttgtaattttataaaatcaatcttgtgtttcaaataaaggctacatataaatattactagcattaagcttgcactacgaatgatatatataaaaacggatactccctccattttaaaatacaagacatagttcaatcttgataactttgacaaataataaatcataatatttatgtttagtgtcatgtatataagttagatttgtatttgaaaatattttcacatttcatataatgtgtagcattaggcaccgtataaaaaaactatatgtgtcttataatcttataatttggtcagaggaagaatgattttttgcacgaaacatacgtttcaacagggtaagcatccgtaccgttgctcgtagtgttaggctggcctgagcgacgccattgccgccgccgccgcccggctgcctcgcgtcgacggccaccaccgtgaagccgcccatcgccttgagcagtgcgagcacccggagcacgagctccgacacgtcggcgccgccgcgctccggcgcccgcaccgccaccctcacggtcacctctggcgccgacgacgacgacgatgccgatgcgccgccgtcgtgatcaccgccgccgatcacatggacctgcaccctctccggcgagccgccggcggcggcggcgacggctagccattggtgattatggtgatggtgaacctcgttgactgttcggatcattgatgatctcgatgatgatgatccattggcgcgttggtggatttgggtttggagtgctcggttcttggcttcgagctccgagatttgagctatcagcaagttcatgtactctagtgtcttggcaagaactgtggccttgtctttctgaaatgccagtagttgatttgattaagatcgagaagctattaataattagtagaacagattaattagcagagttaatgtgcaatacgcaaaataaaattgtagtaattaaaactggaaaaatggcaatgtgtagtatttcattggttagataatggaaaaacgttaatgatttccgcctgatctgtacttcaatctgatgagaacaatatgcaagtaatataagattctaacaatttgaactagcaaataatgtttagaagcatttcaggttgaatttgaacaagattttctggaagctaattaaaatgggtttaatttgcattgcaacaaggacacaagccacaaggtcattaacatgatggtgcaattaactcatgttaattattaggagtatagtttacctttgatcctggaggaagcaaacctctcaagtgctcgaagctctcgttgagccgctcgcgccgccgccgctccgatatcatatggtggagctggctgctcgtcggcggcggcggcgcggccgtggcgtcctcgtcgtcgccgccgccgctccgctgtgccgcggcagcgctggcagcggcggcggcggcggcggcgcgctcctggctgcacctgaccatgtgcatcctcctcaggatggagaagcccatcttgatcatccgctgccccggcgcgcccggcggccgccgcgacgccgccgcgcgcggcgccagcgcggcgttgtacgcccggaacgccgtcgtcgtcggcgtcccacgccgcggagaccggatgatctgcgcgcggtgcttgacggacgaccacggggcgtgcagcgccgccgccgaggacgacgtcgagggggaggagatgacgtcgagcatcgcctgtgccatggcggcgtcgtcggcctcggcgctcgggaagtggaggacgccgctgccgccgacgccgccgtggcgggagaacggcgacacgtggacgtggtgcggcgccggagggcgcggagagccgggacgacgacgacggcgtcgtcgtcgtcgtcgtcgtcgtcgccacctgcgccgcgagctctcggggcgacggcgtggcggatgacgaggccatcatgggcgtcatcgtgcggagcagcgacgtggaggcggcgccgtcggccgggctgccgacgagcgaggacgacgacgcgacggccgcgtcggcggcagctggaggagctcctcgagcagcgactgctggaagaagtcctcggagaagacctgctccacgctcgcctgcaagctgccgccgccgccgccgccaccgtagttctccgccggcgccgtcgagaagccgacctcgatctcgccgctctcgcatcccatgaacgccgccatctgcacgccaccaagaatggcccatgtcagcttcatccttctcgatttctaacacgatcatcttacgaaacaatattatgaaatggattacgaaccttaatgccagcttcctgaaagaattttaccacaaaagatcatacgaattcgttagtaaatccataaatttctcaggtgtttgatcaactaatggaacccaaattgatcaagaagcaagtggatcaagcagatcgaacaagtgcatgcaccggtgagttccgagttctgacctggtagaagctttgctgcaccggcagcgaggcggaggcgacgagctcgagctccgagagctccatgaacacgccaccgccgccgccgacgtacgcccaccccggcacgcacccggtcacggcgccgcagacggatccccggtacgcgtcgaacagcgcgcgcacgcagccgccgccgtcctcaccaccggagagccatccgtcgacgcagtagagcagacgcgcagcaccggcggcgccgccggaagaaggacgctggtggtgcaggccggcggcggcgacgagggggaggggagcccaggcgcagacgtaggcgcagccggggaggcgcgcggcggcgcggtggaggatgcgctgccgggactcttggccgagcacgaagatggtgtccatgcaacggccacgatcaccacatggtctccatgactacctaacttaattagccaacccaaactactacttcttcttggcccgcctcggcgagatggcgcggttgccgtcgacgatagaatgggagatttaggggtatatatatgcgcgcgggaaggaggggagcaaaggtgaagactgaggacgaggacgacgacgagggctgcggcggagatggggatgcatgggaaagacatgcattgatgcatgtgtggatgggagtggatcggaggcgggaaaagtaggaaggtagcttaggaggaataggagaagcaagaatggtgaaatgatggtgggggtggattggtgaagggtttggtttggggagaatggatggagacattcatggatggatggatggaaaggaaggaggttgaaaagtactaggggtagtgttatctattggaatagaaagtcgttcaaaggtcttccctgtgtgatggtgggtgatatgatgctgggtgccttgatagcttaagatgatcttgaaaaagggtcaaacaaggtggcacaaacgtagctaccatggggggctgcccgctgccctagttctgtgcatgtgttgtttaaaaggccaaaaaaaattgataagatatatcaatatgcggatatgctattttacaaacatgtaaattcaaattcgacttatacaatttaaaaaataaaaaaattgataattgtataagttgaatttgaacctgtattttttagaatgacatcacatattgatctattttactatttttttcaaatctttatagagaaaattaatttaagtgacatgtaaaaataagaggatatctcctcaagggattaatagagttccctaggctggctgtacttggaggagccaagccactagccatttttcggttagctacttaggcctagttcgaatgtacaatttgatttgtcttttcggcaacatataaaacgatataagttattagcacatgattagttgaaataaattattataaacttttaaaatatgtttgtttgatttcttaaggaaacttctacataaaaagtttttttttttagaaaaacacacatttaacaatttaaaaagtgcatgggctagaaaaaaaagttacaaacaatggagcttaaggctcaaatagtggctgagcgtgaaattactcaacattaggactgtactagggctcaaataccaaaatttatatagtgattaaacttgattttggaggcatgtcggctgtcacataaagcttgattaatctctatggtacgtatgaacctcttgttattttaatttcatcctgttttattttctgcaccagcagtatgcaatttcatattgatatagcaaaaagaattaaaaaaaatatggaaggctacaatcaagaaaaaagaaacataacaatccaagaaatggactagcaccaagccagatgccgttacctctacggagtggtcacaaacgcaccacccatcaccaactccaagcaaaaggtcgcccaaattagactctcatatatacccacggagaaaggttgccgagtgagagggtgagagaaaaagatacactcgtgcatcacataaacctaatggtgaaaccatgagagtcgctaaagactaagatgcttgaaggcagcacatgtgagaaacaaggcatcttaattactccctccgtcccaaaaaaaaggcaaaccctaggtttccgtatccaactttgacggtccatcttataattcgtatttttattgttgttagatgataaaacatgattaatattttatgcgtgacttgtccttttatttttttcataattttttcaaataagacggacggtcaaacattgggcacggaaaccagggtttatctttttttgggacggagagagtagacaatacttctagagaggtcacgatgtcaagagaatcgccaccacctggccaagacacctcggacttgattttcacatgaagagccccactagggagggagagagagatgcctcacaatgtccagccccaaggggggaccgtgacgctcaagctattgttgctagtcctaaaaaaatgtcgagccaggctttcgcctacaactccctcccctttgagggagtgcccaatagaagatgacttgccgccaccgccattgatattgttcggttgaatcgaacacgccatctagaggcaccctcctttctgttgctgcaaccactagcctcacctgctgcaaagaaacattcgctagccaggaagcttgcccacagcctccggtagcctttgccaacatccaggccatgactaccgctagcctctgccgctcacaccggccacccgctagagtcgcgcacgctagctcccaccaaggcttcaatggacgtcgacgcgtacccaattgaccttggctagatctgccacagaggcatcggatctagctatagcagcgctagatctagccaccgatggcagtgtcctcttaaagccttcaaggccacagacggtgcccaactcaatgtggtgaagccccactgctgccttcattgcagtcgtgcagacttctggtggctcactgatcagacgacagtaaggtgtagagaaggaagaggaatgacaggggcagtgacgatgagttccacatgtgtcaccctagagatgatgcggggatgtcatgttttattaggtctagtttggaacacaacaattagttttccttagatttatagaaatagaattgactaatgtggaaatcctacatgcattgtgttagtatgatgattattgttatcatgcatattttgttttatgcttgagttattcaagattagtaagtgcgtgggggtactttagttgttttttatatatcaaatatttaattctcacataatggaagagtttcatgaaaataaaaaaacaagagggctcgagatagagcaagttttaagagaactagctgggtggcccacgcaattgcgcggctagcacaaaaaaatcatatattttttaagtatgattttacttaaaatttattaaatagctatctcattgttaagactttgaaagaccaaaccttatcatcctcgtgtttctaattatatactttataaaaatcacaccagttgctaccccttatgtcaactccttctttatttgcttgcttgatctatcactatttctattcattcttcttggaacctttaaaaattggattttatagtttttagagtttattgtcacgttgggtttcgtttttataatttctagatgtcccgtcaaacgttgccattatactcctctacggcccgtccactatctcttctctttattgtcattgagattttaaaaatcgaacataattatagtttgggttcatttttactttctagaagttcccccaaatcgtcaacggttttgccattgtactcctctacggctcgcccgctgtctcccttctttattgtcattgagattttaaaatcgaacatgattaccattgtttttttttactttttagaagttcagaacattcaaaaattggacttgtattttcattttttataatttttagaagtcacatcaaacgatgccactatgcctctctgcagcccgtctgccgcctactctttatgtcattgtgattctaaaaatcgaacataactatcgttgcaattcattttttatattctagaagtcccgtcaaccgtcggaggctctgcaactatactcttacacaccccgcccgctgcttctcctttttattgtcattgagattttaaaaatcgaaaatgattatcaatgtggttttttttttactttctaaaagtcccggcaaccgccttacttgtttgcttcacggcctgcctgacgtccctccttttaatcgtcattaggattctatttggtgttttattaacaatttttatatgccgtatcaaccgccaccaactatactcctttataggcctgttacttaatttatctcgtcatgtgttttagatagtcttttctttcaatagtccttagttttatcacaaaatttagttatttatgaattttattccttattgaaatctttttttttctaatttcagaatttattttttaaaaaaaatagttaataccgtattgtgttcttttaatgtttttatttttaatttttaatttcagttgtttcaaaattgtattcctacttgaactctgttttagtttttctaattttgtatattattatatttttattcaaaattttaattaatcttgtattgggttcttatatgaattcttctttcaatattgcttatttttaattccgaatttcagctaattttaaattgtattcctacttgaactcttctttattttcttttgctaattttggatttttttatttttattttgaattttaattaatctcgtattgggttcttatatggactcttcttttaatattccttattttttaattccgaatttcagctatttttaaattgtattcctacttggactgtcgtttccttttctaattttggattttattttatttttatttcaaattttgattaatctcatactgggttcttatatggaaacttctttcaatattgctaatttttaattctgaatttcagcaatttttaaattgtatttctacttggactctcctttccttttctaattttggattttattttattttatttcgaattttgattaatctcgtattgggttcttatatggaaacttctttcaatattgcttatttttaatttcgaattttagctatttttagattgtatttctactcggactctccttttcttttttttctttttctccgattaatgtgggaatttctagcccccacagcgaatgtggtgcctcctttcaaagctgttttaataatatattagatagattgagaggtaattaaacacttgctctattcttaacggttgcaataatttgacagctttcatcatcatttcctaaacggttgaacttaccgcgaaaactcgcatcccggccatggcattggacttatttttgcataaccgaggggagctacatatgtacagtatatatcctatggtcaagctggtagagtttgatcctttttatgaaagacatgatagtgccatttaccaaacgcctccttaattggatctcaaaaccacaaaaagtatatgcagtcaaaatcattgatagacacaacttagagaccaaaggtttggttatccttatattatatttctattagtccttcaggttaaaaaccctgagagattcagattcttcgtttcttttctcccctccttttcgtcagttgatttggcaacaagcagtttggttaatttaattaagatgcataaatatgaatacatggggtccatggagatcattaacaccgtgcacttggtccactgcttttgggcctttttctctgctaaattgggatttggtcttcgcccgtataccattcttcagtaatcaggccaggtcaaggatgcaactgctggagtgctggtgcacagcacagggtgcaatggaccatggcatctttcgtactatcctcaatagaacaaatgctaattaatcggttcatcaattaattaatttcattgttacattgcacaatactacatttgcagtagtactactactagtcgtagtcaaagaaatgcagtggctaaatggctaatgtgtgctttgttttagcttattaattaatcagctgatgatcatacgaacacagcgcgtgacactggttcacattgaagctctagttgttgattgggatttcattattagtttaagttgctgctggaatattgtatgagccatttgggtgcgtaccaacctcgatcacaatctggttgcaattgactattagatgcatgctgtcaattagttgtgcagaattgtagtggtgattggtgaactagtgtgatgtcataacatttgatatttagagcaatatgcatagtgtgaacttaacctagattgctagagaagatggtaagatgaacaatatcaaaggcaaaaacagaggaatattatcatagtaaattacaattcattcctatacacgacagcttctttggaacatatggattttacaggattttcacatgaacaattagttaaatttccgtataactcctataaaaatatcatccattcgaaaggaggattgaatagggaaaaaaaatcgtattccagacttggaaagtaaagaagcctttcattcacaagtgttcaccacctgtgagtcattttaaatgaaaccttagttaacattaacatgggtgctagtttcagagccagtcaaatttcagtcttctttcgcacacttccgccataaatctaactaaactttagatagtactctgaagttgatcaattaaatttgttgtctctgaaaaagaccacaaaaaagtattagtattctccaatctttagatcctgccaaactgcatagatatgctatccaagtccacccggaccaaatgaaaactacatatatgcatgcacaaccgaatcttgatgccattgacagtatctgatttgatgcagaaaagtagtcacttacttgatgacatgtcttgtataattttccctttaattaatgcagataaaatgttttgcttagatcatttgattagttgactgggatccacatccactcgatctagtacctcataagttgagtttaccacttttaattgattccaaatctagctaacacctatttgtttatcgatttaattacttagtgccacatgtctgcacttttagaggtttgaattaggttaaccatgcttgtacccgtaaagttgtaaacctccctttttgacaagttcggtgagattcttgtataattaaaagctccaaaaggttagtattaccagcaaacaattaattgctaggacacttggcaagcctatatataagtattatatatacaatgtgccgcatgtcttatatggtggttatactggaacttgatcatttgatctacaaaggatatagcggtttttttcgtaataccaaattcatcataaaaaaatattcgtaaaaaatatacggcagttttgtatgtgaaacggacgtgactacgtgtccttgagacaatgagctgcatacgtcaaatagaaagacacaaaagaaaataataagttgcaaataaattaaaggaacttataaaattctaatggttgacaaaagatttgtcttggaaatggctatcatacgaaacaatgaaattgtttggaaaattacgaagttcattgaaaaaaaaaagagacatctttgaaacgttttctcaattcatgcctttgttggtgcagtctttggctggtgagttggaacttggaagtagcggcagcaacactgcattttctttttcattttttgacgaaactactgcaggagataaattacacgtagttaatatattaaaagcaaagaagcttatgtacaagacaggaaaaaaaatacaaaagggtaagccatgcttctacgtgatttctcatttctctagcttttgtctttattttcaaaagatcttccttcaaaagacgtctccaagtagctatcaaacctactttagctactttagcatcaaaaggttactccacttcgctgattactccattacgctgtttctaaatatgccaagcagcatagagagtcatctcgataaaatttaataaactataaaacttttagcagtgaacatcgtattggaaaaaacaaactcaactaggtacccaaatgcttcacaacactttaagttttcttacaattttaatccgtgcgtcctattaaagacgatctgttggc

SEQ ID NO: 26606 - DNA, 18566 bp, Oryza sativa
ttttgaataagatgaaaggtccaatgtttgttaaaaagtcaacggcgccatacattaaaatacggagggagtatttaatacttcacgtatgtcttcaaacattcgatgtgacagacatggtgaaaagtttttgcgtgaaaactaaacagggcctaagctaagaacactagtagccagtctacttcatccaaaaaaaaaattaatagtaactaatatttgtcaaaaaaattgattttctattctatacctatccttagttcacaaatcaagttctatcctttcaatacaccttattttaccaacccattaacactatttttctattaatgagagatactttggtcttttatttctcgatgcaaaatttttcttaggatcctaagaatcgatttattttccaacggatgaagtaggaattgggaaaacgaattgcatacgcttgttaccttccgaagaaggtgcacattgtcaggttagaatgtcgatcctctacaatactgctcgtctagcagcagttgctcctgcctcctggttcttgttccacatcagtgtgtggctgtgtgcaccagtggtattgtggaaaatcccggcattcaggagttatttgataggagctattttcagttgtatgaaaattctctataattccttcaacctaataaagtaatagaaatcaaccttaatgcctcctttagaataaaatgttttcacttaaattagttgaattcatctaaatttcatccaaaaaaaaatcctccatagcaaggaaggccttaatcgcaaatctatatacccttctaatccaacctaaattttagctgaactggctaggtttacggttgtggaatcagccacccagattcaaatcctaaatttaggccgtgtttagattcaaaattttttcgtcaaacttccaacttttacatcacatcaaatgtttggacatatgcatggagtattaaatgtggacgaaaaaaaaaccaattgcacagtttgcatgtaaattacgagacgaatcttttaagcctaattacgattacgctatgatttaataatgtgatgctatagtgaacatttgctaatgacggattaactaggcttaataaatccgtctcgcaatttataggcgaaatatgtaatttgttttgttattagtctacgtttaatacttcaaatatgtgtctatatacttaaaaaaaatttagcacacgaactaaacatagccttaatatggatgctcacatttacgactatctgttttttaattgataggcaacatacctatcaacaacaagattttatcaatctcaagatatgctggcccaattgcgaaggggagtgtgtgcgtgatgcgggcggccggctgcatttctactctttctcatgccaaacgggcccacgctagaataaatgaaaaatgtcgtgggcccacccatcccacccgcagaaccacctccttcttcccttccagtgcgccaactccctttttcactcagctcagctcagcttcacactgcaccctctcccataaaaacctcgcccccatctactgcagctgctagcctgcaactgctcccacttcactcctcttctcgcgagtcgagtccaaggatcaaaattaagcagttaaaaactgagagagaaaaaaaaaacaagaaaagaaaggcgagctctccctccatcgccattgccaccctccacaaaacaccgtgcggcgctcttcacgttgccgcctcgcacgcattgctcctctccaagaagcagctcactgctctctctctctctctctctctctctctgtccctctctctctctcacgccaagagagagggtgagcagaggagaggtagctagctcggagctttctttggagaggggacacacttgcaatggcgccggcgccgactccggctgccgccgccggccgccgcgtggcagtgctggccgcggcgctcgtggcggcctccctcgcggcgagcgtgggcgtcgccaacgcggccgtgtcgtacgaccgccggtcgctcgtcatcaacggccgccgccgcatcctcctctccggctccatccactacccgcggagcacccccgaggtacgtaccccccatccatggccgccgcccaaatgcaccacttctcttctctctctctctctcacgtacacctccggtttctgattcttgcttcgtgtgcttcgccgtcgccgccgccgcagatgtggccggggctgatacagaaggccaaggacggcggcctcgacgtcatccagacctacgtcttctggaacggacacgagcccgtccagggccaggtactttcactctcacctcaccatttcttcttcttcttcctatgagttcttggttgatgacctcctttttatggcagtactacttcagcgaccggtacgatcttgtcaggttcgtcaagctggtgaagcaggccggcctctacgtccacctccgcatcggcccctacgtctgcgccgagtggaactttgggtaacgattcttctacagagtctcagtgttcttgggtagattttggagcagaatgtagcagctgcagcattgcagtttcagtgtgtgtttggttgcaagttgttgcatctgaaaaacgtttgcaatgttggtgattcttgcaggggctttcctgtctggctgaaatatgtgccgggggttagcttcaggacggacaatggcccgttcaaggtattgtgctaacacgaatgcagcaattttggtctcttacattcttcaagaattggggtttatgatgtggtaaatatctggtgcttgtaatcgtgtaggcggaaatgcagaagtttgtggagaagattgtgtcgatgatgaaatccgaggggctgttcgagtggcagggcggcccgatcatcatgtctcaggtgaatccctgaagaacagcttctctgcttagtccgttgcaatctgcaatgcagctagcttagagtgtagcttaactgagaattgatgtttctgtggtggatttggtcaggtggagaatgagtttgggccgatggagtcggtcggtggcagcggtgccaagccgtatgcaaattgggccgcaaagatggccgtcgggaccaacactggcgtgccgtgggtgatgtgcaagcaggacgacgcccctgacccagtggtacactgataattgatagtagaaactggaaacaaactactccaccttccttggtggtgtcaaatgaatgagtttgttgtgcagttcactgtgccagactgcgagttcttacccttttttatccccaaccatggcagatcaacacttgcaatggattttactgcgactacttcagcccaaacaagaattacaagccgtccatgtggactgaggcctggaccggctggtaattttcttgttccaactcatgtcgcacttcataccatcctaatctgatgggaatgatcttactacggttttacattttactgcgcgtgaaggtttacatcgttcggaggtggggtgccgcatcggccagtggaggatctggcttttgccgtggcgaggttcatacagaagggtggctctttcgtgaactattacatggtgagaagagagggggctcactggtcacaccaacactggtgttgcagtgaatgtagttttacttgttctgaccgcatttcatgttctggtgcagtaccatggaggaaccaattttggccggacagctggtggtcccttcattgcaaccagctatgattatgatgctccgattgacgaatttggtatgcagtgattgccttctttgataaacttgaattcctgcctgccttcttgagatattttcggaaatttgctgttttttatcttctgtttataatcttgattgacatggatctgactcagttgataaacggatggcatgtacatctcaggtctgcttaggcaaccgaaatggggtcacttgagagaccttcacagggccatcaagcaggctgagcctgtgctggtttctgccgatccgacaatagagtctattggcagctatgagaaggttggtgttgctacaatcttgcacacaatatatgtgatcatccatagatattcctagattcataattggtcaaatcctttaggcatatgtcttcaaggcaaagaatggagcatgcgcggcgttcctgtcgaactaccacatgaacactgcagtcaaagtcaggttcaatgggcagcagtacaaccttcctgcttggtccatcagcattctgccggactgcaaaactgccgtcttcaacactgcaacggttagggaacactgaagcttgaacctttatgtggactagctggaccttgctggagcacatggtctaatgtacttacatgataatggcacaggtgaaggagccaacattgatgccaaagatgaacccagtggttcgattcgcttggcagtcatatagcgaggacacaaactcgctgagcgacagcgcgttcacgaaggatggccttgttgagcagctgagcatgacatgggacaagtcagactacctgtggtacaccacatagtgagtgaccaaccttgatatgtgacaaaatttcaaccatttctattagaagccatatgaattttcccttaaccctgatgaattcttgttgcagcgtcaacattggtacaaatgacttgaggtctggtcagtctcctcagctcactgtctactccgctgggcactcgatgcaggtgttcgtgaacgggaaatcatatggtactggcacttagctacatttcatgttagatcaagccaacaccaatcattttagtgaatgttcatgattttgcttcctccgtaggatctgtttatggtggttacgacaacccgaagctgacatacaatggacgtgtcaagatgtggcagggcagcaacaagatctccatcctaagttcagcagttggcctccctgtgagttgatcacagcttaactgatatcccggacacttatatcttgtctcaaactacctgtaacactgatatctgataccattttcagaatgttggcaaccattttgagaactggaatgtcggagtgctcggaccggtgaccctctccagcctaaatgggggcacaaaagacctcagccatcagaaatggacctatcaggtcggcctgaaaggcgaaacgctgggtctccacaccgtcaccggaagctccgcagtcgaatggggtggccctggcggctaccagccactgacttggcacaaggtaagtgctgaattctgaagaagcaccagcaatgacaaagtggaattacagtttcatcacgctcagactgaatttgtgtcacctgttgctgaatttccttttgtcaccattgattgtctcaggctttcttcaacgcgccggccgggaacgacccagtggcgctcgacatgggcagcatggggaagggccagctctgggtgaacggccaccacgtcggccggtactggtcgtacaaggcctccggtggctgcggcggctgcagctacgccgggacgtaccacgaggacaagtgccggtccaactgcggcgacctgtcccaaagatggtaataaattcagcctcacataaccatcttctcacacaactcaaattttctctgaacaataatttttagataatggaagttttatcaaggctcggtcaattacatcaagataatataatccaactgagtctgcccttagcttttgcataaaatgcacaaaaccaaaaaagaaccacaaaaaaccacatcccaagcacacaagtagagcagaaacacaaagattagtgactatcaatccatgctcaacaataataaaatgttttacaatgtttaaataacaaaaagaaagagacgtttataatagtgtctctgctactgtagtagaatcaattttaccactactcaattactattagtagaacgattttttttgcctcataaattaacgcttaagatcacttctattggggagagatcaccgtaaaatgtacctactattttggataaaatttcaggtaccatgtgccgagatcatggctgaagccgggcggcaacctgctggtggtgctggaggagtacggcggcgacctcgccggcgtcagcctggcgacgagaaccacatgaacgaattgcagcgagagatcatcaccaccatttgatacagtcgtcgacggccgcgtgaacagcttcctcctgtagcacgcagaattcgtcgatggtatttacacacacagacgaacaccttacaagtaaaaaaaaaaaaacacaggagcagcagcaacaggtgtgtatttattggggagtcggagaggtggttgtctcgctcgccggtggccttcactgcggctgcagcgacggcagtggcatcaccggccaccggccggcatgcagacgctgttcagttgtttgcgttgctcgggaatttgttacggtgcatagagcatttgttattgtaacttgtaatctttgtcgacattataaattactagtattactagttgtgagaattgattatgcaggaaatcacaaatagttttgtcaatccgttattgtctgtagctatccatttttaggaaaactgtttgatgtgttggagattttacgagaagttgaagttgttaaaagctctctagagggccaatttaggatacattctaaacagcttatcagaacagtttacttccccgttctctgtggcatagtttcagtcagaaatgttttgtgaaaaaaagagtttttttataagaaaaatcaaacaaatacaattttaactttgtacttcctctgttttagattataagactttctagcattgtccatattcactaggcaaaagtcttataacctacaacggagggagtaatagtttatatttggtaaatcagcgctaatagcatctcctgttttaacctctgatcccaagggaccatttgtttcataagattggcaaagcattttcatattactcaaattcctacagacatttttctatatccctttgatgaaaaaatttccataccagtgtattattaggcatgttcactttgttgtcattttcaactctaccaaattttggcagggtaataaactaaacatatccgtacctttaccaaactaccaaaagttgttgattctagaaaaaacaccatcaaaatttggcatggctccaaaccaaacacatttaacactatcttaatttgataacgccaaggtaaaaaacaaatggtaacactaaaatatgccaaaatttgataataccaaactttggtaaggttgaaatggcaacaatgtgagcaaagcccaatatacttctcttttgttggaaatgtacaaaaggtacgagctttttgtaagctttcctttgttttttcctatcgtactgtcaaatgatgcctatcttctttccataagatcgttttacctgtactcagggtgtgtttagttcacgctaaaattgaaagtttgattaaaattggaacgacgtgatgaaaaagttagaagtttataggtgtagaaaagttttaatgtgatgaaaaaattagaagtttgaagaaaaaatttaaaactaaactcggcctcagtcaaaccgggtctaatctctaatgtgtcatccttaaggagtagtcctagtaccagtaggatcaagtaggagtaggagattttttctgaagttgcaaacctgacgaggatgtcacttctgaaaaggagtgaggagtccactgttggtcagtgcgtcaagcctggaaaagtggggtgcaggaatccattggattttaatttggaggttcttgttgcccggctggctactagtggatggtcaagagcacagctgcacaagatatgcaaaacactgtggtatagccttcacttctgttggtggcttcaggcagcagcaactgtagtattaaattcgaggctcagacttcagagttcttcagaggcagagagggcagagcaagaaaaaggagaaatcaaagaggaatggcgccaagactggcaaaaaaattggcgccaaacatagctgtctgttctgctagtgctatgtaacgtctcgagtttcgcatttgaaaatagaagaggatccatgctaatgtgcataactagagcaggtaaaatagcaggctataagccagctgcaaacatattttaagtagataaataagaagagagaagagcagcaggctatagatttgtagctagctgtagcacggactttaagacacagtgtgtgtatgacaggtgggaccaggtattaatagtgtagcatgtaactattatatgaatgagctattagattggctacagatgaattggagttagtagttggctacttactcttaggaggtaaaatccgcaacgtgcgcgactcggtgtaggttgtaagccgagatcagccaacaaatctatatcaatcagttccaacatataattttggtacacaataaatttgagttttctttaatagacactcaatatataaaggtcagagaccttaaaacctcacgaaaactcctactaaagcaaagcaccaatgtgcatgtaactattgaatttttatgtagcgaccactgtatgaaccataataaatgaagcaatgcatctacaaccacactgcccacagaattgcaaagtgtttccacttgtcaatcaaaccccacgaaacaacatggccaatactccctccggtttcagttcgattgaaaagtattgtcaagtgcactttgtaaggactttattattattattattattatttgcaaatgcgactttgtaaaaatatgcccgtagctatatattataagtacattacaacattaaaatcggcaccatttcaaagattcagtatgtttcaatttgggcttattgtcctttgataaaatttgcactccatccgttctaaaatataatcacttttacatctgcattatcttctgaaccaatcacaacgttgcaccattcaaattttctacatacttctctcaaccaatcacaatttttttatttaatttcatctattttctaaaactggggcggtcataataacatattcacataaacgttagattcaaattctaatcccattcatacactgttatccgtatccaagcccataatgtgatgggcttgtttacctcctaggcatgtttcggtccacacgttgctgggcttcacaatccgagcccaaatattcatgggccgtcaaggttagcccattaagttgcgcgcgaaccaggcccatctcaaacccgcacgatttttaaaggaaacacccgaattcaaatccaccgtggggcgcacgagctcctcccgctcccgcgcgcgccttccctctccgtcgccgacacggtctcctcctccccgccactacatattcctctcgccccctcgccgtcccaacctccacctacctcatcgccggcgaacttccaccgcacgcgcacaaccagatcagtcatcgcagtctccggcgatctctccatggctccatccggccgatctccgggcatggagttcccacgtacgtcctccttcatctctgttttaattgtttctcttcttttgttcgatcgattgagacgatgaggttttccggcgatggctcgccgtgcagatgcaagaggcggcggtggcggcggcggcggcaaattcatgtcgaggatggtgacgggccagaagccgatccatgtccggccgccgaggccggagaaggaacgcgtggacatggtgccccgcgacgtcgtcgagcggtgcatcgtcgcgctgttcgagaagcgcgggtcgacgcgggaggcggccatggaggacctcgtcggcgcgctcgagggccacgtgtcggcgcgggaggttagctgcaagtacaccaccatcgtgtcccgctgcgtcttctcgctcaagaagggatccgtcagggaggcccgcctcgcctaccgcgccatcggcatcctcgcgctcaccctcggcggcggcggcgacgacaccgccggcgccaaggatgtcctcgccgaggcgttccccttcctcgccaagacggtggaggcgtcgcacgacatggcgaaggtgctcgccgcgatcgacggcctcgccgtcgccacgttcgccggcgaggacggagacgacgagatcgagaggtccatggacgccatctggggcggcgtgatcgacccgagctcagctgggccgggcggctccaggctcgccgcgggggacgcgaggaagacaacgcccgaggccctcgccgccgccgtgtcggcgtgggcgttcctcctcaccgtcgtccacgaccggtacgaggcggaggagggcgagagctgcaaggacaagatcgcgctcctcgccaagctcctcgacgaccacgacgaccgcggcgtccgggtcgccgccggcgaggcgatcgccgcgtgcgtcgagctcaagctggcgcacgacaccccgccggaggacatggaagcgctcaacgccaccgtctcctacctcgccaccgagccctccggcaagggcgccggcgacaagcggcgccacgccgggcagaaggacatcttccggcagatcgaaatcttcttggacgacggcgaggccccgacgaagtcggtgaggacgtcgtcgagcaggcagagcgtgctcaaggtgacaacatggacgaagctcctccagctcaacttcctcacccggtacctcggcaatggcttccacagccacctccagcacaacccgctgttcggcgagacgttcgaggtcgacggcgacgaggtggaggggctaccggcggcgaggaagatgatgagcaggaagcagagggagaagaagcggacgctggagcggaggaggtgccgcgaagccgtgtggaaggagaagaacaagttcgggctgccggaggaggagcccgagagaggcacgacggcgctcatgctgctcccggcgctggcgtgctgccaccacatgctgccgccggtgcaccggcagccgcatctgctgccgcctactgcaccggcgacggcgagccacatgttgccgccggtgcagcagccgattttgttgctcgagtattagtagttagcactagtaattattagctttgatcgatcaatatgacttagagagcttttatggtgtttgtgagatatttagaagtatcgagaggtgaagtaatgtgaacaattgatcgagagagggataaggtacggaataaaacttattataaccgatgacagggaagtaattattaggtaataaaatatggatattttaagtggatggtatacttggctgaactaatctggtaccgataggtagaaaaaacgtaaatcaagcattgatttacgcatcgaatagatctccacgggaaaaagatcagatccgtcttctttcttcttccgcattgtcttccacactagtttgttcttgctctaggatttgacctaaattctccaaaaagaaatagagggagaaccgtcagaattgttgagaattcaacatgagacgagatcaaccagtcaatggcataggtgaagcccaataggtgagatcttattgattagttatttacgtagttcacaaattctttcgtataagggaccggaacgagacctcctctgttcttataatatagtttgaatatgtggacccgcaaggagacatgatcaagggagaagctgatcatgtgttctttcggatatagtttgaatataaatctatagaagatcatgcaaatgagaatttttatgctagtaatgtgttcttggaacaaaatataaatctagagaaaatcacacaaataaaaacctcaaagaacacgatgtaaatatataggaaaccacacaaaagagaacatatacgctagtacaggcaaatgacttaagtggtacaattctgctcttttctctctgcttgcaaatttatgttctatctttaataccaaagttgaggataattctaccattttctctctactagtaaatttacgttctatctttaatacctacttcctccgtccaaaaaaagacaaaccctaggtttccatgtccaacgtttgaccgtccgtcttatttgaaaaaaatatgaaaaaaaagacaagtcacgcataaagtattaatcatgtttaatcatctaataacaataaaaatactaattataaaaaatttatattagacggacagtcaaacgttggacacggaaacccagggtttgtcttttttttttggacggagggagtaagtagctaaatacctacactaatacttaaatactttttacattatacctgttattgggaagcgttggatttttatctttttaatgcaaacaccgtaccaaatatattgaaaaatcttccccctaaaaaaaagcccaatatataatcccctaatttaattccaattttgatcacacgtaccagattgaatcacatcggacggtgcgagagctctcccagccgaatctgatcagatcggacggccagagctctcccgtccgaatcgaatcagccccagccgcaccgcaaactccgattcggaatcagcacagccgccgcgcaaactccaactccgattcccgattcgcagtcggttctctggtcgcctacatatcccctgcccctcctctccactcccataccgatccatcaggattcaggaacgcttctcactgcgcctgccaagtgttcgatcgattgcctcaaccacccggtcactgtgcaggcgacctgttcgatcaattgcctcaaccagtcaaccaccgctcaccatggttatggggaaattcatccgccgttctaacggccacgcctcctcgtcgtcgtccatgctggacgatgacaccagcagcgcttgcggtggcggcatgagcatctactaccagaagattaatcagagggtcgccgtgctcgagaaggccgccgtctccgtgcacgagagccgggcgtccacgagggaggcggcgctggcgtcgctcgtcggcgcgctcgagggcttcgtccccgcccacttcatcgggtggcaccaccgcggcgagatcgttcgcggctgctgcgcctccatcaagaagggagccgccaaggaggcccgcctcgcgctccgcgccgtcgcgctgctcgccgtcacgctcggcccgggctccaagaggaggatcttgccggcggagacgtacaacccgctcgaacccggccctggctccaagaagatcatggcggagacgttcccgctagtctcccgcatcctcgaggtgtcaaccgacgcgtccctggtgatcgccgcgctcgagtccctcgccgtcgtcgcgttcgtcgacgtcgccgcggagaacatggacgacacggaggcgtgcatgaaggcgctgtgggggctgatccgcccaagcacggggcccaagctcggcggcgcggcgaggaagacgagccctcatgtcctggccgccgcggtgtcggcgtggacgctcgtgctgaccacaaccgacggctggaagaagaagaaggcggcgtcgtcctctcccaccgcgtggcgcgacacggcggcgcacctcgccccgctcctccactccgacagccgcgccgtccggatggccgccggcgaggcgctcgccgtcaccatcgagatgaagctcgtgacccgggacagccacggcgccctcatctccggcgtggcggcgagagcgtccgagctcgccaacgaggccgccggagcgggcgtcggcaaggccaacttcgtcgagcagaaggagctcttcaagagcatcgcgtcgttcctcgccggcggcaaggcaccggcgagctcggtgcgcgtgtcgtcgtcccaccatgggcggctgacggcgtcgacatggacggacattgtccggctcaacttcctccggcgattcctcggcggcgggttcctgccgcacctccaggggaaggtggtgatgggggaggaggcgccgctgatagggcaggtgttcgtcgtgaaggaggacgacatggccatggatcagaagaagaaggtggacaagcagaggacgctcaacaaggagcgccaaatagcctctgacctcaagttcagtatgaaactaggaaaggaattttgggccaagcagagtccagtgcatgtaaagttattatgtagaaaaataattatctgagagagtaaattgggttacttatggaattgcactatgaaattacgtttgaaagtttttcacaataaaattgtacgataacctttttttcttagcaattctcatcttggagatggtcagtgcaacccattggcccaagagaatctatccatgactcgaagtctcgaacaatggcctggccgatctaccgccgagcataagccgcatgctggataagttagtatgaaaaaagtccatattatgtccctaagtatagtccatattagtactttataaccagcgtattgatttgatttaccaataggtcgcaaaatgctatggttgtttcatatgatttatgcatttattcagaagtaaatcgtcgagatcgtgcacccttttcttatttattcgaaaaatactaaaaaatattctaaagtgcagccggatagatccaatctattcttgaaatagacaactcgcacacgctccttttccaaaataaatcaatacaccaaccactacagttagatttattagatttgttgctaaaatattggtattaagcccgaaactccctcttggccatgtttagaacttagactgtattgaacttatcgttttttaagtaatgagattaaatttattaaaattcttgcaaagaacatacatttgaaagaagctgtggtgtgctcgttttatttacagtccatctatctttttaaaagaaattatctagaggttaatagcataatgcccgtgcgttgcaacggattctaaatagtattcattgacattaattaaaatcctaaaccatatattacaattgggcataaatgatgaagggaatataaacttataaataacaacactacaaataactttgtccagaacgataattcaatatcaggaaaattatataacttaatccaattttctcatttagctataaataatttaatatagagaaaattataagttataatattttttagtggatcaaatagtgctaaaactaataatgtaaatgaaaaacaactgaaattagctagaaattggaaaaacttcttttaacccacatatgaaaatttgattcactaaatctgaacgggtgtctgttttattgatataaattacaattttcatattctattcatactcatatggtctaaatattatgcgagtggtctaggagcatggttataatagaccaagaagaataatgcccaatagacattgttcattgtcttccctagctaaggcgagaaataaaagagtagggaatataggctgtgtacatcctcacaaggtgtagaggccgggtttattataatccattattttaaaaaaaagagtagggaacatgggcgccaatgcttcagcgaccaaacgacggtgagggaagtggtaggacgtgtcccatgatatgactcgtccgtagatggtggcggttggcaacgaaaaaaaatcagaacaatgggaacgcggccgacaacaacatagtcccaatagagagaaacaacaatggtgagctcctgtggtgaacacggctgagtgagtgcgtcaaaatgtgttcccgaacaaggaggttccgttttccttgaatgtgtaagaggaagggaacgcaggggagaggagggacgccgctcgggagaagagataccgagggagagagggagcgtgtgcaacgagggggagatggggggtgccgggaaggaaggagggagacgggagaggaggggcgttgccagggagaagaggggttgcgggggagggggagagatggaggcacatggagggagggagggaggcggaagcggaggcgtgggagggaggggcccggatggaaaaagggatgattgaagccttacatatttttaaattatattattatttggtatagatttagaagttagaacacatgatttttattgcagttacattgatactcacaaaattcctgtagcacttgatagcgcataattgacttcctgttcgtaaaggtttatttttacgatgtcttactacaactataatcacaaagtcatcatatcagagtatcttgtagcagaatttgaaaaattaataatgcttgtttaattagaaaatatatatggcaaggaaatcaacgttgtaaaattttattacccagtgtttctgacatgctatgaaatgactcctggtcgacatgttttgttataatgtaaagcctaatcctccttggcatgaacaagattaccctaatttgacaagttcatcccataaaacattataaaaatttgacaagattaccgaatcgtatttggcatgaacaatattaccctaatttgaaatgactcctgatcggaaaattgtgtagagttgtactccacttctacacaaatcgtgcgtaccaaattaaacctcatcagatcggacggtggcagggctcttcccgcccacgcccaatacgactcggtctcgtcctccgctctctacatatccccggatccccctcccgatcgatcacgaaatctctctgcgccagcgacgtgttcgatcaattgcctcctcaaccaccgcctcgccatggtgctgaagaaatccaccggccgctctagcggccacgcctcgacgtcgtacgatgcctccgctggcggcggcgctgtggctgtgagcgcgtatgagcagaggatccgtcgtaatgccgccgtgctcgagaaggtcgccgtttcggtgcacgacagcctggcgtcgacgcgggaggcggcgctggcggagctcatcgccgcgctcgagggcttcctctccgccgacgacgcggagggtgggcacaccgacgagatcctgcgcggctgctacgtctccatcaagaagagggccgccagggaggcctgcgtggcgctccgcgccgtcgcgctgctcgccgtcacgctcggccccggcgccacctcgaagaagatcgcggcggtggagacggcggcgaacccgctcggctccggcgcgaataagatcatgaaggcgacgtacccgctcgcctcccggattctcgaggcgccacaagccgacgcgtccctggtggtcgccgcgctcgagtgcctcgccgtcgtcgcgttcgtcgacgtcgccgcggagaacatggacgacacggaggcgtgcatgaacgcgctgtgggcggtgatctgcccgagcgcggggcccaagctcgccagcgcggcgaaggggacggcgagcccccgcgtgctggccgccgccgtgtcggcgtggacgctcgtcctgaccaccaccggcgggtggaacaagaagaagaaggtgtcccccgccgcgccatggcgaggcgcggcggctcacgcgcacctcgtctccctcctcggctccgacagccgcgaggtccggatggccgccggcgaggcgctggccgtcgccatcgagatgaagctcttcaccgagaaaaacaatggcgccctcttctccaagatggaggccagagcttccgacctcgccaacgacgccgccggagcgggcgtcgacaagaccaacttcgtcgagcagaaggagctcttcaaggacatcacgacgttcctcgccggcggcaagcccccggtgatctcggtccgcacgtcgtcgtccaactacggcctcctcacgacgtcgacatggacggacaatgtccggctcaacttcctccggcgattcctcgccggcggcttcctgcaccacctccaggggaagggtctgatgggccaggtgttcgtcatcgacgacgacgaggtcaccgggaagctgtcggcggcgaggtcgaagcggagcctgatgaaggacacccgcattgtgaaggagttgaacggcggccgtggcggcggcggcggcgccatggatgagaagaaggagaagaagcaggagatgatcaagaactcgctggagaagaagaggacagttaagaaggagcggctaatagcccatgagctcaagcatggatcatctgatctatgaaacaaggaaaggaattatggataatttaattagggttgcatttcatatatatgatttatcttttttagggtttatagggcagtcttttagggttaattactagatgcaacgtactgcttggtttccctttcaatatcactatgttattttcgtattattgtcatgttcattcatggtccacaattgtacttgggagttacattcaccacgattcaatcacgctaattagatcaccactagagtataatcacactaattagatttttttagtgtgtactgcacacttatgagattggcgaaatttagtcactccttttaaaaattgttcaaatgagtcgctcttcctgttccgactttagagggtgtaagtctcattaaacagacgacatagtgtcggccattcattgccaagtttggatgtgatacaaaatacttagggcatgtacaacggtgagtaataacggtctcttttcgttactatgcaagtaaaattaagagaaaagtacattttacc

SEQ ID NO: 26607 - DNA, 12862 bp, Oryza sativa
cccccccccccccccccccccccgaactcgaaaaccggtcatttttcaccctcaactatcgataccggatgaaaaacccccctgagcagttttgcaagcggttttggtctacgtggcagcccagtcagcaattcttttctttttaaatcagtgggtcccacgtgtcagtctctcacctatcttttacccctcacctctctatctctctccaaaatcatctctcttctctctccctcaccttaaggacggtgtcctctctcttctctggcagagctcgaggcgacgaagggggtggcggaggagccgaggccggtgggcgggtgcggaggcgggtgcggaggcggctgcgggcggcgggtgaggagccgaggccggcgcgggggacgaggcggctgcgggcggcactcgttcggacggccggttgcggcggccggctacggaggaggaggcgcacgcactcggacggccggcggccaaggcggtgctcgcccgcgcggcgggcggtggaggcggagctcacccgggtgtccgctctctctctctctctccctctctatcctaatctctccctctctctctctctcttctcccttccctcactggcggcgggcgggcaagggcgggggcaagaaaagttgctcaggcgctggcggcggcggcgggcgacttagtcggaggcggagtgggcggccggcggagctccctgggcggctgaggtggaggcggagcgggcggccggcagcggaggagctcgtcggggcagctggtggcggaggcggaggcggctaggggtggcgcgcgaggtcggaggcggctggtggcggcgggcgcggaggcgaggccagcggcgggcgtcgaggccgcggctggggggcgtggaggcgaggccggagacgggcggggtcggaggcggctggggcggcctcgccgtcgctcctcgtccgcctcgactggaacctgataggagcagctgcctcggctccggccacggttgggtcgccgttggggaggtggggatggtgcgatggagattgggggaggggacggcgacacgtagaggagggggtcgatgacggcggcgggcgaggtcggaggccgtgcggtcgacgcgctccgtctccgcctccagagaaaagagagagagaggggtgagccgaccagaggcacccatccgcgcccgtcaccgctcgccgccaaccagttcgccctccctaccgcgcccgctgccctacctgagctgcgccagtcgctgcttgcccaaccgcgcccgtcttgccacgttggactgccacgtgcgcaagtctccagtcaaaaccgcccaaagtatggttagggggggttaagtgtccggttttattagttgagggggaaaaatgaccgatttttaagttcgggggggtttttcggctaaccgcattagttcaggggggtaaaatgtacttttctctaaaattaatgacatagtagagagagagagagggggaggaaagggaaacatgattgctacgcatgataacggtccagagtcgactcttttattaaaagaagttttgttacatggggtggagaaaaggaaagaagggtagtaaaaaaatattttggtacagtaatggtaggaaattttgtttgtctcaactattttggtacattaattgtcagagtatacatttgtatatgcccttacactgtgtaaaaatataaaaaactaataactatatatcaagacattagtatatacaaccaaaagttactgtactcgtccaaaagttactctacgaaaaatctacgggtgtgtcatctaggtccttgaactcccaaaatatatttttttatcctcaaacttatcttgagtgtcgcataggtccaaatgtattctaacccgctctatgcgctgatgtggtattgccatggtgcctacgtgttagtaggacccacatgtcggtcatttataaaaaataaaatttaaaaccatattttctcctcataggtagagaagaaaaaaaagatagataaaaattattctaaggtataggataaaatatttatttagttttatttttgtatatgtaactgacacgtggatccgactagcacgtaggccctatcatgacatgccacatcatagagcgggttataactcgtttgaacctatataacaccaaaaataagtttgggggacctaaaatatgcattttgagagttaaggaacctggatgatatacctacataagtttagtgaccgctcgtgcacttaattcactaaaaaattaataacaaaaagtagggataccttccatatatttaggtgttgcaatccatatatctgaccaagcaaccaataattaatccatatgtgacttaagcctaagctaatataatcaagcaacatgtacattatacaacactacagtgcacatcatctcaaaaaaaaaatctataattcagcttagtaaaagctctgtactcgcatgtgcaccagacacacaaaagcatggtcaacgacttagcacatgtgcatgagacatgactcggtcatgcggccccaaatgacttggattatatttctacataaacaagtggcgtttaacataagaatgttctttaggacaagttactaacagctactgatccattatattggatgtgtcattatagggttttctattgtaagtcgtacaagttgtactcattaattgtcacctaattatgctttgccttgagtggcatgtaagggaaaaaaaactcgacatgctcaatgtggaggcttgaagtccatgcatatccatctcttcgacaagctaggttaaatgcgagatacatatataatacattagtacagatcacgaatagatcaaatgatcgtaatgtaatcgtccatagggacatacataacaaaatatatatgtaatacaatattactgcatcatatgtacaaatgccagtttgtggcttgacctgcagtgatattaattaattaatatcgtcactagaggtttattatggcaggaattcgatatgatctaccgatgatagagtggtacttcctccgtttcacaacgtaagtcattctaacatctcccatatttatattgatgcgcatcaatatgaatgtgggaaatattaaaatgacttacgttgtgaaacggagggagtactaaagtttgtgggttgtgtttgttcgattgtactcctacttaataaaaaccttgtaacctaaagtgtaggtggtagtgaacgggtttgttgcacagtggttatgatattatagtatgcctaccagcccttaggttcgacacatcttgagagataatttttgagctggttttaaaaatgtactcgctaaccccttgtttaaaacacgtgttaagaaatgacttataattacgaaccatcgtgtacgagtaagtgcctcaaagcaaagggttaaagcctaaatcatggggtggatctgcgtgtcaaggagccagggttcgtggccatccttctcagagaaagtcatgagagtggtatatcccctgccggtcaattaaaaaacagagttgcacagttgcactaattacatattaactattataaattttaaataaattatgtatagaaacattttacacaaaatatattgtttagcggttccgaatgcgtgctaacgagaaataataaagttatcatttcgagttgataaacgaactgtcaaactcagccttagaagttgttattcacaagctaggtagctttagcgggggaaatatgtagtgtaaatttgaaaactcccggattcaatcatgagtaagaattttactagaagaaatttttctacttttgatgatatgaataaatatcatacatctatttttgaatcaaaggtaaatttaaattttccaatacatatgcggtttccactgcatgattggtagcgtgtgtgattatccatattgacttataataaaaagaaaaaccatgaggaatgcacataatttgcatggtagcgtgtgtgattatccatcttgtcctataatccaaaaaaagaaaaaccaggaatgcacataatttgcattgtgtgattatccatcttgacctataatccaaaaagaaaaaccacgaggaacgcacataattttattcaacttcaaacatcgtattgaacttcacacaatgacaaaccgaatccctatacttaagaacctgcccccacaagcacgcgaaagtacacctttttcccaatttttttaggtcaaagaaaaaagaaatccatgcaaatctgaccaactgacagcgaccatgcatggacagcgtcgtcgccgcaccaacactcgccgctcacgcgcgccgccgcttgacactattatactccgcgccgcgcggcgccgtcgccgtcggcggcgcgggtcagcgacgtgaacgtgaccaccggctcaagcggcagctcctccacgtcggcggcgaacgtgtcgtaccgccggaacagccccgccaccatcagccgccccaccgccaccaccatgtccttcccggggcactgcttgttcccctccgatggcgtcccggtctccggcccgttcgaccacaccacgtgctccagcagcggccgggcggcgcttccggcgccggagacgaaccggtcggggacgaactcgccggcgcggtcgaacaccttctcgtcgcgggtggcgagcggctggtacccgaacagcagctcccccttgcggacctcgtacgccgcgtcgtggctctcgacgaccatgtcgcgccgcgcgcgcccgtactggaactccaccggcgggttcatgcgcagcgcctcccacaccaccgacttcaccagcggcatctccttctccacggcggagatggtgatctcgccgccgccggcgggcgcggcggcgcggacctcggaggctagcttggcgtggagctccgggccggcgcgggcgagccacttgacgatgtgtggcaggaagatcttgaagccgccgtaggcgttgaagacggcgacgaacacgaggttgtggaggagctcgtcgcgcgggattcccgggtggttcttctcggcgtcgtcgaggatggccgcggcggcggcggcgaagtacgccgtgatctcgccgtactcgcggcgcaccaggaacggcggcaggcggaaggtgtggaggaggaggtcctccagcggccacggcttgacgaccttgctggcgagcgggtgaagctggaagatgagccacttcaccgccttcgtcacggcagcgtcgcccatggccttgctcggcggcgcgccgccgaacagcgcggcgcaggtgaagtcgagcatgtaccgcatgttgagcttgttgaactcgacggggccgccggcgacgaggccggcgtcgacctcgtcgaacatggcggcgaaggcggcgcggaacgccggcgcgacgtggtgcatcctcgccgcggcgagcgacatcacgacgcgcttgatcttggcgtggcgagggtcggcggcgtcgaggaaggcgagcgggcggtggccgccgaagagcgcgagcgacggcatgaaggtgccgtcgagcgtgtcggccttgtccaccatggagtcgtcgaggaggacgcggaagctgcgcgcgtcgaggagggcgacgacgcgggggtcgccggcgaggaaggggccgggcggcatgttgacgcggagcacggtggcgccgccgtggcgggcgacgcgtgagcggaagaactcgtcggcgccctggaagtaatagtagtcgaggcggtcgcgcagcggcgagaggaagggcacgccgtagccgcccggaatctcgcgtatcagcaggcccgacggcgagagcttgctctgccctccgacggcgccgtcgttaccgtcgccggagttggctcgcggcggcgccatggacgggagtagggtactggctacgtatacgcactacgtactagcgtgcaggtgtcggatcgtcacagccacagctatgaatcattgagcatctgttgtactggggttaaataggctaaagtgagaagcagacaaagtaaactcttttcctttttttttcattgtgtgtctgttgctgactgagcattgatggtagtatcctacttgtaatattttgacgctattgatttttatcataccgtttggtttattaaaaatatattaaaatttataaaatataagttatatttaaagtatttctaacgataaaacaatccctacgaaataaataatattatttaattaattttttaataagatgaatggtaaatatatgtttagaagtcaactacaaccaagaatttttttaaaaaaaaaactgaagggagtaccaactgcttgttcttatcatggactgtgaaggaataaattttaaacggtcgatgggatatctaatggcgctctctcttgtggtttgtttctttggtgagggataactctagctttgatgaatgcgatattggtgacgtcagaacaagttcaggatgtcgtacaatcactgtaccacaaatgatgatgcgtgcttgatgatctttgcaatctaaatattatgaataggtaattaagaacaaagaaaacattggaagtgttttatctaatcgactcggcaaatcaacacaccaattattggaggctctgaatctatagtaaagcgactaaacaaccgaggactacatagtgaatggcacttggcaaaatttagctaaacaatatccaattgttttatagggtgtacatagatatttaaagaggaaaatagctctaggaatgtgtttaggtttgtggagatcgacagaggcattttcgagataggcctagtctattacaaagtctaaaacttaagtttggtttcaacaacagtgcaatcttgtttggatgatttccgttgactcaggatgaagtttatcgtggatgatatgctttgaaatgtgactccataagctctcctataagtccaaaattaactaacagagttagcataaaggcgctaggtctgtttgtagtaaatgttgtcctaagaggccgaactgggctaaaaactcactgggtttgaatatctacatgttgagggttcaagatgacgtggtaaccttcaaaaatagttgaggaaggtcttgaaataatattacattagccttgtagttcatctatttaccagatgtattcttaagctatgatagcatctctggaaaggaaaatacgagtcaattattgcacaacattatttgatcaaatagataatatgtaaatctaacataaattgtgagtacctttggtaaatgtcttatatttccattgattgtaacatgtcatctaaatagttataaaaatattaagaggatagattaatatgtgatttaatcactttaaatacgtacaagttcaacttctacaagttataacaaaagggataaatggaactctagctagttaacatatacatataggccctgattagttcccacataaaaattttacacccgtcgcatcgaacgttgaacacctacataaagtattaaacatagactaaaaaataattaattatacaaattgtgactaatttgcgagatgaatcttttaagcctaatttcatgatttgacaatgtggtgctacagtaaacattcatggtttactgatggattttgtaattagtttttttaattagtgtcaaaacacctcatgcgacaccctatataatacccgatgtgacacgccaaaactttacacctctatatctaaataccccatagtcaaattatatataacatatcaatctatcttatcaaaatttttatttttttataactatttggatagaatgcaaagatcgaggggatgcccactcgagagtttagaaacgttccctgggagcgtggtgcgttaacgaaattattttaatgcagaggtagcaaagtaatagtactaagtaacttcgatagtgtacttttacataaggaagaatacctcatcggctgttgatcaagtggaccagttcaaagtatcgtcacgtacgatcgagatcatcatatgggactatatatgatgatgaattgatcaattgatgactatgtggacgattttaatatttaagcaagtatcacgcgggagtattttaattcgagctaaatctgacacaggccattatccctattggcctgtattcataacccaagaaaccattatccctattggcctgactctagctattattaccaataattttctttatctgcacagggccgtcgatagctagccatgagcaacacgacggctgcacaggccgggccctcgatttttttgggggcgctcacccaggggccaagctagcatcaaaacaaaggggtacactactattgaaaacctagaaaatttcaatacaacaatatacactctagtgtttttagtgtttttaagtgagattaggaatttgggggttcatgtgcactctccaaacacaatatagcttcgccattgccctcacctcgaagtaggcatgtgttaattagtgatatgccctagaggcaacatagagatgattgtatcacatactatatttatatatttatccgacattgttccttgaaatagataactatttattggttaatgaatatgtgattctttcatgagactctttatattgtttgttactatttctaaaggatccctgatcaaatatcatatgtggaacaaatatgtttatatgatcagcacatgtattaattgatgatcatgtctcatggatcatggtatagagataccaaattaataatgtggacacatgttggtgaacatgttgttggatagacccaatatgagacactgcaagagccatatgtgttgtgtcatcggtgatctcatttagtattggtgttgaattcttagacctgagattatcatggttctcaacatgtgtagcagcttacttagggactgctaaacgctactccgtaaatgggtagctataaaagtagttttcgggtatgctatgaaacatgtagtgggatatgaataagcaagatgggatttgcccctcctatggagagatatctcttggctcctcgatgttgtagattatggaagtgcatggccatgccaaaggtgattgaggagtcaatcacaagttatataatctatcaacaggttcgagtgaatgattgagctactagaggatggcacatatctagccttgagcttaatcgatatcgtgaggcaaaggggttcatacaagtatacactagaggttcagccgatatgatctttatgtatgcccggtgggtcaatacgttctgctaggtgccgctgttgacgcgtggaccgaaaaggagttttcgggttacagccgagtatatatgaacctacagggtcgtacgcttaatgagccggaataaggggattggatagagatccaatatgagcttaattcggatagggatccgaataggagtcctacgggccttggaggcccgagtgatggatcctatatattcgtgaggggcgtgaccgacggaggcattgcatcacgtgagaaaccctagccatcacttccctctccgagcaaaaccctagccgcgcgcgggtgctagcacatctgcgcgtggcgttccgtccctgtacgtgtggataccggtagaggcgccgctggtttgcggtgctgatcggcgtgggagtatggcgaggagaacgcacgtggaggagaaggtcgagccggtgcgatcgactacttcctctacatcgacgcgcactacttcgcgagagttctttcgacttctcagcgtcttcttcctctgcgcagcgcgtcgagtggtaacgatctatgatctaatacttgcatggttcctgatttacgcgatagaaaattttaatttatcctatcgtagcctacgcgtatcccaacagcctgcacacatgcctggcctgctaccattaccaaccgagcgaggagtgcaggggcagaaggcgaaaggcgtcgctttgcattgcgtcggtgcgtgcgtgggtcgtgggctcgatcgtggcgttgtgaccagtgaagtgacttcaatttccaactgatgcatgcgcctacgagatggagagtcgagacaaacgagtcgacgagacgatgacgcgaggcggcgatcgacgcgcaggcaagcagaccgactcaccgacgataatatcgagcgatgagcaggcaccgcaggtgatgagcgacgagcgacgagcggcggcaaggcgagcaccgaacagcccaagccctagcggctgctggcggcgggctggctgtgcggcctctgcggctctgcctcctcgtcgagtcgtcgtcctcatggtcatctcctcgtcctcgaatcctcaatccaatctccctcaaaggctcgaattatcattgacatggccatctcgatctactcatagctatacttttcttttctgaagtcatgtgatttctatggttccatgtatagcttcatctacgtgcctgccaatccatccaactatgttctcacactgttatccttgttgccaattgtttacagcgactatttttctcacactgttcattgactgggatggatggatatatattcatatgcatatacattcaaataaaattatggtattttgaatgaccaattagattgattattcaaccaaaaagtaatataatgtcttgtcttttcttttgtttataaaacacgagaagaattttatttcctcaatcattggcatgtcttctacaaataagaagtatgattcaggtgctgaaagtgatgtattggacaatattaattatgaagatataatcaaatatttcatttcaaaaaaacaatagatggatgatgcttttcagtacatcacgaggttggtactacctttactctcttttattttagtattaatatttatttgatgtattttttgaatatggtatgaaataacacattaaagttatatagttgacataaaatatgcttagttatattatatctataatttttaaaaaatttagggccataatttacatttcgtcacggggctccaaattcctggagaggccatttttttaaactccataattatcttttaagaaactgaattaagtttatacacgtagattttatcgcggcgagagcaaatttaatgataaagctaaccactaactataataagcacatctaaaattagtattccctccgtcccaaattacagagcgtcctctttttaagaaaaatcaaactcggtatcttttgactaataatcatactatatctatactaagtatgcattatgcatgttatatcattagattcatattttgaagtactttcatatatatgatgttaatttcatgtttattgggatcatagaatgaaataaaatattggtcaaagtatgttattgaagaacgtgtaaaaaatataggtattataatttgggacaagggagtatatattacaactaacatgtgaaataattaagcgattaaggtcatctctattttattatattatcttttttttcctcacttatatatttaatgcatctcttttaaggcacgtgcaaagctaattcttggagaacagctgtcaatctgttttatctctcctgtacatgcgcaaagaaataattatagtcagcttataggctattttttgtgcttgctcttggtctttgggtcgtctttgaaattaaagcatgaaatttggatgactttttattttatgaaaggataaccctagctctctctttaattaagaatatcgctactacgtagttgatttttcgggatgagaccaccttcagattgtagatagaccataactactcccgcgtgcaaaaattgcttccctaagcacaggatagcatgcgaaaatgcccatctctcttcccactcctttttctctcccctctctctctctcccacaaaatcctctcttctcccgtccacaactctccccactctcctcgttgcccactcctctcctactaccagtgactgcgggtggcggtggcggtcgggctttccagtctctactccgccatcggagcggagtagccggtgggcgtgggagcaaattagccagtagggcatgtgagcagagcagccggcgagcgtgggatctgtcatcagtagcgaaggagtggggggcgactaggcaaatccagcagctgtaggaggcgacgaatcaggctggggcggatcaagcaacaacggcgacaggaggtggcaaatccgtcggccgcagcaccggctgggtggatctagtggcggacccgtcggccgcaaccccaaccgaggtggatccaatggtggcagcggcccttctccccctcccacacttcatctctgatcctcgacagcgacaatgactcgatggcaatgatgtccacgaccacgccctgtttgctgcgatgatgactggcggcggtaggcgcccagcccgagtggatccaacgggctttggactgcggcgaccaggtggcgacgtatctggctagggtttcaattttaggaacatttacttttttttgcctttttttcacagtcggatgacataagtgtccgcaatcgaaaatacatgcaggtggaccacccatccgcctgcaaaaaatgatttaaccacatgaaaaatcggttagatggtagtagcgtgttgtcccggtctaatctgttttatgaattcaaatgcatgtgaaacatggggagttgaatacaaaaccagaccaatcaaaagacgtacctgtcgctctaaaaaaaaccgtacctgttcaacctaatttcctggtgaataatacgtgtggatgcatttgtaattttttttttaagaaacgctttgaatgcatttgtattgcgaaaacgttctttccttttgggccctagaaacaaactggtccacccg

SEQ ID NO: 26608 - DNA, 1131 bp, Oryza sativa
caggccgtgtatttggccacctttccggccagagccaactcggcctgctgtttgttgccccagaggaggacaacatggagacgatcgtcgcgcaggatgcgcttgtaatcacgtggaactcgtcgccagacaccgcagatcttgcccgtggcattctgatagacactgagagtgcccgccaggtggtctccagttgatgctcctccaggattacacccgcatcatcaacgaattgaatggcacgcggacgaccgattcgcgatgaggtgtagaaggagtagtatagattcttcttgtggaacaggaaacgggcggtggccaccacattctgcggattgtaggtggtgtacatggacttcatttcctcacccttgaggaaataggaggtgcggcccgttagcaacgcagcgtaatctataaatagggatcaaatgaaaggtggagataatccaggtgttagataaatacaatagttctcttgttaattaaatgtaggagctggtgaatgggattacaatttcccgcaggatttggcggattctattgggatctgggtgggtgtccggtacttttgtacttacgtttcatgttgcgctcttcctcttcattgggcacgggcacatccaaggctacatccgtatctgaaagatggagggaatacaaatagagaataagatgatgctgggcgataaggtacgaccttaaatggaatttagatagcaacaaatgcttcaaagcaaccgaaccgccgccagccattcaccatccatccagccagccatccagccagccatccagccagccaaccaactatccatccacaatttgtggacacaattccggcattcaaccaaaattccagttgaatgggtgaatggtgaatggctgaatggacgaatgccaggggatcatcatgaatggcaatgcaactatcaggtagagatcccacctccgaactaagaccttccatttccacctctcgcttccacccaggtggcattcattaatcgtgcataaattgagggcaggtagaaggtagagtttctcgaacgggaagtctaacctacatctaactagggaagtgctttgtatttgaggatgtgcggactctggggttctgaattcatgggt

SEQ ID NO: 26609 - DNA, 1848 bp, Oryza sativa
tgacaaattgtttatcagaattcagcaatgcccattaaaatggagggatccatgttcctctttaattagcaattgcatcacaaaaagcttcatgtcgtatagactaataatattgtaaatacatgcattttttcatgcaggtgtcagattttggcatgtcaaggttgaaacatcacactttcctgtcctctaaatcaacagctggaacagtaatatccttgatgctctggtgactttctttttcatgttttacctcgttttgattgtatgataaggtgttttttttttcatctttgttctccagaaactctggaatatcgcactattgcactttacacggctaggatatgcaaatcatttgaactttagacttcaaaataacacattgattgctctgcctggtgtttagatgcaatatttgaggcattggatagtgccggtgtcctcaaacagaatggtttatgcaaaacattgtgcaatgtagtttgctctgcacaactaattttgtatagatcagttcaagccatgctctctttaccctagttactttcacagggtctttttatttttttctggaagtagagcctcaccctttttagacaactcattgttaatccaagatcatgtagtggcatagtgtactatattaataacatttttattgttcatttggtgggtgtttcctgtaattagctaattattccatcaccttgaccatattttatgttgggctacagccggagtggatggcaccagaggttctacgtaatgagccatcaaatgagaagtgagttgcttagttttctcatgacatgttggcctttccatttacttcctgtcatgttctcctgctgattgaaaattgaatgctggcatcaggtgtgacgtatacagttttggagtaatcctatgggaactagcaacaatgcgtgtaccatggagtggactgaatccaatgcaagttgtaggagcagttgggttccagaacaggcgactagaaattcccaaagaaattgacccactggtggctaccataatatcttcgtgctgggaaaagtaagaacaaaccagcccggataacatgctactcttctcattctacctagttttacctgccacttgctccactgataatgacccccaatgttctttcgtgcagcgatccaagcaaacgaccatcgttctcccagctcttgtcaccgctgaagcaattacagcggttagttgttccagaaaactgctgacatcccttcctgagaaaaaaaagctcaggtcaaacaaaaaatacaagtatgtaagctctactactacagaggccaagtttttcatgttgaagctttgtggagatgtattcgcagtctctgcatgcaggatggatgtgcatggacgaaggttctatgcatcctgttgtgaaaaaaaaaatgtgacaaaactctctctgaagccgtgcaaaggcgctgctggagaaagcaatagtgtgttagttccaagtgaagaaatgtggtgcaacacgaagtgctctgtgccatcgaaataatttgttcagttctggaatttggaacggtgattctgagaatcagaatttaaccacaaagataggatcttggttttcgttcttttttgtcttgcttcataattggaaaaaggagaaaaggtcaggttaaaaaaaatggaaaagggaaaacgaaatcaaaagttttgtggcgtctgcaaaagttgcggcccggtatttaaccagatgcaaatcttgtatatcatttatacagagttttactctgcatcgacttgaatatgcatcttaatatcttattaccttgtcctctttcctataatattgaatggttacta

SEQ ID NO: 26610 - DNA, 6838 bp, Oryza sativa
aaaagacatgaacacaaaccgcagttaggcaagctgaattgactcctccctctatcccccaaaaaaccgcagttaggataagacataagctagaacaacgaatttgaaaacgctaaaagtaaagaatccctacaaatttgaatttggacaacgttaaaagaaaagaatccctatgaatttggacaccgctaaaagaaaacaaaaatgaagtgaatttggacaacgctaacaaaaaatctgacaaacatgaacatcactgtacctcttttacttgcataacaattcgaaaacatcagaattgccaagtttatcatatgagcagcagccgattcacaaggaatggtgtgtttccgatgatgattcgatggatagtgtctttaacaactaagaactacaagatagaagggccaaaactcttaaaaacagcacacagaaacgagagcacactcaatatagactaatataaccacaagctgatagtgttttctttttcagaatcatgaactattttcgaacggtaaatccaaaacctaaatagctcatttttccacggtatccttgctccaacgacgcctcacttgaagcatttcgcatccagcaaagcctcgccctcaaatggctcaaggtcctcaatcatggcgctgacgcgctccttctgggcctcatctgagatgtcaaccttggtccactcatagagctccatgtcgtagacctcatccatgacgaacttggggatctcggggccacggaagagccaaagacccttcaccttgaatggcggctcagagccgatcacaagcatcttcccgaaggcatatttgcggcacaggtccattcgctgcaggaacccaccaaccttgttcatggtcacgaaggacacggtgttctcatcattgtatttgtagtcgcagaaccacagggagtaaccttctgggtcatacatatcccagaaacctgcaatacatgagaagataacttgagtacaattcacagcagttcaaactcaacagaagttggtgtagatgagaaataatggtgtagaagagagaactaattgacagatcaggatcagctgaggtagttgttttgactgcaactttagcagtcaacacatatagccatccatcaagccaccaatgggctaagatgttgagcatcttctctaactaagatgttaattttctccatccaacaacaagaggctaacagtttttgcatgctataattctctagctaagatgttaattttctctaaactagaatgtttgagatacaaattgacacaagaatagcatagttaacagtgtcattttttaaagttctgaaaacaaggcgtttttttatttatagtccaacttaatatttttattaattttctgtttcattgatttcatggttttggaaatattcgataaagaaagaaaggaaaagagatgctcttggtctagccattggttgcttgttggattactggatgtgatgactgctgaagttgcagtaaaagcaacaactccaggccttcagctgatcctggacagctagctagttcacagttgaaaagtaactaacaacatataacatctaaaaaaagtcacatgcatgcttgctatttatgatgctacacaaacaaattctaacgggtatcctaatttgtattcatatcctttgcaacaaagcaatgcaataaatttgtctatctggaaactttttactgactagtagattccaaaaaagaaacttacccttgatagcaacctcacggaagtttgtttttgtgtttgagtataacctcttccactcatcaaggatcattttgcttggagggagcaaatcaagaggattctttggctttggctttggtgcttcctcttcctcctctggtttctcagctgccttaggctttggagcttcttttggggcctctttcttggcttcctttggcttctgctcctttggtgctgcagccttcttttgaacttgtgggacagaatctgcctgcttcacatcacccatgactttcttaaagtttggctggttaaccatggtccagaagtacctctcaacatgagggaactcagaagtaaaattcttggtcatgatccgagcaaagcccatgtagaggttgcatgtcatcacaatatcagcaagagtcactgaatggccaacaaggtatgtgtttgatgcaaggtgtgtgttgagggcacccaatgatctcttcaaagcagcaatagctgcttcctcactctgttaggcagaaacaagattagatcacaaattgctaacaaggagaacacaacgatacccacttgaccatacttacgacagcaacataaggagcaaatccaagacgtgggaagagccattttccagtattagcatcaacctctgtggctgaaaagtcaatccactgctcaatgtgggcctgaaagaaacaagaaattcaaggagctggtaaaataatcaagaatgatcctaaatgtctatgaaagatcaacctgaaagaaacacaaaattctaggagctggaaaataatcaagaatgatcctaaatatttatgaaagatcactcacatattcaatcagtgaagacccatagagtgggttgtcagacttcgagcgagtaacttcaggaaaatgagaggaacttagaactaaatcaagcaatagagagaaaaggattaaaagaacggaatccttgctatgtatcacttaccatatcgtgcaatcgcattgctttcaaaaacaggaccatcaggagtctctagaatagggacctgaaaggaaacgtgtccaaatcagattctgtgcaaatgtaccaaaattcagaggtggttttgctcaaaccttcccaataggattcatcttgagatactcaggagtcttgttggagacacccatctgaaagttctttgccaactcaaccttgacaccagagtactcggcagcaatgagtgccttgaatgcattcttgtttccatcgaaagtatgcaatacctacaccaatgcaagttacaaagttgagcgtgaaaataggttagggaagtgcatgacatgacaacactacaaggacagtttgactagcatgtccataaggatggatacacaaacatgataaacaaaaaatatacaaacaacgggacaaattcatagatcaagcagcacatattacacagtgactttagccattcaatgttctacagagtgatggtcaatacatacatattatataattatgtgcacaagtgctgagctataatgtctgcatgagacatgtctacatgctcatcggctattcagaaagcgaataagacttcatttccgaaactccaaataatcccatttgcatcaaacaggaagctgtaagcattctaggaaagcagagccctgtgcgaatctctacaggataatgtatatattgtcaacaaactgtcatgtgatcaggctttcatttgtatgcatttgaatttggtcttacatcatcaaatgtatataagaaaggctaactattggaaaaccttggcaacaatctttaacacttgggatcaaataatcagaaatatagactagaaaaatttcgaaggcaggtccttgcttcctcactgcacaaattatttaatattcacttgatccgccagcatttgaaccagaaagtaacaaagtaaaaaaaaaaaccagaaatctgcatttcaacgagcttgcaagacaacattaagtaaataagagatgctagacatagaccgaacattgtccaccgatctaaataaaatccgtgacacctaaactgtcaccaccctaccaaaaccctccctaaatgctgggtagaaatgcgcaccaaatcaaccctgatcgtgcagaaaaaaacgatatgctttacagaagactcatacagcaatccacagatgctacaatttgaaaatgaaaaaaaaaaaactacaccccaccgcatcatgccaagcttctccactaaatcaactaaagaacacgagcaaacgaggttagatcaagaatcacttacgagcgccatctcgacggggccgccgccttagctcccactcactcgatttcagatctgcacatcatgaggaaacaaaaatccaaaaaaatttaaaaaaaaatccgcaaaatcaacagtacgcaacaatggcgcaagcacactagttagttgtagcgaatcggggagatcttacggtggcggaggcgaggcgagcagtggagggagcagcaagacgaaccctagtggaagaagtagcagcggcagcaaaaacagtggagggattcgacgcagccgattctacttacgatctcgcctagggttgcgcgcgggtgatctcggccgtccgatgagtaagccttgcgacagatcggacggcgcagagcagatccaaccactccgtaggcgggcattcgtctggcactctggccccttccagtcgagcccgttggatcgaaacgggccttgggcattttttctaaaaaaaattaaatccatttctttcccataaaaaaattaaataaattttagaaaattatatatatataggttaatttatcataaaactacatacaaaagtattgccacacttgtctaagtgaggcgatcaaattcttggtcacactttagcaagcctaagaaaatcttgcaacacatttttgagtcaataacgtatatgactcgtttattggaagagaatcttgccacaactgtgactacaaccaaacaccctaaaatttactcaaaattaaactaaccaaagttattaaggggaaggagattagtattacagaatactgagtggagtaaggaccaacgttattaaggggaaggagatagtattatagaatacgaaatggagtaaggaggatttaatgttcgcatggtggtgatgctgtgagttaatttcaaggcatgtataaaggtagagtctaatatgagctctttatattaattaatattactagagactatatcctactacctccgtttcaggttataagactttctagcattcttcacattcatatagatgttagtgaatctaggcacacatatatgtttagattcattaacatatatatgaatattagcaatgttagaaagtaaacggaggaagtactaaagtaataaagacaataagttttctaaaccattaatgtataaataaatttttattatacttctttcatttttctccactctcatgcaacaaacttttcgttaatgaatgctaagagtcgactctgagccgttgtcatgcgtatcaacgatgtttttccttccttccatctctttctttcacgtgactctgaggagccgttgtcatgtcatgcgtccctctctttctttcacttgactctgaggagccgttgtcatgcatagcaacgatatttctccttcattccctctatttcttccacattaactctaaaccctaaaccgttgtcatccgtagttgtttctccttccttccctttctttctttaacgtcactaaatttactccgcaaatgcttaggcaagttgacacattgacaaaacgcaaatctctgatccatgcgttgtagatcccatttttgattcaggagattattatccggcttaccaagctatgcttttcatgtaaaaaatttctatataatagaagtttcttggaaatatttttctaaagcaaaattttaaattaatagtaattcgttcattcattcatttatataccctcaaatagccatcaccaaaccagataatcaagaaaatctcaatagaaacgaacatggccttcgtctgcgtgcccagcgctgaaagcaaaagaaaaaaaaaagaaacacaacaaacatgaacaacagaataaaatacataaaataacccagcaccataactcgttttgttgcctatttccaaaacattatcagaatggcaagtttaacacatgagcaacagcagattcgaatggtgtgtttctgacgatgattcgatggataagtgtcttaacaacttaactacaaggttaaaaagggccaaaactctagcaaacagtacaaaaagaaaagaccagcacactcaatattgactaatatagccacatggtgatagtattttttttttcataatcatgaactattgtagaagggtaaatccaaaacctaaatagctcattttccacggtatccttgctccaacgacgcctcacttgaagcatttcgcatccagcaacgactcgccctcaaatggctccaggtcctcaatcatggcgctgacgcgctccttctgggcctcatctgagatgtcaaccttggtccactcatagagctccatgtcatagacttcatccatgacgaacttggggatctcggggccacggaagagccaaagacccttcaccttgaatggcggctcagagccgatcacaagcatcttcccgaaagcatatttgcggcacaggtccattcgctgcaggaacccaccaaccttgttcatggtcacgaaggacacagtgttctcgtcattgtatttgtagtcacaaaaccacagggagtaaccttctgggtcatacatatcccagaaacctgcaataagtgagaagacatgttgagttcaattcacagaacttcatacacaacagaagttgggagcagatgacaaataatggtaatcaaagagatataacttgctaacagttgacaggtcaacaaacaaatttgcattgactctttagtagctgttataatttgtaagccaatttgtactcatatctttctagtgtactcacagcaatgtagtaaacttttctctgtggaaacctttttagtgactactagattcccgaaagaaactatacttttcta

SEQ ID NO: 26611 - DNA, 2123 bp, Oryza sativa
cttttcaacgtggaaacattttagtgacgactagattcccaaaagaaacttacccttgatagcaacctcacggaaatatgtttttgtgtttgagtataacctcttccactcatcaaggatcatcttgcttggagggagcaaatcaagagggttctttggctttggctttggtgcctcctcttcctcctctggtttctcaactgccttaggttttggagcctctttcttggcttcctttggcttctgctcctttggtggtggagccttcttttgaactggtgggacagactctgcctgcttcacatcacccaagactttcttaaagtttggctgattaaccatggtccagaagtacctctcaacatgagggaactcagaagtaaaactcttggtcatgatccgagcaaagcccatgtagaggttacaggtcatcacaatatcagcaagagtcaccgaatggccaacaaggtatgtgtttgatgcaaggtgtgtgttgagggcacccaatgatctcttcaaagcagcaatagctgcttcctcactctgttgggcagaaataagattagacaacaaattgctgacacaaggaaaacactatgacacccacttgaccatacttaccacagcaacatagggagcaattcctagccgtgggtagagccattttccaatattagcatcaacctctgtggccgaaaagtcattccactgctcgatgtgggcctggaagaaacatacaattctagaagctcgtaaaataatcaagaatgatcttaaatatctatggaagaccactcacatattcaatcagtgaagacccatagagtgggttgtcagccttcgagcgggtaacttcaggaaaatgacagtgacttagaactaaatcagatatgatagaaaaagattaagagaactccaattccttgctatgtatcacttaccatatcgtgcaatcgcattgctctcaaaaacaggaccatcaggagtctctagaacaggaatctgaaagaaaacgtgtccaaataagattctgtgcgaatgtccaaaatacagggatggtttttgttcaaaccttcccaataggattcatcttgagaaactcaggtgtcttgttggagacacccatctgaaagttcttcaccaactcaaccttgacaccagagtactcggcagcaatgagtgccttgaatgcattcttgtttccactgccagcatgcaatacctaatcacagacgaataatgtacataaggttggagacacaagcatgataaacaaaaacgatacaagcagaggaaccaattcacagatcaagaagcatatattacaaagtaactttagcttccaatgttgtgcatagcgataatcaatgcaaataattatataattatgtgcagaagtgctgagctacataaggtcaacgtgagatcagatattctgaaagcaaataaaacacattttggaaactgtaaatgaatccatttgcatcaaacaaaaagctctaagcgttctaggaaatcaaccctgtgcatgtctatgcaggataacgagtataatgttaacaagccggcatgacactgggcactcatttacttgcattgaatacgaacttactttggcaatagtgcaacacttggtatccaatgagataatcagaaaaaaatgacagtgcagaaaaaaaatcatagctccttactacaaattaagtaattcactccatccactagcattagaagcagagagtaacaaagtaaagaacaccataaatcttcttcaaccaccagcacttgaaccagaaagtaacagtaaaagaacaccagaaatcattgatatcaacgagctcgcaagccagcatgaagaaaatcagagatgctagacataaccgaacattgtcaacgatccaagtcaaatcctgaacacctaaattgtcaacaccctacaaaaacccttcctagatcgaaacactgggtagcaatgcgcatcaaatcaaccctgatcatgcagaaaaaaagattttctcatagcagactatacaacaacccgcacaagctataatttgaaatgaacaaccaaaccccccaccgcatcaggccaagctttcccactattaatccccacaaatcaa

SEQ ID NO: 26612 - DNA, 26911 bp, Oryza sativa
catcctatccattagctagtccattgtcttgacttgtcaatgtcatatgtttcttttcaaactttcctggatacacctttattttgttgttgcatggtacaaacattcacaattatttttgagacatgattgcaagatttaagcatgagagagaaagtacatgtagttgctcatacgctgtgttgttttctttcttcatataaatgaaattcaatgatgtgatggaaacatagcgagaggtagcacatcaggaatgttctcccaactgagctctgaacataatccatccattcaactatttgcatatggcatgttattttttttatgctttcttagtattatgtaaactattatagcttaatttacaaaaaaaaaattagaggtggaaattttaatggtgaggcatcacattagagttccaggaacgtgcagtgaaccaaaaaaaattggtgcctcaacagatcaaatcttatgattgttctgatattgtgtgcttctgttgtatcaaagtaggagacttacaaaataagtgggaacaatattatagggcctgtttgggggagcttaagattctaataagcagctgattagtatccagcttctgagaatctggaaaagctgggtttcccagcttctggcttctagttcatttcctgatctacaactacagtttctcagaatttggaccaaaagctggactgtttaggggagcttatgattctgggagaagctataacaactagaagcttccccaaacaagcccatagtttccatccttgatttggtaaaccctcatttccctttttacccctagttttgaaaaattacctggtgcatcattcactcgtagcataatctcaaaatcatgtggagtgacattaagccgaaaaataagtggttgtggctcagcccttcatcacacccctaggttaccttatccaattcctctcaattagtgtattctttgttttctgtctttttgttgtttctttaatagcaacggctcgttatggctgtgtgctgcgcagagccacttattgcattgcttggtaatcacatatttgtcttattatattatcataggtatacttttaaaaaattaaatcaaattatgatcatatctgaactattccatctcttattttttgtactattgtgattcattgatttacatgtttactagcagttactacatttctgatattattcctgtaagtgtcattgcaggcctcctttttcttgatgataaacttggtattgcctactcctagaagatgtttgacaattggagactgcagcgcaacttttctcaaatatctaggcctttctttgtcctaatgaagagaagtttgcaagattggaaaaaagaagtgattcttggcaatgcctgttgtgtatagaacattttattcacttgggtgccactgataagcctaattcaccatgaacacctctcagttgggtttttgtactttagcctgcactctggtatgaacacctcagcttcttcactcaagattactatttagattttattttctgactcctttttatttccctttcctcatttctacccctggttttaccatgattctgttaactgagtatttagagctaacagagaatcattttttgctggagtatttgggaacattttatgtttagcaacagtacatcttctgatattcttcatgaaattcattgctagactggcagcaacccttcaaagctgaacactgtagcgttctgttttctttcttattatttagtaatgatgaagtgcatgtatatacataaaccctctcatttgtgtgtatcatgatcccacacacacatgagggtccacgtaggcatggagcgtattgtgtctttttgcacaaagccatgatcccgttggatttgcaagagccttgtgaaagctacatttttgttggccacaagtctatcattgagctgggcaccttacatcttgtgacagtgagtgaatttattctcacagacactcttgctcaaggagtgattcaaaaggctcatacgtatacatcttaaccatcatacaaactagaagctggctgtctatcaaagtgaacattatccagctatacgagtggtacgataagaatttggtagtgtgggcctgaagttttcatgtaattatctgtgaacatatatatacggcctctctgtagtaccgtattagcgaaaagctggcgtttggcttcatgctatttttaacctttattttggggcatactttttcaatatttcaccggacatctttggcgaaacaaaagatcttatggtgttgtgtgatgttttgaggataaccagtcattttctagtagatctattctatagctgagatctctttcttgcttccgttacgtttggagaatatagcatgcatgtcttaacagaaacacgctcttacattattgctactactgtagcttaagcacatggactgtcagcataagtaaacgaatgatgtcacagctgcagcctttaccataagagtttgatccttcagtagatgttaaatttagatatatggagtagatgttaaatttagattcaatctccttcagtattgctcaagcacttcgaatgatattgcatcatgcataacaaaatggctcattacacaatgatgaggcaaggacagtactgtttgcggtagtatgggggatcatttggtcacttcttgagataagattgtgacaaattcatttagatgcttaattattgataacatataccaccttatcaatctcaaatttctgtgctgacttatagctgcactcttcttgcagtatctttatttatgcaggagggattactccggataaatcataaagggtctagatccaatgtcacgaagacaacttctgcattctgtctgaggatatgacgattcacaactgaaccatgcctgacagattattgcgcaaaccgaggcgaaaagttcagtgcagagatctgctcgtcatttcgtcgagatggtacaaacccaggtgctagcttctccaaaataccaaaagagctccagtcccagctctctcctacttcatcagtatccttcttcccacacagctcagaggtgcgtcaccgatctcgatgcactctgggaaatgcctacgcgacacgtgtcctactcctattgctatctttgatgatcactgattctctctgctctccattgtaggttgatcgatcaacgatctcgccaaacgggcgttttcgttgtcgacctctgtctcctttgtacgcatatataccgcgtacgtacggaggcgcgcgcagtgggcgcgctgcgctgccagccccaaaatctgctccattagttgcttgtttgggagcgctcctcgctgagctttgtccccaacgggatcacgagagggggaggaacaagttgcccagattttggacccttgccaatggaagtgtgtgggcttgtcatgtgggaagagccgtcgctttcagggtttaagctgtttctgctcctcctctctcttgctcatgggcaataagtgagattttggttgcgcattagagggatgtgtgccatgtttattgcagctttggctttattttagtccctcgacctctcccaagtgatgataaagactggttgaatagtcagcaggcaggccgtagattggctagcgtatgtaacagtatgatgagatcatgcagtcagtatatcctgttctgagtcgtggaaaagatttgccctttcatggacctaggtcgactctgttcatcacaaatcagagcaggtaaaaatattttgcctaaacagtagtatatttttaatctttgaactgatgatggtataaatgtcttgttgatgttgctgtaggctctggggatatatatatatatatatatatatatatatatatatatatatatatatatatatatatatatatatatatcatatattttagctgtgctgaaactcttggaatttgatcctccgtacttggcatatttcattaaggtaatctctctctcggcctcctactgccgccagaaaattatctgatataatttcgtatgatactatgattaatttcgtactgccggtgttagctcttggctagaggcaaaactacccctgttacatttgcttctgccgctaaatccaaaaaccatgcttgcatatgggcctggggcccttggcgcaggaagtgtctcattgcctgctcatgtcttaatgtttctttgtctccagtgcgtgtgtgactgtgtgagagagaaaaccagagagagagagggatggctaatggcttcttcatgcaaacctatctattagagccactgcactgattcttcacccgattttacacaggcaggcctccctgctgaatggctccagcttttgttcaaccgatctgtcgtttatactacagtgctgggaaacgtgcatgtactgcatgtactaacagatgcatggcatgtgagagttagttaactaggtagtagccctagctagctactccatctattccacgaaaaccaacctaggatatgatgtgattttttttagtacaatgaatctggacatacctctgtttagattcattgtactagaaaacgttacatctcattttaaattggttttttatgggatggagggagtagatgtgatcatgtcacaatatacagttatttacataggttcgcagtcaatgattgctgattagactattagtcgtgcaattaattattagttactcgaatgtgctcgtgcagtagcaggatttggatggtgtagggtaggatttgccagctgatctacaagctacttgcatgtaaactttcatgtagttcatacagggaacgcatttatatatattcccgtaaaaacaactccttcatgtgatgctaattaaatctatgcatcttcgaactaataataataataataataataataataataataataataataataataataataataatgatgatgatgtgcacgacttgtttgtttgatcatacatttcttgctcaacttgcagtgaggttttgattttgctggtaattagctacgcctagtcacaaaaggcaataatgtggctataggcatatttataagtttcagatttggcacactaaattttttttgacgcaagaaggtagagcatgccctaccttatagtcatttcattaagagaaatgaggtttataggttacaagttatgagtgtagcagagggggtagagggagcagaaaaaagggaaaacaggaaaaacaaaatagacaaaacaaaagagaagaatagaaaacagggggctggatttacaggggtatatacaaagcagtgtcacaaagacagccctgcacaccaggagaattggtacacttaattgatgtgtggatggctttcaaaagtgctttcacaaaataatatgtcaatatttaatatattttatgaatagagcattaaggttgtattgggaccatgctgacatgcatccaaaatgtcactataaccagagagagtatttaatacataatttattgataaattaattttggagccaaacaagggagattaaactccctctgttcttaaaataataaatgttttcaaaagtgtgatcaattttgtaaaagaaggttaatttgttgtatgaacacggaatcacttgttttgcgggacatactttttctttttttggggggtttatattggtgtattagagaacatgtcgatatctcattttttttcttaagaaacacagtataaatgcaagcgcccacaacgcacgtacagtcaccctatgaacgcacatttcttgagattgacgaaggcagagcacctcagaaagactgggccgacatttcttgagattgacgaagtcaccacatatgccttgttgttgatgggtacatcgcctaccactgaaagaataataagccgttgcgaacaccgtgtcaaatctagtttttgaacttgggtgggctggttccaccacaaagaacctaaccagttgagctactctcacttcacgatatctaatattacaagttaatctttgaattggaagcaaatttggtcaaatatatcccaactgatactcttaaattaataatattactcgaaatcaaaagctatagatataattgttgaatttccctggtttagtgaaattctatgccttgttttctctttgatcgtgtttttgaggaaatcatgacgcctattgtacttccaataccacatatatataggagtggattctaaactctcgaggggattatcccttgttatttgcatatcattcaaatgattatgaaaaaaatcaactagatagattaatatgtgatagatcactccacaaacatacaaattaaaattcaacttttacaagttgcaacaaaaaaacaaactaaactatggctagttaacgtgtattcatagtcaaatttattttttacgttacaacttatagaaattaaatttgatcttgcatgattgtggagtgatttaccatataataatctatcttgttaatttttttaatttttttcataaccatttagatggcgtgcaaataacgaggggtgtctccttgagagtttagaatatatgtatgtatgtctgtttgtttcacagtcgaaacccacagatccaaacactttatatatgcagagcgtgccatgcaatatttcattaggaaattaatattacctacattaaggtgctaagctgtttatacatgggaaatatatgtctagtgccattgtgcaaacatatactctatcatgggtgctaattaatttgcttactcgtcacatgagccgttggatgagattttggaacatatatatagtgcatgatgtatgcaacgctgcaatcatcctgcatcacggtcttgagataacaggcaaaatacttttgtagaaaacgatgaatactgctgcgccaggtagggcacacgctgctactgcctgcagctgcatgcatgagatcttaattggttgttgttttggaatgaatgttttgcatgttgtacagtgcgcagtgtgttttttttttccccactgtttgcctttggttttcctgtgctaactgtgttcgccctctttctcaggaaagggatcacacacatggcatccttctaaatcttcctaggcccgagctggagagggattgatggcagctcttggctcctcttgcttcccttttattaaaaggacatgcctctctccactgtccatgatcatcccctgggcccttgtaaattgcccctccaacagcagatcctccggcccctaggcagccacactactctcctctccacatctctatcttccttatatgcaatatccctgatacagttgtttgtactgcctgaagctacaccaatataattcccagatctcctcagctaagctatagcttctctcccatctctttcctcctcctcctctctgatatgtctactatctacatgagccagctacctgctactctccctctaatggagggggatcaggatcaggggctctacccagccttccatagagcaaaggaccctcctatcttgttccctttcatgatcgacagcgccgtcgagcaccaagggcaaatctatggagatcagggcttgaggaggcagcaggttttgggtgaatccaatcaacaggtgaggggatcgatcacatacatgtgtagaacaagctagctacttatacacatgtagatcagtgcttctttcttagtatatatgctgcttgccctaataattttagcttatactcctcttctttttctcttttttttgctcttgcagttcaatgatcacatgatgatgggcggatcagatgtcttcctcacaccgtctccgttccgaccaaccatccaaagcatcggcagcgacatgatccagcgatcatcttatgatccatacgatatcgagagtaacaacaagcagcatgccaatggatcaaccagcaagtggatgtcgacgccgccaatgaagatgaggatcataaggaagggggcggcaaccgatcctgagggcggggcggtgagaaagccaaggagaagagcacaagcgcaccaggatgagagccagcaacaactgcagcaagctttgggtgtcgttagagtgtgctcggactgcaacaccaccaagacccccttgtggagaagtggtccttgtggccccaaggtgagatttacttgctcttacacccctattaacaactgcccaaactcatgtgttgatctgtctgtctgggtgctatatgctaccttactatgtgcattttctctttgttttgttacaccagatcatcatgcatatgttaaagattgttgatttccttggtttaaattgtgtgttgtgctatgcatatggtgcagtccctttgcaacgcgtgtggcatcaggcaaaggaaggcgcggcgggcgatggccgctgctgccaacggcggagcggcggtggcgccggcaaagagcgtggccgcggcgccggtgaacaataagccggcggcgaagaaggagaagagggcggcggacgtcgaccggtcgctgccgttcaagaaacggtgcaagatggtcgatcacgttgctgctgccgtcgctgccaccaagcccacggctgctggagaagtagtggccgccgctccgaaggaccaagatcacgtcatcgtcgtcggtggcgagaacgccgccgccacctccatgccggcacagaacccgatatccaaggcggcggcgaccgccgctgccgccgccgcctctccggcgttcttccacggcctccctcgcgacgagatcaccgacgccgccatgctgctcatgaccctatcctgtggcctcgtccacagctagctagctagctgatcaaaactagctagctactagtaccgttaatttgatgagggcaacaaccagagtactatgtaccactactagcaatattttgtgtgtgccttgtgatcttttgttgttttgtgttgttgaggagatcactagatcaggatgaaggagagatagtgatcacatgtctaaggacgaaataaacgagaacaaactcgctagctagctactagccgggatcaggattatatttactatcagctgagtgattagcttgaggtttttttttattaccccctactgctgctaattaatcaagccacttttgtatcatgtttcttagttctttcttcttgtatctgttatgtttggagctaataataatatggagattggagagaatcggatgtagtgaaactagcagatcgtactgtaggtgtacttctactattcattgggtgtcgttcatggatgcatgacttgttcttgctgttacatatgtcagctagcttatgtatatatatgatctctgtcagttgtcaaaagctggccttctcactttttttgggagacaaacattctctctatcgtgtcagctatatatgcatgcatgtgtgtggcagtgaggctagtccgtagtgaaccctttgattttggaaatgtgtgtcctatatatactatagtacatacaaacttttgctacaattacagtacgtccatacatagatgtctgatggacaatatacaataccagctaccatattagctgtaggtacgtgttatttacatcaatgtattcaaacaatatcgttagataacaataagttaatccagaaagtagcaattgcttgtgtgttccgtttctaattaaccaacatgacgaacagatgtgtaacgttttcagtaaaaaagacatgccttaaaatatctatatattactagtaaacaacaatgaaacaaattaaacatatatccgctcggatgcaaaaaaagaaaaaagaagtgaaaaagatgatgaaacaaattaaacatatatccgctcggatgcaaaaaagaaaaaagaagtgaaaaagattggtagctagggaaaatacaaaaaagtcatgtatcaggccgtatgcagttatggttttttttataagaatgcaagaatgttcaaattgtttggagtttacacaagaaaaacacaagaaattaaaggcacaaagaaatattatatatgcacatgcaagtgagcaatgtaggattttagtgaaatcatgtgtgacggctgctagttcccgtctctttaaatgtatgttaaaaggcagatttgagggtatatgtggtgttgcgtgtgtaattgtgtatgggtgtctacgtctgcgtgtataagaataaaaagatacatacaacacaaaacgaatataattttgtaagacaaaaggtagagctagctcatgcaccctgaatggctgaagaagaattaatcctatttttctttacttaactgcatgcataaacaattcattaattactttcatgcacaagcttagcctagctaatataccgtaccgaactgctacccatatatgtaggagtaccgtaccttgcgtgcccggatcagtaaaagctaaaagcagccctaagtaaaagttactccatccgtttcacaatataagtcaatttaacattttttacgttcatactgatattaatgaatctagacatatatatttatctagatttattaataccaatatgaatgtgggaaatgctagaatgacctatattgtgaaacggaggaagtaatagtctctgtttcaaaatatagcaactaaaactggttaaaatttattttagtcaaaatttgttgaactgtacacaatatatttcattcagttttatattgttatgttttgagacgagaatagtagcatgcatgacagctcatgcagcagaagggacagtataggagtcggacactgccggcaaagtgccaggagtatcctgcaacatgcacacatgtacgtacgatactgtaaactgcacgcatgataatacgatattttgtttgttttttttttgtctgttacggagtacaacaatatcgtattaaccgtatcgagcttagtacagtaccagttctgtgaaataacagcactagttattgtataatttttgccattttattatgatgtgtgtaattgatttttattttctaggtgtttcacatgcacggactacatgaaacctcacatgcattgttgcggaagttctatatgataataagtagaaataatatttaagatagctaaacggcataagcttatataagttaacgtggtttacgagaatttaactagcatgatgatccaaatataaaaaataagatggtgtgtctttatgagagagaaaaagattcggaccatagattaattatttaaaggccaaaaataattaaggtgatatggcttgatgagataagaaagaaataacattaattaagtgatgatgaactatataggtatgatattgtaaaaaaaatgatgaagatatatattgaaatcactactacataaacacaaatagatgctggttggaaaccccacataggtgtcggttggagaaggcgacactgctgagagaaatcaaaggggccagttctagaaccggcacctttgaggtctcaagaatccaaaaagaaagtggctcgtgcatcaactcgaatcgagctgatgcatcgagcatctccccttcaccccgaccagatcaaagaacacatgaacatcaacaacatccaagaacacatcaatatgaacatcaagaacaagacgctgaagcttcgatggactactgcctgacgaggatacacatagggccgacgtcctactccacccttgccacggttgccggatgaagaggagaagaggaggaggggcgagcctccttctctcctcccgttgtagccgtcgccgcctcccctcccgccatcgaaggccgccaccgtctctcctcccgctggatctagcggaggagagggcgcggtcgtcgccaccccctcccatcggatctagcagaggggagggtgcgaccgccacctccgctaggctgccgcccgccgccacatgagacacagagagagagagagagagaagtatgggagagaaagagaccgaggcaggtgtgggcgagtggataaggtcaggtactcggtttgcctgtttggctaggtttggtataggtgtcgttttttcatataatatattatatttaaggtacagtgtttttaaaagaactggcacatactccctccatactcgtaaaggaagtcgtttagtacaatgtttaagtcaaaccttgggaatataaatcataaataactctcaaagttattgagtttgaaaaggtaaaaattatatgaatatatttgtcttgaaaaatactttcataaaagtatacatatatcacttttaaataaatatttttatagaaacaagaagttaaagttgtgttttgaagaccgcgtcgctgtcctaaatgacttcctttacgagtacggagggagtataaatgttgtcagcccgcgaaggtggaaaaagcactataggtgtcggttttagatgtttcgtgtgacttgtatatgcctttctgtagtagtgaatattatctgaatataggtatgtgatattgtaaacaatgctgaagatatatattgaaatattatgtgaattatgtgggatgatgatttaaatatatgcttgtattttaaagctctaaaatttaataaattatataaataatatagcatgcttccatgaggtttaaaatgtaataattattagtgaatgatgatgtgatatatgtgcgtgttgagttataggatatagtgttttgtaactgttttgtaactttatagatagataggattatacgtgttttggcaagactaattaagagaggttttgctatatcaaattttggtccaattcgtctcatttgaccataatcgaagtccaacctcgcaccaaatagattagtaactgtatacaatatgtattgcaaactttaattaaataggcatatataagaagtacgtttaaatcctagacttgataagggtgtttatttttacggctaattattttttcagtgatatatgacataattatggacagcgagatatcagtgatgactttgacaatctcaatatatgtcagctcagtttttcgtaggtgctcatagaaatattgcatacgtgtgtgtttatagaggggtgagtgtgcgtgtgttgtgtaagcgtttatgtttataccgtgtttctcgaaacaaaaaattaatcttaaactaatctaattaattaagggaagaattaatttctccaacaaaaaccagtaccccaccttctcttcgtggctttacggtagtgtaaaaaaacaaaagaaaagatcttttggtggttcacggacgagtgcgctgcccaccagccacgcagcgcagcatccaatgcaggccactctagcgaaactgcaaaagtttaccacacaacaaattaaaagggtccttttaactctggacaatctgtaaacaggtagtggattttttttttagaattacacagtacaacgcagacactcacaacacacgcgcattcaccccctaataaagcaaattctggagagattgacgaagtcaccacatgcgccttgctgtcgacgggtacgtcgtctaccactgaaagcacaacgccgttaaatcctgaaaaatttgctcccatggggagtcaaacctaggacctcaggtgctactgagtctcttgtaaccactaggctacaggccctttcgcaagatttgacatcatggattagtactacccaaatacctacccaatgcatgctaaaccaacctatgttaattttggcaacacaaataatgatactaaaaaaattattcacaggaagaaatgatatcggaagtaccaacaaaaagctaagataagatgagagatgcgatgtggcgaagggaaaaagatgagtatgtcattgtgtggtttttcgaccggggccgaggtggcatcttggcagcagcagggccccaaatggctgcagggctgcatgtagcatcttggcatttcatgctaaagccagccggggcccggacaggacactgtagtcgaaaaccaaaccagatgaggtcctctgcagtactactacactatacccgtggtattggcgtattgctcgctgatacataggtcaccacactgatagtaataacgtagagaatcgatattaactaccaacgtatgtataactagtataactagaaaatatatatgtaccatgtaacgattgttgggagattaatagaaatcacatataatgaacagagaagagtcatgtatagtttgtggggtcttgcggtatttgtatattcttagaaaaacataagtgcgcagaaaagattttacattatgttcttctcttcctaaatcttagatctaggccaaatagaccacatggtaaattagccggtgctggtggcctaatccgagcatcatacactactagaaaaactattttttctaggtggtcaaaaatggtctatggtgccaaaaattctcgccccccgtcccccattcacctatgatgccaaaaaacatacccgccaaggaaagaaaaaaaggatctcatctacggaaatcgttttcatagtagtgatataggatttgaaaacaaacgacacaatttgtagccaatccaatccgaaaattatttaatgcatcttataagatagtaattgggtgatacattgtgctttactatgaaatgaatgaatatatatgctaaatattatagaaatagtaaatgttaaaatattgtgaaaaataatgtaagaaagatgatttaacatacttatatatgttcaactatataatatgatattttaaatgtgtcatgcctgcatgtgaattaagatgctttgtatagtaattgctagtagataatgatgcggtatatttacatgttgcgctttaccttctaataattggtacaatggataccatctatatagaagttacatatataggtatagtaattagcaaaagatcgtgttgagctacaatgccaatttaccattttatcacacttaaccttccatagcatttttcggcttctttaatttacgctgaacaatattttccttctctatgtttccttttttactctttatacaaatatgtttatttttttagaaccataacaatataacctgtgaaaaatacttctaatttctctatgaaagtttccattcagttataaatcctgatttttgaatcaatcccaattgcttctaacctatgcaaatagtgataaaaaatttcaagaaaaatctaaggcatgaggtatatataatgctccctatcatatctcatatattttcaatttaaaatatgccatatgtaaaaagagacaaatatacaaatatcatgagggagtaaagtgagatcatttttaatagcttagtggacaaaaagatttgaggttaagtggtctaccaactagacgagactaaatggttatgaatgattaccatcgatcattcgaacatggctagtacgtagtagggaccttacctgatactgtacaagccaggggtacgccatgagcatgtcagaaacttgtgtatccatgcatttggacattttattttgtaccttttgatgccttcatcccacatggcaatatcattataccaccctttatttctctataagaactgagaagtaccactagctagtacatataccctcctctcctaaatataaatatttttagcagcccatcgcttggcgtacagctgattataagtcataacgcttattaacaataagaaaataacttatgagtaaaccttttagacatattgttcttagcgacttaaaacgtcgtgaaaaccaatgctggtaaacaaattgcaactaaaaccattaaatcaactataaattaaaattaagttttaaattttaaatactttatattatatatataatttaaatcctataaatgcttatctactaaaaagcagagtgtccatcctctcctctccacgttgtgcacacgtcgcgtgaagtgtaaccactgcctccccataaaaacaaaattaagaaattaagattggttaataaaataaattggatgatccaatggtttaaacttgatccacagtcctggcctattctgggtcagatgggcccattgcaatgtacagaatattggattgttttcatatggaaaagaaactactcaccggttagaaaaggagagtagtttcctttggagggtgctaaatattggatatgttttcatatagatagatgttgttttaaatagatttttggctaaatcttgaaattatactcactaatataaaaaagaataaatgcggaaataacattagtatatatctatcacaaaaatactctcttgcagctatttttaataatttgattattttacaagtgatttaaaaaaatctaatgataaaacatgtacatttcttattatgacggccctttaaactacaagtaaaatagagttaatattattttcttagagaggaaattttttacgaggttttaaaagaggatattgtatactaccacatactttaagtgcaatgcagatgtatcaattatttttgtgatatacagtacacataatcttcttttaagatatataattacacgtactacacataagctagcagctcagccggaagttcctcccattgataaggtaacacagtctcatgttagttttcatttttttttcatcttttagtgtgaatataccgtgatatttacaagaaagacagtaaagtttggagggatgcggctaatgtttggttcgtttgattctttggttaatggatgtgggattttggtgcgatgagaatgacgattgagggaaccctccttaatataaggggctgagagttgaaagacaattccttctttgcattatccaaataaatttcaaccgtatatttctttttccttgagatcttatctctatttaatctctctaccaattcccaccacttctatatgtcaacaaaataccgggacttgaaaaaaaaatcaaatattcatcctaatcttactattagttcgcttatctaacaacaaaatggcggtgtatatccacatgtggatatagagccagatttttatccattataaaaaaaagactcccagtactcatctcttttttctgattaagatatatattttatcttgatttctattagcatgttttttataatgctaacggtacatatcgtatgaaatttttctataaaagttgctttaaaataatagataaatctatttcttaagtttttaataatcaaaacttaattaatcatgtactaattttttctatcaactttttctatcgtttatcttcagtagaaacaaatgccaccttagagagttgccaagcatgtcgctcctctgacgtaaagtcagagggatgtgggtcactgacgtgtagtctctctgactttacgtcacaggagactcatccatttacctgccgtcgctcaactttacgtcgagtgtgtatggccttcctaatccccaaaaccagaaatcttcacccctcaaatgtttaaaaccgtgcaatcaacgtcctatgatagtatatatgagtggtttcactgacgtggcatcctcagcaatctgggcccacgtgtaagtgagaaaaaatgtgggacccgcataccttctttccaccatttacttctttttttaaaattttcttcttcttctatgttcctttttctcttcttttgttttctctttgcacggaagcgggcggcggagtggagcgaagcggcggcggcgacggtgggagaagaggggaggaggccagccagagaagaggggggaagaggctggcgggagagggggggaggttgcgggctgtgccggcgggagaggaggaagatgcgactgccgctctcgcccgccgccgccgcctctcacggagcttatccttttgcacgtcgtcaccgtggtagattcccaacagcagcggctgaagaaggaaagagaataaaagaaaagagaaaagagaaggaaaaatgaagatgtggaccctacatttttttctcacttacatgtgggtcccatatacttttttttaatcttttcttgctgactaggatgccacatcagtaaaaccaggcatctatactgctataggacctaaattgaactgttttgtattgtttagggacgaagatttctagaactgaggataagtgatgtcaaacaaacacagtgtaaaattgagggacggtatgtgaacttactccctccaaggattgattgttaaggctaggctcaaaagatgggctgaaattaagggccatgtagcccatgtaggattgatatagttgatgccttattaccttattacatctgcctattctagaatgagttgtttaattgtaaaaaagacggcgtaacagaaaatatgagtatatatatatatatatatatatatatatatatatatatatatatatatatatatatatataaaattcctcttacattgacatacagaacctagactcaagttgaaagacgacttcggttcacacgtgaaagtgcttcgaaaggtgtcagcaggtgcgtggagccggagccagcatgttctccagctgggccgagtgttcgcccacttctgagtcttcacctttagagagaaatacgtgtccgccccagcaagaaaacggctgcgcgttattgtactaacgcgtgactctacagcaccacatatgaaaaatgttgtattagtaaaatgcaagaaaggaatttgaaaagccactccaacaccaaatccagttaagctttctttttcaaaagattaaactacacagaatgatttcatgatctttctcaaaagtcaaaactacacggaatgatttcaaacaaccttagtttgttccctttgaatcgtttcattaacgtgtgtgtaacattacaagccttgctaaacaaaaggaaacctaaaaaaaaataacgtggcaactacaacctacagcatcctcctaattgaatcaaccatatccagatttttttttctacatatatcttctaagaacaagttgcaatccctcttctagagttctttgggttttatcagcatttcagcttctcacaagcaacttaacttgcttttcaccctccgttacctcaaaactaaatccctaaacacctaattatctatactcctccttacctcaaaattatcatttgaccgactacatagacaccaccaccattgatgctggtgatgagaaaatcctctgtcctggtgacaatatcctgtgtgggtcatacttcgcctttagatcggcaaccctgctccacttagcaccgaaatggcgttgccacccatcttgtgatgtgtaatatggcagatactgcttgcacccgatgtcctcattatggcagaatgccaacaccgcctcgttctctttctctaggcgttccacatcaccaataactgccgcagaacggagcaaccccacagcgtagaacacatcatcgtcgctggccactgccatcatacagtcatcccacatattcgtattcatgggatacatgaggatgacgccaacagggttggcaccagcgaagacacccttaaacacaccagcatcaaagtcaaggatgcgtgatcgagggacgaagaggtttagccatgggtgcggaacatcccacatgccgatcgatcggagcaccctttcttcctccctcacacgatcaaggaattgcacgtatctcacatcctttgtgaacacgaagccttcctcaaagcttagctgccctagtattgactccaatttctgcaaggaaaccaatacattgatcattaacaaaatatccattatttcctttgaggccatagataacaatagtacttttacatggtatctattgaacacaaatggatcataattgtatacctgatccatagtggtgctggttgactcattgtaatacatggtgccttcgattacgtagatcactcctgacacagacttcgaggcaagtccagcaagcctgccaatatcgctgctagagaagaagggcgtcgacttgggaccctcggtgagtgtccggttgagctggacttgtccttcgacgtagtcgaagccggcttcgctagcccgttttgatataagcagctcctggtctttagtgaacgtggccacatccgagtaggcgagccggacccatcgcacccgcttcggagccggcatgagcccaatgcgagcccgggttatgatcccaaactggcccagcccacccagcaccgcgaagaacaggtccgagtccttgtcccttgagcacgtcaccatatcacccgttcctgcattaatcattgttaacagtgttcattagccgcttaatcatttgattaatgttgttaacaatgttcattagtacaagttaattagattgctaattaaaggggatgatgagttgtattagttagtaaattacctgtgatgacgtcaagctcgagcacgttggcgatctgcgggccgtgccggaacgcctggccgccgatgccggcgttggagagcgtgccggcgacggtgatgcggaggtagtccgtccacacgcgcggcgccaggccgtgttccagtgtcgcgcggaggacgtcggcccacagctgctcgccgccggcgtccacgtacggcgccgcgcccgcggacacgttgacgcggccgcggcgcgacgccagcgcgcgcatgtcgaccacgacgccgcccggggcgagcgactgcccgcgggcagagtggccctgcccgcgcggcgccacggggaacggcgacggcgacgacgccgagaaccggacgagctccgcgatctcggccggcgtggccgggtggagcaccgcctccggcgcggcggccacaatgcggccgaagtccgacgacgccctcgccgtcgagttgcggtcgacgcggagcttcgaggcgacactgagcgcgaagagatcgccgggaagcccaccggagacgacgacggacaggcagctcgccatgatcatgaacgcgatcgaacaccttgcagccatctctccgaaatgcaatcggattagcgaactgaacactgcaactcagatgctttgctgctcagctcaggtgatggactgattagagaaagagatgattagcttgtgtgtgttgtgttgggtcaaaactccatgacatttatataggtagcattttggccttacaaacgttgacaaatgtaggtagtgcacagcattgcattgatttattgctagtattctgatggattgacttctgagagaaaaatgaataatggaggctgaaacattgttagaagaaaacaaaacttgatcagtctcgtcatctcctgatgttttgacttgcagagaattcttaatgattttgccttttaaagaacaaagaaagtaatactatatttctgtcttgcaggctgagacatttataaactatgaacactatgtctaaaaaaattaagattttgaaccattctggtaggttcactactgcttttgtttgctaaagatacaaatttttgtcaacactcactcagcaccacatcataactatctatctcaaattctcaataaaccaaatagtggatcttaacttgaaaacaattttagagcgtgcaaattttagagtaactttacagcaaacacctagcttagccttgtcttgtcttaaatctcagaaccaactggtgttaggagatcactttttccgagctatttgtgaccagtttgttcaaagctttttttcaagatttttcctatggattatttgttctacgcttctaaatatatatttataaaaaaaagcttctttattgtttagatcacttattctaagatatttatgaagtttatttctgaaaatataaatttattgtgttaattaagtaatcaatctttagaaaaaaaaatttcatggccaattagtccgtcaaatttaatgcatgaaatttaaagtaattttacagacttggcctaatgttagcttaccttcataatcaactgagatgcaggacgacttaatctgtcaacaactctcactaacaaatcatatacaaatcatgctatatgcaggtaaacttaaattgactcttactatcttactcggtacatcatatggcttacattcatggtgtcctctctgtttaaccttccgttttgtttatatccggcatatatatataacatagactctgaatttggagtttgatcgtgtgcaatcctatcagaaacttctacagaaagtttcaaacaaatattatactgaagatttgaactaaatagaaaatggctatgtcggcaggtcatttactttagcataaacaagataaacaaggtaatgaaatgaaatactacaaggttgtagtttgggaggatgcgggaatgtagagccatatatataattttcaaccaaatcaaatctgaagatatgtcaactaccggaatagtctccatgggttagtggcgatcatctctgttctttaagaagctgcagcaagcaaagccaaaaaaagaaaacgaaaaaaaacaaagctaaaccttgtggtgtgattttctgtttagccatcatgtcctccattttcaatattgtagctcttccgattttctattcttgtccctttttttccaaagtgtaattaaacgtaaagtcaatgagttacatgtgtgtgcaacactgtggtctatatagtcaattgttggaaataaggatttttttttgggggggtggggggggaggggggcaagtgtttacgagtcccttttcatgatttttccgccttattaattcttactccctccggtttcaaattaattgatatttttggtaggatctcacatatcaagaaatagttagttagggtgcatattcatgttttacccatactaaatacattaggacggcacatctaacaatcacatcctcttaacctagtggttgtggctgcttgtcccgatgcatcaggttaatgtgatgtaggagaggatgcagtgttgtgcaggactcgatgcatcaagtcactaaatgtgatttgcatgcatgcagccatacaagagtaaatcagtctaaaataatcacatgaggctaaaacgtcaagttttttcatccaaagtgtccaagctccaagcgtcaactaatttaaaaccggagggagtaagtattatgtctttgctatcgatgggtgaacaccagtagcagggacccgatgggacccctttgagttaggctaggggaggaagaccttgagctacctcggaacgggaaaagaaataatcaaggagaacttagacaggttcaggccgctcaggggtgtaataccgaactcctgtgtgttgtgtgctatttctttgcctaagttccagttagaattttccaaccctttctcatggtttcagtccctccccttatagaatccaggtggaagcacaatgatcgtaccaaagggatgggttaagggtacatgtcatagactacatctagcttaacctgacaacatcttccttcgggtttcatgctatcccaacttgcccattatgctcattgttgtggtcctctttcgagcagagccgaagggggaaggggcgtgagcacctgccatgtgccctcaattggtacccactagctttagggtgatttaatgagggcgtcgtcatccatagtcagtgccccgtggccccacctatcggtgtccatgtggagtgggcaaaatgtggtgggccagacgacttcacaaagtgaaccgtaccgcctaccagccacatcgttcctcgacggatagatgataaggttcatcatgtcccctgtgctgcatgcatggacaggtagatatttgtaatcttgccccaagagggacgacactcatcgctccaacacattaaatccattagaagcagtttgactcttgagcactttcttgcggcgctaggtagaccgtaggtgcttggggccaaccatgctctagacagcacatcccaagagatcggggatacggccttgatgggtgctcgggggacgacttgctcgggacccccaagaagctagtcttcatcggaccgcactttcaaccgagtccatcagggtgcatgatcatcacgacagaccggtgctaccctttagagctcggggaatggatgtcatggcaccaagctgccccatgtttgcgatgtgaggaaccctagttccaatatcacccatcacctagtttaaactatttcataacaagtttgctagcgtggctatgtagaaacattgtggtgtgatttttgtttggccatcgtgtccttcattatcaatattgtagcgcttccgattttttattcttgtccttgtttttccaaagtgtaaataaacacaaagtcaaaaagttatggatgtgtgcaacacaatgatctatgtagtcatttgttagaaagaaggatatacttttttgttaagtgcttatgggtcccttttgcataatttccatgccttggtctaagtattatgtcctttcttcttgtgatctattttttacatacaaagtggatgccttacattaatctattccaaaatgaacaatttaattgtaaaaaaggatgacttaatggaaaatgtgatcactaaccacaaaattgttatgaattcctccacccatatattatagaatatttttttcatttgcatacataacttatacactcaagttggatatgcaagaaaacatatgaaaatagttatacctaaaataagaacaagaaagtaatttcaaaagccaccccaccaccaaatggtatcatcaccataccaagcaaaagaagtggcggtttcatatttgctttctcaaaaatcaaactgtgcgtactttttataatgttcttgtcattgtattaacatttatgttatttcttcttatgatattattttaacaaagtggacgtattgcatcaaccaattccaaaacgaagcatttcattataaaaaaaggaggtgggtaatagaaaaacatagcaccaaacacaacatttatggaatgtgtccttcattaacatatgggaactataaactcaagttaaatctgcaaccaacatatgaaaaatggatgtatcaaaaatcaaaattagtgcaagaaatgaattcgaaaaatacattccaacaccgaatggcatcatcaccatacaccagagaaaaaaaaacaatttcatatttttttcgaaattcaaactacataaaatgatttcaagcaaccctttatttcctttgtacaaatcttcctatgtttattacatttgcatgccttgctaaacaaaagaaatcctaaaaaaattagtgtggcaaatacaacctagaacaacctcctaataaaattaatgatatacagttaactttcctacatgtatctcctaaaataaagctacaatccttcttccagagttctgaccagtatttcagcttctcgcattcaactcaatttactttcatcctatataacctcaaaattgaatccacaaacacctaaactactcagtcttcacctcaaaactaccatttcacatagccaccaatgccattggtgtcagtgacgagaaaatcctctgccctggtgaaagtatcccatatgggtcatactttacctttagctcggtaaccctgctccatttggccccgaaatggcttcgccacccatcttgtgatgcgtagtgtggtagatattgcttgcacccgatgccctcattatcacagaacgctagaactgcctcattctccctctccaggcgttccacatctccggggacaaccgcagaccggagtagcccaacgacatagaacatgtcatcattaccagacaccgctgtcatacggtcatcccacatgttcctattcatggggtacatgaggatgacaccgacaggattggcaccaacaaaaacacccttgagcacaccggtgtcgaagtcaaggatgcgagactggggcacgaagaggtttagccatggatgtggcacatcccacatgccgatagacctgagtattctttcctcctccctcacacgatcaaggaattgcacgtagctcacatcctttgtgaacacaaagcctttgtcaaaactgagttgttctagtactgacgtcagtttctgcaaggaaataacaaaattaatcattaataaaagattattcaccattccctttgagggggtaaagcacaatagtattttttgtggtggtatatactaattgcaaacggatcataattccctacctgatcaacagaggcagtagttgactcgttgtagtacatggcaccttcaatgaagtatattactcctgacacagactctgacgcaagtcccgcaagcctatcaatgtcgaaacgcgagaagaagggtgttgatttgggaccctctgtgagtgtccgattgagctggacttgtccttcgacataatcaaaccctgcttcactagctcgctttgatatgagcagctcttggtctctggtgaaggtcaccacatccgagtaggcgaggcggacccatcgaacccgctttggggcaggctcaagcccaatccgagcccgggttatgatcccaaactggcccagcccaccgagaaccgcgaagaacaagtccggctccttgtccctagagcatgttaccatgtctccccttcctggattccaattgtcaacaatgttaatagtcgctcaatcatttaattatcagtgttaaaagtgttcatgtgtaattggactatttagttaattacctgtgatgacgtcaagctcgagcacgttggcgatctgcgggccatgccggaacgcctggccgccgatgccggcgttggagagcgtgccggcgacggtgatgcggaggtagtccgtccacacgcgcggcgccaggccgtgttccagcgtcgcgcggaggacgtcggcccacagctgctcaccgccggcgtccacgtacggcgccg

SEQ ID NO: 26613 - DNA, 17656 bp, Oryza sativa
gagcgactgcccgcgggcagagtggccctgcccgcgcggcgccacggggaacggcgacggggacgacgccgagaaccggacgagctccgcgatctcggccggcgtggccgggtggagcaccgcctccggcgcggccgccacgatgcggccgaagtccgacgacgccctcgccgtcgtgtcgcggtcgacgcggagcttcgaggcgacactgtgcgcgaagagatcgccgggaagcccaccggagacgacgacggacaggcagctcgccatgaccatgaacgcgatcgacaccttgcagccatctctccgaaatgcaatcggattagcgaactgaacactgcaactcggacgctttgcagttgatcagttcaggtgatgaaccgagaaagagacgattagagcttgtgtgagttaggtcaaaactccaagacatttatagatggccttagaaacgttgacaaatgtaggtagtgcagagcattgcgttgatttcttgctagtattctgaaataaatgtattgacttctgacagaaaataataataatggtggctgaaacattgttaagaaaaaacaaatcttgatcatcagtctcgtcatctcctggtgttggactcacaaaaaattctaaagagttaattgttcttttaaggccaaaaagtataaaggcccgaagtattatccatttttgcctcgcaggctgagccagaaatatataaactatgaacagaatggctaaaaagcttcagtgcttttgtttactaaagatacaacattttgtcaaccctcagcgccacatcgtagctatacatctcaattaataaaaccaattactgaatcttaacttgaaaactattgtagtgagtgagaattttagagtaattttacaggaaacacttagccttatcttatcaactggcgttaggagactaattaatctgtcaaattcagagagtgaattttagagtaattttgccgaaaacacatggcctaatattagcttaccttactaatcagctgacatatatacaagactaattaatttgtcaacaactctcacaaacaaatcatgatataggcaggtaaacttaaattgactcttaatttcttatactacattataagggttacattcatggtggcctcactgtttgaccttccggttttgtttatgccctgcaagtataggagtaactgatatataaataactctctgaaactctgaatttggagttcatctgcagtcagatctgacgtttatactcaggatttgaagtaaataaaaaatggctaagtcggcaggtcatgtactttagtataaacaagctaatggaatgatatgccacaatgttgtagtttgggagggtgcgtgaatgttgaggcctatatataaatttggaccaaatcaaatctgtagatttgtcaactacatgaaacagtctccatgggttagtggctatcactttagaattctgttctttaaagaaggtgcagcaaaggctaaaaacaaaaattgagttaagctagccatctgctctgctgattcatgcatgtatcaaccagaaactgttagtggatgtacacactacacgtgtacaggggagagaggggagagatagagacaggtatgttcttttttgtgtgtcagagaaattggtgaggtcagagctttttttatttttagattccattcttgttaagtttattaatttgccaataccattcttcttcatttagtgctgtgaagttatatcgatgaaaatgaaactgagagaagtatggtcacattgagtagtactgagttataaaatccgttgtacacgatgagtaattttaccatacttaaaatggtatcagaaggtactacattttagtgtaaaattttaatatctccagatactttcccgagaaccgtaaaatttctctcatgatgaaccttgatgaatgatgagaataagctatgacatctccactacaacaacaaaaagaaatgctaggacatcttattatagtatgtcgcactagtacagaaagcatttttcaaatggttagattctatttttgcgtgaggttgagccgcccgtccgcccgaaagtgtaaacgaaaattgctattttcgcatgcgggtgtttgtgtcatccgcacaaagaaaaccaaaaaaaatcaaaaccctaccaccaagatggcgattgcgatggcgacgtggatccggccgtcccgagggcggcggcggcggacccgaccgtcgcggggccagcggcggtagatccacccgccgctagccgctcctgcttgagcctgccatcgctgagctcccgaggaagccaaggcgactgttgcaggccgagcccgccgccgatcacccaagatagccgagcccgctgccgcccagtgagagggaggagaggaggtgagagagagaagagaggagtctaaggtggagaggaggtgagagagataagaggacaaggatgatgcttgaaaatattttaagtgttgagagggaaaagagaaggtaagttaaccttctaggtggatccttaataggcctgcctacgaaagtaggcttattttcgcatgtggccccttaagaggtgcacctgtgaaaatcaatttttacatgttggccccttaaagagccatatgtgaaaatatcgatcgatttttgcaggtgcaaccagttacggtctgtctacaccctaaaaggagtctcgtccaaaaaattagttctgtattagtgtcggtatcaagtagactaacaaaccacttgtttcggtttttatcgaatatcaaactaaatttgtctaattttacggatttcgctcatctttgctgaggtccacgttttaacaccaaaacgaaacgaaattttgagtcgccctgaataaggcccaggatggcccattgacacacgtatggcattcccaacaatgtgacgggccactaggccaataggtagtacagatcatgtctagaagagcttcagattttatatccacggtagatttaatatctctatattaaattatacttttttaaaatttaaaatttcatctacaataagaacaaattgatttatccactttatgcatgaaattgtagatctagatccataattttttgtgaagttaggaatatccaacccccgcaaaatcttgtatgaggagttgtgccaaactgagcctaagcctcttaatcgacagctgacgtgaccatagtcaggtgatgacgtatgcacaccggccacagccctgtattgctgtatacggactttcatactttggttctccctcgcactcattctgttggccactgtctttaaggatgatactcctataagatgacgagatgattcattcttgacttgtttgttaatttttttttgatttttttttctatatgaagcatgagtagatggagtgatcgattaatcaatcgtatgaacacacaggccacaaaattctgtctgagttcagatcacgcgtcgcgccgtggcgcacggagagccattctggcgagcttttgcagtttgcagtggtggcctttttgagcggcggcaatggagatagggtgggtggtctcgccattcgcgtgcggtgctactttagcctcctaccccggccccactaacaaaagcttgcggcccggccttagctccccactccctccaacgctcatccccacaccaaccactcccatttataaaaatgaaagttggatttagcttaatcctttgctaactaaatactcatcggctatttgtcaaaatcttcagcttacatttaaatttaaatagaacatcagtagcagtactagcctactaggggcggaggcaagcatacgacagctaggcaagcatacgacagctaggatttgaaccccaagcttaccaccaaaatcaagaaggcaagcatattgcagctagggtgtgagcttcaagtttatctctaaaaccaagtttaaatccctttaaataatcctgtatgtaatagtccgtcctctagaaccatgcaaatcaatccacttgatgggtgggtccacttgctacacataccaccccacttaaactttcatatttgtttcatgataaaaggttaaaccataaataatatggttggaggaacaaatccttataagttggttccacaattttttaattagtaatgtgatatcaaacatattgacaccgttctcatgggccacacaaggcacatcctaattgggataagatgtcacaatgtaaattttcgtaaaaaaatatcaaaaactattaatgagccctagctactattttcttcaggtagataatacttattgttttgaacaaggacacaatctccaaaaaataaccttgatcactacttttattacaaaataaatatatggttttattgaagtactttttaccaccaatctatatatatggtctccacattcctaagacaaatatcttatgtgatatttatagtcgaagttttaaaaatttgataatagtcatattcaaaacaaagtattgtttatcctgagggagtagctactaataaaataattttcaacagccatcgctgtacacacactgttcaccttgccctcgctgccccggcaactcacgcactccatcctatccgatccgatccgtccatcacaacatcggacggcccacgttacacctgccatactcgtccagtcttcgcgcgcgccgcgacgacattccgtgggccccaccccccacactcgcgagcaagaacacacacactcgctagtcattcacactgcacgacaagccaccaatcccgccatatatctatatctatctatctagctccactccaatttggactcttgcgcgcaaagtcctcacagttcaccgattttctcctcctcgcacaccgagacaggtcggagaaagaataggcgaaggaaatttccgtcgtcgtcgtcggagaagatgaggagcggcgaggggagcaccgcggcggcggcggcggcggaggaggagaaggtgaaggtggcggcgccgttcaggctggcggagctggggctccgggtgtgcgcggtgccgctcgccgtggcgtcggtgtgggagatggccaccaacaagcaggtggacgagacctacggggaggtcaggttctccgacctctccggcttcaggtaaactcaccgtgtgctccgtcttgcttgactagttatcttcttaattaattacagtactaacactttcctgaaattgaattttactaatcaatcaccttgacatagcctccatcgtttcctccttacagtatcagtggctgccaaaatttatattttcaaaccgaattttaaagttaatttgaaagtttttattaaagtttatgttttactttgacatttaagtcgctaagaacacatatataaaaatctaatatataaattattattattttgctaatacgtcgaatggcgtattatctgcatttggccaaacaataaaggcgttattgggttctttttttattcatgtgctgatatgtatatatatttatttaccgtccctgtgctcctattaatctagttttagataaattataggatgactttgtgcagtttgttcttcagattattagataatcagtattacgatgctaaacttcaatgttttttttccatcaggtatttggtctggatcaacgccatcacggctgcctactcggtggcctccatcctgctgtcatcctgcaggttcatcactcgctttgattggctcattttcctcctggatcaggttttactcctaacctcgcttctccctctttatattcatctcatcagaaaacttctatattgtttctttaaaagaaaatctgaaaatgaaagaaagaaaaaatgatcaattaaccatatattttgcagcaaaaaaagattcaatcatatatagagtaagtattataatatacataagtacatacaagggaagtgtttagtactaatacttgctaggataagattataattaataagttggtcaaggctaaactgtacatcaataattagtactggaaggaagctagattcttattatgggcacaggataaaccgatagagaaacctaaaaggaatataatattggcaataaacatgccattctatcttgaactacttgattcagattttagacgcatatttcatcacagagcatattgaagggaaaaaaacactcttcttgagcttaacatgataccaattcactatccttatgtacaaatgtagcagcagcagcatgcaacctagtatatcctagtactaatataaatccagtttcatcaggagattattgttttttttaattttaagaaaacaagtcatcaatgatagtatatatcaacatatcatctgtttaatagaaccaacatctatgcatcgtagatatagcaattcagtttatcagatatgatcgtaaaggtaaggtgtccgttcgtacgttcatagtgatgggtttgcgcgttgtgagcggtctatgattgcgttgtgtttcttcttttaaggaaaaaagcatcgatgtataatcacatgagattcggagacatccttaactgtggatcaaattaaacaagggagtatgtaaaaaattgccgtatgttttttaagtgaaaaactttcaaatataattatagcataattgaagtgtaattaaactacactttaactgcattgtaacaaccatataatttatataaaacatgtattcaattatgatttggttggctagcaacatatacgtgatccgtgtgaaaatttctttcttgcattttttttcatgcacaaatattaaggcaatccgatgatcacaaatctaaaagtttttggagacaaaatacaaatactagcggaaattttccagcaattcagttaaacaatggcaacacataaaaaacactgaccgaatcttgatccggcggtggccgttgccggagcaggcgtcggcgtacctgctgctgacgtcggcgtcggcggcggcggaggtggtgtacctggcgcgggagggcgaccgggaggtgtcgtggggggaggtgtgctcctacttcggccgcttctgcggcgccgccaccgtgtccgtggcgctcaacgccgccgccctcctctgcttcatggcgctctccctcatctccgccttcagggtcttcaccaagttcaacccaccatctcaatccaactccaagcagcagctgtcgcaggagcaaggcaagcctgtagtttcaggctagttagtggctctcccaagtctgaactttcagttagatggtacttttactgtgttcagctgtttacggtgtgttcaggtcttgctttgtgtagatgtcactacactctaatgcgtgttgtctgaaaagaaaaaatggttgtgtagatgtaacctgtataagtgctcaaaataccatgaactagaattactatacatttacaattttatttagatgtactgtatgtatgtatacttgaagctgatcttcagagttcagactcggggtcgatactgaagtgtgaaaaaactgaactactattctctttcagaaagacagttgttttgtttggagatgttacagcttttacagggactgaagagtcaggatttcagacaggtatgtggtctactgtatatcgaactgtggccatgtgactaagcaagtacagtaactgacatgcaatagacagtcagatggcatccaagagaagagacaattgcaagatgacgaccctgacaaaacctgactagcttcaagattgacacgcagcatgcttggtttttgtcccctgaacaaaccaatccatgatccatacatctactagtagtagcaggttaattcagtcagtgacgaacaccgacaaattcccatcataataaaccaaccaaatcacactgaaattttagatcacaatctggccatgaatcttaactactactccaaatctacaacagtacaaacaataacccaaatctagcatgttctactaccatacaacttgcattgatcacaactcacaagaagagaaagcaaattctgaagctgaattgaagcagagggcattgcattacaaggggggggaagtctgctgctgctgctaccacttgtagcggcggaagagggcctcggcctgggcgttcttgtaggcgctgcagccgacgaggtagaggaagacgagggcgacggtggcgacgacgagggcgacgttggcgcggtgccactgggcgcggagcgccgcgaggaggcccgcgcggcacgactcgcactcgtagcacagctgcgacgggtcgttcccccacgccccgcagtccgcgtccgccgccggccgcgccgccggccccgcccacaccgtcgggctcacgtagttgtacccgcacaccgccggcggcttgcaacacccggactgcatatataacacacacacaggagattatttttttttctcattttcagatgatgaacagttattcatagctgatgagttgatattacacctctagtattgtctaattagattggacggtaaagatttctcattttatctcctttctatgaatgggataaaactgaaatataataatttataagcaccagaaagtttgattttagtctgattaagaataaattgagaatagcacgcttaatttaattttaaaaaagaatttgaatgttctttctttttcgaagttaagtacctccattttatgttataacacaaaagacatatgaagtttttttcttaaaaaaaataacaacatcgacaatagttttgttaacgtctattaaaaatattgctagtttttataagcttagttaaagttaaagaggtttgacttcgaaacggtttataatataaaacagagtagtttgcttgcaccaacaaagttaagccaaaacttatttttatttttattggagatgaaaaaaatataatcatttgtcggtgtggtatctatttcttggtacaggtagatctgtgagattttttgtttttggcttttacaccacatgaagcaccaaggatggatggtgccaaggcaggcagatccagagatacttcttcctagacagacgcatgagcctcgaggctaatcatcagtactaaaatgttcagtcacagacagacaaactctgcgcggatgaggacgcagagagatgataactcttaaaaactctaagccccatacgttggcaacacaaaatcagtaatgaactctaaaatcaacaagaccaaaattaatcacactcccccatgcaccgcccacgaactcctgtctccaatcttgtctgtaataagaaaaccttatgtacatactgaattatctcctttctctttttctctgggaaaaaggaaaactgaaaatgacctgtctctataatctttgtagctaacaaaagcatggagaatttttgttaagcaaagcacatccgaccaggaaatcgccccattacgcaattatattccccgtccatgtcattgcctgatttgtacccaaaaaaagcttaattacatggacctacacatggattcccctttagagcacttgcatttgtacactgtcaaaagagggatggcccaccgctcagtgacagcgagcagtgctgataattcagtcattcttttttttatatatgtgtcctactgagatataaagttgccatctgattcttctcttccagtagcatctcctatctctagatgctcagagaagctgatccttggaaagggaaaaaaaaaagaaaagttctacgctttgtttcagctagaagtcatagctgctcatgtgctcatggacggtcagggtaattttaacacttctgtttctaaataaaagtcgtcttaaaatgcaaggagttcaagtattgactatgttttatgcagtaaaacaggagtaagtgatatatagaaaagaggttaaaaggatttaattaactaagcttatagctttatcttcaaaaatcaaccgctagtaagtttatagtggtaacactaggatttttagataatgaaatcttattgaactcagttaaaatattctgaagatggtaagacaagtttaactagtcgatgagatgattaagattaacagtagctaataacagaatgagattaaagaacaaaatgagattaaagaaaaaaaaaactatacctggagtggcgagaggcgcgactggtagaactggtcggcggtgaggaacccggcctggcgcgccagcttcttgcaggtgtcggagacgacgaggcacgccttgatccgctcccaccgcgccgggtcgtcggagacgtagccccggagccacatggagaagccatcgaggtggtactcgtcgtaggcgcggccgagcaccgggtaggcgccggagccgcgggtgacggcgaaggcgaagacgaggagcgcgatgagcagcgcgatgagcgacgccatggcgaagaggtagaacgcgaggaggcggcggcggttccagtaggcgccgacgaagccggcgagggcggcaaggaggatgaggccccccaggatggccaccggccaccgcgccaggcgggcgcactcctccccctgcgccgacgcgaaccacacgcccgaggcgatcaccgggacggcgcagatcagcgccatcagcgtcacgcacgccgtgatgttgttgctcaccgccatggcggccgacgcagctggagctcgagctcgctctgctgctgctgctgccgcgcgctcgtgtcgtgtcgtgtcgtgcgcgcgtgtgggggtgggtttggcataataaaaggaggagatttggatctttggggggaaaggtggcggggactggcaggtgggcccggggatgtggggcagtggcaggtgtgagcgtgggattggctggacggttgacagcgtggcggctttgctctccgtccccgtcggcgacgatgataaatctgaactctgtgtacttgcttttctgccaggttgaagttttttctcttcttttttttttatcttctctctcagcgaatgagtggaagacacgtggcgcttcgcggtgaagctggccaccttctaggagcatcctgcatggctgcatctgtgtccgccgtcatctgggcaacaattcaacaaagctctgcatcagactgcatgcatggcacggccgtacaagccatggtggaggagaggagtgatgtcagcgtgacaggtacaaagccataatcatagctggcttgagaagaaaaggtgaagagaaggtgtgatccaggcatcatggccaagaatgaggagggtaagaaagagtacaacggcagagtttagttccaaaatttttcttttagactttagaataagtttatttgaggtcccttaacttgttaacgaatccgattttcgtccctcaactggaaaaccagacacaagagtccctcaactatcaaaaccagtgcagattaggtccctcggcggttttgagggtggttttggctgacgtggcgtctatgtggctaatttgacccggtcttcatatgacgtggcattgacgtggcgcttacgtggcaattcgagccggaaaaataataaaatcctcgggacccacatgtcagtctcacatagaaaataattaaaaaaattatgggacccacgtggccccacatgtcagtatcacacataaaataataataaaaaaatagtgggacccacgtgggccccatatgtcaatccaactcaccctcctcttcttcctcctctctccccgagaaaattgacatttagccatcttcagtatggggtttcgccagaatgccactccggattctgacttcgttataatgccatgctcggacggcgccacattgctgctttgccattctcaccaaattcgcatatttccaaatgatttccaccgttgtgtgaccaaattgcccctgtcaccaaattagttgacttgcgtgggagctggatccccatccagtcgtcatcttcctctcgtcttcctctcgacaccgctcccccccaacctagccgccgccacccgccacctacaccaccaccaccactgccgccatagatccagccgttgcagccgtcgccgcggcgtcagatgtagcagttgccccgccctcagatctagccgtcgtcgcgccgccgccattcttatggtgtgaggtcgggacagagacggttgagcatatggactgcacttggcatgagctcctcgccgggtaagttgtgaactttgtcgagctcgtcgatttccaaatggctggaagcattccgtcgcggactgcgcgcggactacggcgatgggggagtaccggcgagggcgagggcgagggcgagggcgatagcgagggcaagggcgacggcaagggcgacagcgacggcgacggcgagggcgagggggacggcggagcagtggggggtagcggcggagagatgtggtggcgctgcgtactctgccaagcgatgcggctggaccagctcgactaaaccgaccggcgagggcatttcggtccaaactaataaggaaaatcatcgaaatcatttggaaatatgcgaatttggtgagaatggcaaagcagcaatgtggcgccgtccgagcatggcattataacgaagctagaatccggattggcattctggcgaaaccccatcctgaagatggctaaatgtcaattttctctctctccccatctccccccttcatctatctctcatctcctcttctctctcccggcgacggagaggcagcggcacgcggtggccggctgccggcgggagaggagggagcggcgcagccaggcgcggcgtgcggaggcggtttggcgcgacggcgcggcaccggcaatgaaggggaggaaggcgaagtgagctccatgggcggcggtgggtttggggaagggctagcggcggcggggaactcggtggtggcggggatggaggtgagatcagcgcggggtggaacgggcaggtcggcgcggcgtcaacagcagcggccgggcgcggcggctcggcagcgcggccaggaggcggcgtagggggggaggaatcggggcggcaccgggcagaggagggaaggaaggggagcttcacggggcggcggtggattgggaaggccggcgcggcggtgtggagaagaggaggccgacggctgtggggatggagaggatggccggcgaaggtggggatggagaggatggaccggcgtggtggggaagggcgacacgaggagaggctgccgcgggcgacgccggcgcagccgtgctcggctgagcatcggccgactccgcgtggcggtgggaatggagaggtgcgccgcccttctccccgccgctccatggcgtgccatcgccttgcgggccgccgaaggcggaggagctcgggcgccgcccggtgacgccgcgtggtgcggcggcggcggccgcgtccattggcgtcagcggcggaagggacgaggccccgcgcggctgcggcccgcgaggcgatggcgccgggcatgctcctccgcccgcgaggcgatgacctgaacgccgcggagggagggggcccgtggcgatggcggtggccggaacagatcgacccgggcgataaaaggggatcggcgacggcggtaggcggaacagggagtcgccgaggatgccgaggtcgacttcgacgtcgtccgcggcggagggcggtcgccactccctctcccgctggccgccgtcggctgcgcacctctccctccattcgtcgccatcaagtccccgcccacggcgctcggccatcgccggcctccctgcgtcctccctccctgcccgcctcgccggtctttgcgcgttgctccctcctctcctgccgccggccgcgcgtcgccgcgcgccgccacgcgccgttgtcttccgtggcgcctggagagagcagagatagggagatgaagagagggagatggggagagaggaggaagaagagcgggtgagttggactgacatgtgggtcccacgatttttttattattttctatgtgagactgacatgtgggtcccatgggtcgaattgccacgtaagcgctacgtcaatgccacatcggacgaagaccgagtcaaattagccatataggcgccacgtcagccaaaaccgctctcaaaaccgccgagggacctaatctgcacgagttttaatagttgaggaacccgttgtgtctggttttccgatcgagggacaaaaatcgaattcagtgtaaagttaagggacctcagatgaacttattccttagactttcagcttttacaccacatcaaaactttcctacacacacaaatttccaacttttccgtcacatcgtttcaatttcaactaaactttcaattttgacgtgaactaaacacaccatcatcaccatctagccgaatgagggtcaatcgtcccaccaataagtttcaactcaattacaaaaactttaaacttaaattttaaaaaaactttcaactcaagatttgaaactttcaactcaaatattaaataaaaatcaagccaacatttaaaactttcaactatttttaaaaacttttaactaaattgttgatgtatattgtttttaaaacaacattaaatattaccattaacactaatcagtgtcattagcagcgagagagaggagcgcacacgagttacgcggctagcacgcgtgccccaattagcagcccccaagtaaacacatacaatctgatttgagaaaattcccgaaacattaatagacctacactagggatctcgtccataacttcccaaataaatacctgaccaatacaaggtgaaaaagaaaccacctaaaaaggaaatcgggaaagagagtgaaaattattcacatgggacttttcgtccttttaacatttcgtcggcccaacgaggcaagcccatcaactagcccccatccacgcgaaggaggcctgcttcgtcacgaccaaaaaagcccaccgacttccttcctcactcctccaccggcgaccagccccggctgcccttcaccctgcgccgccccagtccaccgccgcgttcgccggagcgacgatctcgcgccgccgcctcctcctcctcccctagattcctgacccggccacgccggcggcgctccccctccgccggaggctggcatggcgtccggccgcggcgggatccccgggccctctcgcgccctcctcgtcctcctcctcccggcgttgctgatgctcctggccttctccacctcctcctccgcggcggcgtcgtcgccgggcgcgatgcacaacaacaactgggccgtgctcgtctgcacctcacgcttctggtgagacctcatccccccgcaccgttgtttacttcgtctggccgagagatccagtttggaagcatgcttgtttagttcgcctattaagcgattcgtatttgctaggggtttgtttcaacttccagatgcggattacttcgcgcatttgatattctaacctgttctccagatgctgattacttcgcgcatttgatatctaaccaattttgtaatgttctccaggtttaattatcgacatatggcaaatactctgtctctgtacaggtagcttgattaattatgctcatgcatctgttattccctgtagtatctatagattatagattattccttactagcaaaacattgtttgtttcctccaggacagttaagagattaggaatacccgacgagcggatcatacttatgttggcggatgatatggcttgtaaccctaggaataactatcctgcccaagtgttcaataatgagaaccaccagcttaatctatatggtgacaacgttgaggtgagttccttactctgaaaatatgactcctgaaatatctgaatcctaaacatcacaatgaacaatttacatggtaaaatggccacttttggtgtatctagtcaatgcaatttgttggtaacactttataatgttcattcatgattaccaccttatggttatgttaagaataacatctgatttaatgctagttttacctttggccacctaatggcaggttgattaccgaggttatgaggtgacagttgaaaactttttgagagttttgactggaagacatgaaagtgctgtaccaagatcaaagcgtcttttaagtgatgaaggaagccatattctcttgtatatgacaggacatggtggggatgagtttttgaagttccaagattctgaagaacttcagagccatgatttagcagatgcagtaaagcaaatgaaggagaagcataggtaggatttgtttaccttatgcttttttgtaatatttttctttactcgtatacacagaatcttcttcttcttcttcttttttgccaaaaaaattggcctttgttttgctcctcttcatttcatacttcagtttttcaaactgtctttttctctgacctgcacttcagatttaaagagttgttgataatggtagatacatgccaagctgccactctcttttcacaggtttgtctcagtgtcttggtcattatttcccataacattttacttcaagcacctttacttacaacataagggtttcttttttgtaacttgagataatatttggttgcaccttcattatgtgcctgttcatttgaaagtttactgtcaagtcaataattcatactataaaatttattagctgcttatgtgaaattttctacattatgttttattgcttaagaactacttccactgttcacaaacaaatgtaatttaggtatcgaaatggtctcccagatgcaaatttgactcttagttttccattatgaaataatagtagaagccattaaaattataatataacgaaagtacttttctacatgcatcattcacctatttaattaaatatttaagaaggtattaatactcaagagtattaaaactttgactggatgcatgcccaatacaacaagtacttgtttccggagggagcattagacaataaaaaattccaaagactccatgctgtatttgtgcagagcagttggacgaatgtggactttccagtttccacttactacattttgatacactaatttatcaattgatagtgtttcacatcattttttagaacactaggggaatgctccactggaatatattacaaagtaatagaaataatatggcaagaaaggtttcctagaaacccatacactgtcttacagaaataaaaaaaaaaggtaaagtgaccatctagcaagtattctgtaggtaacagaccaaaactattttccaagcagatatataaataagtaaaagcactaagacctgatatagacaattttgtatgatcaatttagttatttcctttatcatggtcaacatttttctgcatatgaaaactatatctacagctgtacttgacatattaaatatctgcagcttcaatcacctggtgttttaacgattggtagcagcatgaagggtgaaaactcttattctcatcatcttgattcagacgtgagaacatgccttccatttacaattgtctcatatattatttggaactttttttgtcttatcactgggtgatacctgatctatttatttgtggcagattggtgtttctgttgtggataggtttaccttttatacacttgctttctttgagaaactcaacatgtatagcaatgcctcattgaacaggtaaaagactttgta

SEQ ID NO: 26614 - DNA, 830 bp, Oryza sativa
  unsure (1)..(830): unsure at all n locations
cgatgtaggtgatcggctcgatgccagtggttcatcatggtgaatcccctaatgattttggtaaaaatcattaagttaaggtggatacacatcttgtcatatgatcaaatggtttcgcgaaaaatcaataatcagacaacaagatgtgcgaactcgatattttacacgactctctttaccaattctgccccgaattacacttaaaacgactcacagctacgttggcttgccacgcattacttgactgtaaaactctcactcttacgaacttggccgtaacctgccaaccaaagcgagaacaaaacataacatcaaacgaatcgaccgattgttaggtaatcgtcacctccacaaagagcgactcgctgtataccgttggcatgctagctttatctgttcgggcaatacgatgcccattgtacttgttgactggtctgatattcgtgagcaaaaacgacttatggtattgcgagcttcagtcgcactacacggtcgttctgttactctttatgagaaagcgttcccgctttcagagcaatgttcaaagaaagctcatgaccaatttctagccgaccttgcgagcattctaccgagtaacaccacaccgctcattgtcagtgatgctggctttaaagtgccatggtataaatccgttgagaagctgggttggtactggttaagtcgagtaagaggaaaagtacaatatgcagacctaggagcggaaaactggaaacctatcagcaacttacatgatatggcatctagtcactcaaagactttaggctataagagggtgactaanagccaatcaatctcatgccaaaatctag

SEQ ID NO: 26615 - DNA, 4985 bp, Oryza sativa
tgaggactctaccaacaggacgaagattgctgagctcctgaggtaccactccaccaagagtggtgatgagttgaccagcctcaaggactatgtagcccggatgaaagagggccagcgtgatatctattaaatcactggtgagagcaagaaggctgttgagaactcccccttccttgagaagctgaaggactatgaggtcctgtacatggttgatgccattgatgagtacgctgtcggtcagttcatggagtttgagggcaagaagctcatctctgccaccaaaggactgaagcttgatgagaagtttgacaatttgagcatagtgatgaaggaggtgctcgttgacacagtggagagggatgttttttctgaccgtgtggtggactcttcctgctgtccagtcactggcgagtacagctgggttgctaacatggagaggatcatgaaggagaatgccatcatggacgagctacctaacaaatcccaagtgaacaaatgtgccccaaagcaaaaggttgatatccttcctgtgaaggagaatgctatcaggctccaaagcagtgaagagagagaagttaatactaaattttctgttaccggtgagaggattttttttaataaaaaaattacaatatgaagcatgcatcgtctgatcattcgtgttttgctgacataataacctacaggaatctgtggagatggaagatgcctattccgatctatagtacatggtgcttatattaaactaatgatgattccacctgatgataatcttgagaaagatatggctgatgacttaagaaaaaaggtatgcttgtaatgttcagatttacttgcaatgtgaatctatactgtttcttaaatactggaagcaacacagccatttctctgtcaatttatcatttaaaagatctgtttaaatggtgccattgttaggtttgtgatgcgttggagaaggaatgtgctgacaaaccctggttagttctacctgtccttggtttctctgcttctaaatattgaaatattgttgagttatgcattcttatgcttctttatgagacatcaatttgcaggcttgttgaggtgactgccattcctatatcaaagagatgaggaaacctcatgtgtggggaggtgagatagaaatctctatggcgtcacatgttttaaagtgagtactaaccatgatttttgatactttttaaattatccatatttcagatgcagtacatattagttcagtatcctatcctattggaatgcttatgcatgtacattgggcttgatggattcacttttactatgctaggatgcccatcaccgtgttcgtggtggaaaaaactggaggtttgagggtattcaccaaatacggaaaggagtatggacggaatgcaatacaggttctttttgatggtaatggacattatgatgttctgagtttgcggtagtccaggactgcaggacagacatttgttcccccttttttttttcttccccaaatacacttgctgtaaaaatgtaaccggagtttaccaacaattaaaaatgttgttctttccaagcgccaaccttattcgattctcctgtagcattacatatcatgattttgcatgtattatgtatgtttctgtcattacatctgcaaggctgcatgaaagcagcttcaggttgcttaccctgcaaaacttctctgccgcgtgagtcggctagtgcctggtggacacaagtcgacaccgtctctggacaaggctgtggagagagctcacctctttgccggccgccggcctacccacctgagccgccggttgtgctgagtttggttggtgggcagctggttctacgacttccatctggggtggtgtaagagttgtagaaggatacaaaacttccagcttcacccattttttatgtactcattcagttatgttctagtgttcgaccttctgtatctcttaccaagaccgagaccggagccttttttttacttgatattttgaggtataactattaatgacagaagtgcactagagtcttcttaaacataggtccttgaattactgtttatagttgcgaatgtgctgatactttggttcaatttagcttctgggtacatggtggtcgtgattttacaatgggaagttggcgcgtgaactgatgatggtgtcttttgattatgttcgtgtttgcaatgtgatattccagtcctggtaaaatgagccttggtcttcaggccccattttgaaatacaacaattttgtagtaggaatcatatcatatcatatcatatcatatcatattaaatccttagtttttacaacccactactagcagtgatttgatcaacctcagcccaggaaaagatgctacagtactacagtcatcacccagcatgcaccgtccgatgtccacgcgttgatttgatccaaccgtccacgcctcacatgcacatcgctgcgcccggcatagcttccccaatcccctcgatcctcgacatcctctgcgcctcccttcccaaaatactcaaatcttcatcttccccttgcgagtcgcgaagcccgccgccgccaccttcttgcggagctagcggccggggtcgtcgccttcttgcgagccacctgcaagcgccgccaccgttccgcctgattcgcttgctcgaccggccaatttctcaaggtggacgaagggtgcacgcccgctgccatagttgccttcgtccacctcttcgcacggtgttgacaacatgtgcagtctggtaagccaagccctagcctgatctgcttcttatcttcagcaaccttgcttttatcctttgcagcgatcaatttggatgacttattttgtgatgaatctatctgtagttagggtatgggtatggagtagagcagagcaagccaagccctaactcaatctgcttctccatcttcagcatccttgcttctatcctttgcagcgtcaatttggatgacctatcttgtgagtcagttagggtttgggtacaagctatggagtggagcaagtgttcttctagccattgtgctgccgtcaccttccttgggatagtgaggtatgatctccccattattttctatctggattaggccctaatcttgattcaggtttgggctaggcccatccagccagaagtcatacgatttttcaataaaaagaagtcctccgattgttgccgtttggccacttctcactgccaaaacaatattaatgtctggcatcaatatctaatgaatattttatttattttccttgcatatcttcattttaatccaggacagtggttcgtcagctccctgatccccttttatcattatgttgtccaattaatttatttcaccatcctttactctacaattgataatttacatggccattgttctatgcccaagaaatgcatggatgatttcaatgtaaagttgatgaagagtactgtcctatctctaccaaagtttgtcaaatccacttgcttcctgttgtagtgtagtattgcttaaaagctatttttcatatcatcctgccatacacttaaatgcatattctattttccttgcctcaggtatttaactttattttgttttggtacatgtgatcccaatactatatgatgagtagctcagttactactaaaacagatatatgcaacacagtttccctctccttttgtttaaatacctagctacatatttatgtgccatcatcctatctcaaatatatctatacgatttttcaatcatccacaacaacacatgggcatatttcgtttcatttatctttttttattttctaatagtgtacttgcttctttgagtggcttcgtttgctaattcctatgtttttcatatttcaggttcaaggcttccagctacttggcaattgctctttagggtttctctacctgttattgcctggtattatttcagttttttgggtagttccttgggaagtcttatttgttgtccaattgttatatccctatgcatgatcattatttaattagttgttttgataaacgaccttccctactctattttttatcatataaaccagtattcggctaaactgtagcatatatttttgcatgggtcaatatttatatttggcagcatctcactgaccactttcatccattttcgttttcaggcatgggcgcatggcagagaccacaatatgaggcaaacattggaccttagctaacacgataactgaatattgtgatggcattttagtggtttgttgcgtattttatatagctcatgggtttatggcttcctacaggctttcactgatgcttttgtgaccgccagtccgggtaatttcaactttctcatgctattatatactgatgctatattacttagcatgctttagtgtcacaccccgaagttctttcccaagcctaaattgaagttataaatggtctcaagaaaatacctgtgtcaagcaagagtaaaccttaataaattaatgcaaataataatcggaattggcatgtggaatttttcttgagttttacatgccgaaatacgctaacaagatttttagtggaattttcagagctctcgaaataattttaaccaattaaaattgagcacatgcaattttaatcccaggaaaaatcctttttccttctttttcctttttctttcttttcttttctctctttcctttgaatgggccgtcggcccattcctcctttttctccccctcctcccgctgggccggccgaaggctgaggcccagctaagccgcgcgggccggccgcccgcctccctctctccccgggacgccgacaggtgggccccacctgtcggggtcgtcccctttctccggccgcctgaccccacgtcgccaccaccgccgaaaccgccgccgcgcccacgtcccgccccctccgggccacgttggccgccccggtcgtgcgccgcgtctaccgcacccgcttccccctctctcccgctcgcgcccgcgtctga

SEQ ID NO: 26616 - DNA, 16942 bp, Oryza sativa
atccaccccgtccgcccttcctccgtcgagattcgtcgccggaacccgcatcccctcgcgctccggtgagctcatccccttcggccatggatgccggtcgccgtggttcgtctccctccctctaacctctcttttcctcccttagggcattccggacctcgtccgcccgtcgtcgccgtttgcccgtggtcgccgtcgccgttcgccgtcgccgttcgccgtcgtcttcctccgcgccggccacccttggtgaggcgtcctctcccctctattcccctccctctccttcctagccgccgcttagcgccgccgccttcgcgtcgcctttgcgccgccgcctccgccgccggttgccgtcgccagcaacgcgtgcgcgcgcgcgggccgtcgccatcgccgtggccggttggccggccttgagccgaactgagccgggtcgccgccgcccgtccgatcggccccgggcgtggaccaccctcgtggtctcggtccacggtggaccggcagccttgggccgctgacccggggaccccacttgccggcgcccctctcttcccttgagccgctgacatgcgggccccgccgcccccttgatgacgtcagccctgggaattaactgcgcaataaattatttaaggactttttgttatagtaataaacacagtgaatcttctaaaattcataactaattcatccgtgctccgtttaagcccattcaagtctcagtaaatcaaggaaaatgtgtagaatccattaaaaatggttttgttctctgtttcagtagtcttatagcctgtttgcattgtttgctttgtatgtcgcttagattccggttcttccgacgctccggtgtacttcgaaatagtcgccgaggttccttcagcagcagagcaaggcaagtcatgcctgttacttgaacatgttgatcctatattgcaaatgctctattgtttttcttcaaatactgcattgttttataatgttagtatgggatgtttacctattgttacagccatgctattttgataccatgctcctttgttagcttgggttataacatgaatagactttggactaggaattgcttagccatgcttagttcaactaatacacaatggggaaaatcctattaatgtttagactgtaggttctaatggtaatgttggagtagtgacaccgcttcggtgttggttaattaaaataaatcacatggtgggctgtgggtgcatggttttgttggtcgcacccatggcagttaaggaccggttcgcgggatgccctggaagaacttatcgtacttaccacaagccagcgtgggcaacggctgggcttgtagtgtagcttttctctagccgacgcatccaggcaagggtgggcgtgatggagtttggatgggccctgcgacggcctatgcggcttccggattcacctaggcacgagaggggactgcccgctgccttgcgaggagtgggggtgaaacctgaggtgtggtgtgcttggttagagggggttatgcgaagggtcctgtcacggcctctttccggtatgtcgtggtggcatgtcggcgcacggaaacgtgtcgtggggctgtgtcttgtgggtacagttgtacacctctgatcagagtaaaactattcgaatagccgtgcccgcggttatgggcggtcaaccagattcaccgtgattagtctcaccctagtttagtctaatgaaattggatagtttaggtggatggttgggcttgttgcaacgtgggatagcgttggacagcagatgattaatattgattaattattgcgactgtttttttctttaaacttctgtttataaatgctcgctttatgcaaatgaaccactctagctctcctatgataattccctgcatcatacccctattccggtatgacttgctgagtacagtgggtagtactcagtcttgctccattttccccaaccccagagtacgagtatgtgtcagatggtggtttctccgaggagtaggcttcgtccgtgccgtcgaggatgcctgtggagtggtgttcccgctgcagatcaagtcaaggcttagctcctgttatctttcgtttttccgctgcatttatgtaagacttttatgatgtttgtaagacgtggatctgaatgtcaacattgtcgtttgtgtaccccggctggtcctggacggggattttaatacacattctgcttggaattctattcgggaatttctgggcgtgacatttaggaaattagaaactgttttattctgttgaaattatgctttgttgtttgtacagtgtgggatatgcatgctcttcatcaaggttaaaatgtggatgtattttccttttcttattggtggctaaaatagatcgatgctaattaatgacaagctggcgagaatactgaactctcatatctccagaattggctataaaatcactggttctgggtcatggagcagtaaaccttaatttctatttgttattgctaatggccaatttgtatagattgtaaaacatatacaatatgagttgccactgccatatatatgatgtgatgtccgttgtccttccaaattaatcatcgcccaaggattcgtttttcctaggatctgctggtatcgaattaagaatgttgtctactatgtaccgagatccatgtttgttagtgtaagattgctcttaaaaaaacttttggtttgattacatcacttcaaaactgagaacattgttagattatatgccctttttgatattgcgctattactgtggaacagtgttgcatgttatcttgtgatatgcccaattctgatcttgagttattataggttgcctcatatgcccgcgcaatgcgcaggggacacaactgtgatgtgctgtggacatagttttgtttgactatccttccaaattaatcatcgcccactgattggtcttcctgggaactgctactctgctaggtattgaaatactaatgttgtttattttacttttgttgatgtaattgtattatgcaccgagatacccgttgttcgtgtaacattgattatataaaaaatattatggtccaattaaatcactcaaaattgagaacatcgtgatattctctttctgatcgagttattattattattattgttgtgtagctctgttatgtgctatgttgttttcaatcatgcttattttttactattatgatttttttttatgattaagattatcttggatgatgtcggcgcatcgcgcggggggcacggctagttatattgtttaccgggcaaagctacggagagattcttgtggtacgaatttctgtttgcagagaagtgtcataaagatcgcctagtcgtgttacattgaatcgtcaaagccgccccgtgctagtccactcaacatattgtacgcactggtttactgactggttatgtgcatactctacattatctggttgaatttagggaggttatcagttgcctcatgcctagtagcttgcatctcgcatcagtttggtgtgcaaatccttttgtttgttgccatttcattttgaaaagctgactgggattaaggttcatcaaacacgcttgcatgatttggtccccatcagcaggaacgctctgtagcggtattctacagacaacttaacaaaagaggagttatctatcctacgatcctctcaactgagtgttgttatcaaaatctcagctgagtgttgttctatatatcaaaagtcccaaactttaagatatcagccttaacacccatcaacccttatcagaagtgtgagtactttttcataagaaaatcttgccatactactctatttacataacctaaataaccgttttctccttgttctataattccagattctgaatgtcgaggccgccgcactactttggtttatccacagtcctacatccatgcgtaccaccaatccaccatacgtccccttccccttacatctagacatctagtgatgccaatcggtgttttacctcttgcattttcgtactaattaacgaggcttccatggctaaatattattgggtcaaacaggccaagaccagtgcatcctcgaatgcatgttggactcaagacgagcaatcatggaggaagtctaatggcgatacgtaagagaggtaaaaaagaggtaagggtttgttaggttcaaagctaaattttggcctaacaaaattttggtagtactaaaaccttgcaattgttggcgctaccaagtaaaagcaacaagttttcctacacaagaatacggcacatcatcaaaaacgtattgaccgtcggataaaaagtttgaataaacaatggccattagataaaaaagtatatgcatttaaagaaaaacacaaatgagctaaatatatgaaaatttctggaggtttatagtgccacctcttaaactcatgaacaaagaaagagaggggcaattacgatgaaaaaacaggagccttctagtgattcatcatgcctagattcattttcctaagtggtatcaaattctcacatactatgttgtttttctttacggagggagtgtactctagtataatttagctaaatctataattggttagacaatttatacttactagataaatgaacttacgtcaaaaccttcttaaaagctaactaaactaataaattatatatagaagttttttcgtgggatcaaaagtcgagcaaagtgtgactatgtgactagttttaattattataggcaaaaactagtagcatactaaacatttattgatataaaaattagcttcaatccaaacaagctcgtatatagtttcttttttcttttacatgaaaagacatcatcatcaatacaatagtaagctagaccagtacagattaaataggtggaagcagaaagtgctcgaggacagttcgcgttcgcaccatgagcatcttggccctccgtcgacggcgctcataagccacggttactataggagtgatcactacgcagggcacggccccaaccacggcgaacggtccactcatgtagtcgttttcgaggaagaaaaggccagccacgcataagaccagcacgccgacgacgaaccagaacgccacacaagcgacggacagctgggtcgacccgtcgagctgcaggttccaatggatctcggcgatggacgccgcgatcctgtcgacgtcgcgctcgcccagccgcggcgacgccagcagcctcggccgccactccggcggcattgctcccgccgcgaacgcagcgtcgatctcatccttgatgctgctgctcatggtgatcgatgccgctgaactgaattgcagagatgatgaatggatgatgatatctggtgactgcttgtatcgatcagttgtcttctttccttcccttccaggcaaattaaaaactaagtgctgccatatccaattcggaatagttacaactaaaaagaaacgaagtacagttctacgtaccttgaatccgagtccatctctctcttgacggttcgtcgtcggtcgtttgactgacatggatgcatttcgtcggagagtaccacccactggagacaatctttcattcaaagaagtacgtagccgccgtcaactgcatatgctgtggattcactggaatcaggaggtgttgggtgagagtaagcaagcaggagccttactgagctcactgggactatcggcctccggccatggcaagatcgacaaagtccgtccgatgtgcaagcgacggtcgacggagatcgtgagttgaacgacgtcccactgacgtagaatcatctatgtcctttggagtgactattctttttagttctctttgtttacactttaatttactgggagcacactgcacattacgaaatcgttcatacattcatccttgctgatttctgctattacatttagggtcactagtgtagatatgtaatttgatagtgaactttatcagcttcaccatttttatatactctgaataagaattcctttcggcgtctcgacggagctctttttacttgatattttgaggtataactattaatgacaaaaatgcactagagtcttcttaaacatagaccaggtcgttgatgtgactgtttatagttgcgaatgtgctgatactttgtttcaatttagtttctgagtatatggtggtcgtgattttacaatggaaagttggcggtgaactgatgatgctgtcttttgattatgtttgcggttgcgatgtgatattccagtcatgataaaatgtgcctatatcttcaggcctcattatgaaatactccctccattcctaaatatacttttatgtgtatatatatatatatagttttacatatttcacaaaagtttttgaataaaacgaatggtcaaatatgtttaaaaaaatctacggtgtcaaacatttagggaagaagtgagtacaacaattttgcaggaattacattatttatttttgttgcagggaagtgtcatgaagatcggctagtcgtgttctcgtaacattgggcatttgggggtcgtcaaatgccaggtgctagtccatttaacatactgttcgcgctggtttactgactggttatgcgcataatctacattatctggttgaattgtagggaggttagcggttgtctcatgccatgtagcttgcatctcacatcagtctcgtgtgcaaatgtttgggtttgttgaccaaccagaataaagcccggcccagggaactagcgaaaggaaaagttgacgatgactccctgcttgcgttgtcagttggtttggaaaagctgactgagattaaaattcatcaaacacgcttgcattgtttggtccccattgttttttcgaacggccaccctcttacttgaacaggtttggtccccattgttaaactttgccttctttgctgcagcaagaatgctctgttgaggtaacgaggatctattttagaagcttgtggagttacactactgttataaacaacttttataatatctgatccccaaataatctaaattctcatctaatttatgagaataaatagcggtttcttagaatctcttgctaaagcagaaatcacaaccttcttcatctcatctcacagtaagttcatttttagcttcttctatttgtcctaaaataaatccatttttaagtaatcattatatcaaaatttataaaagtactagtataaaataattacattgagaattgataaagtgaaaaacaattacattaagatttatgaaataggggtatttcggtaatactaatcgtttaactcgacacgtccatctcctgcagaacaacatgaatacgtcgaccatatcaccactgcaaacaccgtatcgagatcacctacgacaacgaagcgagacgcgacagggagagcctacccgcacgtttcttcagccatccaaaccgtagctgaaaaaaccagacgcggtaggcgacccggaccagtcagcccagtcggacggaccccctctcgccttgccgcgacgcgaccgagccgacccgaaccgaaaccgaaaaaaaaaaagggcaaacccaacccaacataaaatcgcccacctccacctctcgcattccccttccttccttctcttcctcctcctcctccacccccaaatcgcctcgacgagcggcgcggcggcgagggcaggagagaggcggcggcggcggcggcggcgggggcgagatgagcgactcgttctgcccggactgcaagaagcacacggaggtggcgttcgaccactcggcgggggacacagtgtgcacggagtgcggcctcgtcctggaggcgcactccgtcgacgagacctccgagtggcggacgttcgccaacgagtccagcgacaacgaccccgtccgtgtcggcggcccgaccaacccgctcctcaccgacggcggcctctccaccgtcatcgccaagcccaacggcgcccagggggagttcctctcctcctccctcggcaggtggcagaaccgcggctccaaccccgaccgctccctcatcctcgccttccgcaccatcgccaacatggccgacaggtccctcctctttctccaatcttctccccttccgccaccatcacggcttagttttttacgggctcgattcgatcgagacatgaggatgtgcctgcggcttgcccttgatttatctcgtatgttgaaatgaatcacttgatcgtgcggagcccctgccctgatttgggtttgcgggggagcggatttaggagttgaggagtgtgatggggcttttggagtaatggggatctttcttttgcagctatgcctgccatgtttgtaggtttggaacgtgtgattctcgtgtgaagttctagagcggttcatatatccagtagatttactgatgcatctctggttacgcttgggatctatgtgtggggaaggactcttcgttgatagatttctgaatttgggataatgcgataaatatcatcagattgtaaaaagtgtaaaaggaatttcggggcgtataattaactttgtgcaccaccaaatgctcatctcatgtagttgtattagtattatgtaccttgggagcaatgataaatctactacaaaaggtgtgtagcaccagttgcttgaggcatgtgaggtagccatttagcttcctagcaagctagaactagtgaaatgttactttttggcatgaggcatgtgcaattgcaatagcctcttctactagtggatctataggaagggaaacttcgatgaagaaaaacgatgttaggtttatttggtttgattgaaggagatgcagaaacacgatgatttactgctatggcagtttagatatttttcttatcacaggatttctgcaatactctgacatgatatctctaatctcatctccaggttaggtcttgtggctacaatcaaggtaaacattctgactgttactttccatgatatattgggtgaactacccctattttttcaaagttgcgcttgcttggcagtgtacatacttgatagtataatgcctgcatgcacacaacagacttgaaagtttatataaaattcatcaggctgcttccatgctgcacgattccatgttatgtggcatgacttgtttactctatagtcagcttttggaaatattaaccgctgcttctttggacatatttcatttgctacgaacagtaacacgatgctggttgcttgtagctgtataatgactgtgttgtcttttctttctgaaggaccgagccaatgaaatatataagaaggtggaagatctcaagtctatcaggggaagaaatcaagatgccatattagctgcctgtttgtatattgcttgtagacaagaggatcggcctagaactgtaaaaggtacagtttgttctttgctgaatgcatttatctgaatgcgttctgaatgcatttatctgatgcgttcttgtttgatgtgatggcttattgcagaaatatgttcggtcgctaatggagcaacaaagaaagagataggccgagcaaaggaatttatcgtgaagcaactggaagttgaaatgggtcaatctatggagatgggaaccatccatgctggagatttcctggtctgtagtttgccatgtattctaatgagtccttgtctgaattgattgagtgaactcttgaataaactgataaaacctgcagaggcgtttctgttcaactcttgggatgaacaatcaagctgttaaagcagcccaggaagcagttcagcgttcagaggaacttgatataaggtttgacattttggattcattatgaaccattctgatgatcaatagatcctttgtcatggaagttattttatccgttttagcttcagtgtttatcacctctaaatcactgatgcttagatcaatgcattgactagaggaactaatcagataaacgagttgcaaatacagctatcagcaaatctatattcttaaagcaagtagcatacatatcctgtacagtccatacatacaacctcattatccccatttatgtattgggaaggggcagggctgcaggagagctagtttttgactattagacacaaactttccttattagtcaaattccaagtgtgcatcatgacttattatattcacacctccgtgcaaacctatgctgtgcaggaggagtcctatttccattgcggctgctgtcatttacatgataacccaactctcagatgataagaagcctctgaaaggtttggaacacagacccgttctatgtttaacttgcaactgtttaactcgttaataacaccgtgaaaatgttgcagacatatccttggctactggtgtggcagaaggtaccatcagaaattcatacaaggatctgtatccctatgcttcaaggctcatcccaaacacctatgccaaggaggaagacctgaagaatctgtgcacaccataggaaatttttttcttttcttttttgtcacataacatggaaattagatttgccagagaggagtaatgttgtccttggatgtgagttttactggcccatgtatcactgcacctaattttatgtgcatggacctgttagaacaaagttatctcgaatcgaagctaagttatatgcaaagcttatttaggaatggcaaaatttcatgcattaccttgtgagcaactttttaaattgttgattgataacgaccaaaacctacggaggagcgataagtttcacaaactaaaatgatctgcacgccacatatataaaattttgcaagtggtatcatgttcatgaattgccaggtagtggtgtattcgtatatatttttttatcggaactgcagatcttgtagggaaaaacaaaagggaagtgaatcttgaaagagctttgcagttcatgccatactgccaaggctcgttgcatactgccgaggatcgtgccgcatgatcgatgcatacaagggaaaaaaggagatcccttccctctgcgttggcacttggtagctcctgtgctgaagcagcggagcctttttcttgtcttgtcagccaccaattctccaaatgcagaaatgctgcgaggtgcggaggacgcgctcgttgtgccagccgcccagcggcgcgcgcgcgcggcgatcgaccagctgcgacgcacagagtgcagtggcgcaccacggccgccgtcgagcgcgggcggtgggatttggcaatgccgcccatggcgcgggcgtccacccgtttgacgccgacgcggtcgccgtatctttccttccctcccaacttgctgacttgcaccttgtttagattttgatacatggtgtcgagttgtcgaccggagagggtggagtattgacaaatgttgatgtacagtgatggttcgtttgaaaatatcattcgagactcaaatgaatgaataaaatattgaatggttgataagttctttttagataaaaaaagctttctaagaaataccgataatttttttaccgtgataatatatataatctgtagaaaaagaagggccctaagagcggtcaacagttaacacctctaaaaaaacagttgatacacaccaaacacgcaattgcccccaattcaaacgggtgtcttgtgcctacgcttagaaatcaatcatctaaaacttagctgactggatctggtttttccaccataagtagtttagttactgggttgtttttattgtgtaaatattgaaaactggtattttgttgtgtgaacactgttcaggctttcttgcagggccagtaaggtgtggaggatcaacgatcctacggcaacatcgattattatgctcaacaccacaacattccttgccttccacagatgtcgggtaacaccacatatagcagcaatttttcacgtgttattggtcactcactcactaacaaataataggctctcgtaacgccagccaggtctatgagaaaaaacaacacagtggcatcttgcattattccctcgtgtgccaaaacaagcacggtgattgaacacgaagtatctctatcaagcaatatggtgtggtagccgtctcgctgcctctgggtcatttatttctacagaagggttacatcaggctgcaactttcttggaagtcaccgagttgataatagtggcaaaatccggaccctgcaaaacggaatgttgcgtaatgaaatacaatacacaattacacaatagcgggttcattggtttaagaacacggcaatcaacaggctgtatttcaggatatgatgttaatttatcataccttcaaagaggcaccaccaacaaggaagccgtcaatatcttctttctttgctagctcggcacaattggctgcatttacagaacctgtaccagaacgaatcataaaatcagtgaggcatattgccacatcctagctggcatcaaattaataatggtgcaaatattctctgaagtcacaagccttagcaggtactgataccactagatcgggcttctagatatttaccacaaacaacatatttcaaggaataaccaggctttcaattgcttatataagagaaaaatagaaaaatccattttgttagatgctgttgttaaggacattcataacagagtgtttcataatatatcaatgttcctaaattctgccttccaataatcaatttcatggggtgaagagaggagaaacacagtgaaactcatccaagtgataagaaaccgacctccatatataattcgaatgccggaagcaacctcaggtgacacgttggttttcaaccaatcacgaacagcagcatgaacttcctgagcttgctcaggagtagcaactttcccggttccaatagcccaaacaggctcatatgcaattactacatccgcccagtttgtaatactgtctgaaagcaacatgttgatacatgaatcttgtcttcagatgatgtaggctcatcaaccattattaatttaactcaagatgaagaattgtcacctgcaaaagccttcatctgcttaaaacagacgtcaaaagttttccctgcttctctctcttccaacagctcccctatgcaggcaataacctttacattttgactcaaggcatatgcagccttcttcccaataaactgcatttataaacatggtatgtcacaatcccaatcagaactactgcatgtcaacagcaatcatgcatctcaaaggtgccttcagaatgttacaggctaacagcatggacaagtggacaagtgagagaactaccaatccagtagcatctgtgtatatagcgcttacctgatcatcttcaccaatgacatgtctacgctctgaatgcccaagaataacccattggcagccaatgtccaccaattgctccgcactatagacattttaggtgaaacatataaaaactccagtgtgaaaacaagaaacaaaaaattatctttttgcgcttgcttaaaattcaaagctaccataatcccgtaaaaaacatcgaacagaccgccaccatttatcatcaatttacacatggttctgacgccatgtaatgcattatactaaagaaaagaaaattgcaacatgtttttagctttacctgatctctccagtgtatgctcctccttttccaatccaaacattctgagcagatacctcaatacgatcagttagtgagttcttaacctgatcaatataaatgaatggtggtgcaaccacaacatctgcagtattgccacagcaagttaattgaaggtagaaaaagatagacagtggaagctaaaaagaattccggaggatggatttggatgaaaaagaaggcatgaaagaaccaatcaaatacacacatctaacacagtgtgtatagagaggaagagaatcatgcatagatgaataaaacgtgcttaccaacatcaggttcaagtgtagcagcattcaattcagtcacaagcttgctgacagagtccttcgttccattctaaattgagggacaagaaattatatcatcagaaccaatcatactgatagtaacatatctgaccaaaaagtcgggaaacatgtcttgatatagttagcataagctctcgataaaaagtgaagcaacatataataccgagatgattctccaaaaggaaaaatgagcaactgaatcagctcgtcctaaggatggcctaaagaagatgctactatctttatttttggacaagatactgatgcacactttcttaccctcggaccactagaactaatttattttggacaagatactgatgcacacactttcttatccttggagcactagaaccaatccctgtctacgtaacagtagttgctcgactccatgaaatttgggcaaatgagaaagccagggactgagaagatgaagtctgaaaaaaattatacatttttgcatataagatgcatattccccaagagaactgcttaagccaaaaacgactacatcttgtggcaccaaaagcgactccatatctagcaaacacgaccaggtgtggtgtagatcacgatgtattgatgacgacaaaaaatcccattcattccgctcatctttggaatgtcctaggcggcaaccacaaggcgccaacgactcaagatcacgaaggtgcagcagcagcagaatctccatccatcatcgctctgctcataggtaccccgtgcgtctgcaaaagttgattgatgaggaggagcggatacttacgcacttccagttgcctccaacgaagaactgcaaggacagcagcagcagcagaaagaaagaagcagcaagtcgtcagccacgagcacaaaagggcaacgaagggaagtgtaattaaacgatagcaggaaggaggatggatggcaaccttgccggatccggccatggcgacgacgcgctgggcgcggcggcgggagcacccgaggcggagctgctgcggatgcgccggggcggcggcggcgacgcctgcgcggcggaggtcggcgaggcgggagaggtgggaggacgcgagggacgacggcgccgccattctctctctccaatccaacccaacccaatccaatccccttcgtcgcgcgctgcggttggtgagagcggagctcgcgagctgaggtgaggtgaggtggtgatgatgcgggcagcggcgcagccaccaccaaccgcggaggaagggggaagagaggggagagcgacccgtgcggaggtggagggccacgcggctttgtatggccgcgcgcccacgcgcgccttatcggcccacggatagggcgcccagggccgtggcctccgccacgtcgcctggtatttcctgggccggcccgaccgcgacagcccaagcaacactccacaaggaatgttccagaatctctcttatgctttgtttagttcctggtccaaaatattttttaaagtatacggacacatattaaatcgaacgtagattaataataaaataaattatagattttgtctgtaaactgcaaaacaaatttattaaatctaattaattcattattagcaaatatttactgtagcaccacattgtcaaatcatgatgtaattaggctcaaaagattcttctcgtgatttacatgtaaactgtataattggtttttttccgatcacatttaatgcttatgtatgtgtctaaatatttgatacgacgaaaaaattaaaagttttttaaaaaaatgaatctaaacgcggccttagcttccctcctccgctccactgactgtaaattggaaggttttttaaaaaaatgaatctaaacacgggcttagcttccctcctccgctccactgactgtaggcccatgtaactggggcccacacttcgtgacgtgacgtaacgtgaccactcactctccgtggggaccagcgaggccctcgcagagttgcacacgtacgggtagaggagaaaatgcgcgtatcacatgacactgacaagtggagtctagtgtaatacttcctctatattttaatatatgacgctgttgatattttatccaacgtttgaccattcgtcttatataaaatatttatgtaattatcatttattttattgtgacttgattcgtcattaaatatttttaaaatatgatataaatattttcatatttacaaaaaaatttaaataaaacgaatggttaaacgttggttgaaaaatcaataatgttatatattaaaatatggagagagtacttaccccgacgtgtcagccaaaaatacctttcatcccgtttataaaaaatccgtagttataaaatccaaaaagcaaattaatatcactatctccacttcagtcgttttaatctttttagttctaatcaaatttataaaaaagtaatatttttacaaaaaatataaaaatattaatatccaatttaataaaataaattgatactataaatattacaataattttctataaatttagttaatattttaaaaaatagctttaataaggtcaaaactacttcagaacggagggggtattattgagaagctagaaaaaaaatacagtgttctaaaaaaaaaagaaaaacaaattcagcctttattttcatcggcttctcagactcggtctcgacttcagactagtctgtctgaacgaggtcgagtcggaggagttgcatcgctagcttaacccgaccgctttttaaatcgaaatcccgcagttaaatcagagatttatgcagacaaaagaaaaacacacacacagcaattactattctccaacccaacacgccccccgcaccgccttccgtcctcataaacgcgagtgggtttaaactcgagttgtttttttgttcgttaatcctcgccccctctttctctctaatctccgccaaggcgatggcggattcgaaggggagcggcggcgccgccggcgacaagcccggcgccgacgcgagccccgccacgaatccggccccgccagctgccgccgtggccgtcgccgctgcggccgcggacgccggaggggacgacgacgtggccgcggccgcggaggcg

SEQ ID NO: 26617 - DNA, 1700 bp, Oryza sativa
tccaggagcaggtatatgtgggggagatctcgcggtcgggtgttggtgctagggttccgggacctctcgattgacaatttgacatggttgttgtttggatcggctgcaggagcgggcgtacatgatgcttcgcatgggcggaggcgtcggcgagggcagcgattacgggagctcggatgccgggagctacgagtacgacgacgaggccgaggaggactacgaggaggagctggagcaccacctccgcgtccaccaccacgagcacgccgttggggagggtcgtggcgagggagagcgagatggggagggggctgagggaagcgagttcgaggaggaggggttcgacgaggagtatgatgaggaggaagtcgagccagagctagaccccgcggagtacgaggacgatgaggcttatgcacgagctctgcaggatgccgaggagcgcgaagtagccgcgcgacttatggctctcgcggggatcagcgattgtgagtagaaaaggagtgctgtttcttcagttcatttcacatgtttcagttattgctgtcgataatttcaatttgatattgctttgtagggagacctgtggagcctgtagaggagcatgcgaatgatccacaggtaatggtctatttttcttgttagttggacaaattgtgtttgttctgatatgtgggaatcctagagttggatgaaatgatcttggagtaataacataaatgatgatatagtctccttaattcgttgttgttgcaataaaatttacacctacattatgtatgacaaccgaaatcatatggaatttacacttgaagtgatgaatgtgccttgcaactttccttgtttccacgcactgttgataaacgataagactgcccccaaattcattttttgggtaccttccagcatccaaaatccatcttattttcagttgaacctggaattctttttcttgctcaccttcagtttcatatttgagtgataaactcatgagcatccaaggtttttatgtactttttatcacatttacagatcatgacttctataagaagtgttggttgtttacatcaggtggatttttaatcgtttatactttagtagagcttgtactgtccattagttgagcaatagtaagaccagaggtggtatgtggttcatgctgtggcttgtcaaatttgcatgctgtcctgtttactccatggattttggcatgctatattatctccaatggaagctgcatacttgaacttgggaaaatgtcttttcattttttccttactccattactcattgataatcagcttttatgaactggaaaaacgtcatttaacacgttgatatatttttaccaaaacccaggatgcgtggcaagaggttgacccagatgagtattcttatgaggcaagtttcattgttatatgttagccttctggcacctggcactgcatcagaagctttaagatgcaatattaatggttctctctatatgacttcaggaattagttgcattgggagaagcggttggtacaggacacagaggcctctctgctgctacacttgcttctctaccttcagtaacttacaaggcagaaggtgtccaagatggcaacacagagcagtatgtgtgaataatttgtctcataagtcataaccttactatcttacattaatcacatattaagtcctaatgtatctattgt

SEQ ID NO: 26618 - DNA, 1434 bp, Oryza sativa
attaatgtctatgaagctatcttgttgcgcatacttgtgcttggacagagggctttatttgactgccaggctgcatatgttgctaagttttgtgtcaaagtgtggcaacccaagattgtctccaaatttattcgccacattagtgggaagtcttttttataggaaatgagtctgtcatgtgggtttaagggctaagaaaatgtgatattagttatttttatagtgggccctaaatttactagcaggccatatgttaggttcatggtttatgtctggatagaatttttgttattcttgctgtataggtatagttgttgccttgtacctttgtttcaccttcaggaagaataaaggatcactttggtagacctactaagtactagtgacattcatttttggtacaaaaattaggccattatatttgaaaggtttagcaaatcaccaaacatggaaaactcacgtgcatcagtgcataactagggaaatagttttgttgcatttgaaagttcattcctcttgggtgataatgcagtcttacaaaataaatccaatctgccaaagcattcacgcccttttattagttttggctaaaagatgtttgggtaacactaatagcactgcggatattttggtcatttgtgttatgcaatttaaattctgataagtttaagccaacgatttgatcatgtgaacttgcctctcgtttttggttgctttactgcctgcgcacattgattagctaggtatagctgtatatactgtgatttcattcatatttctctacccactacccaggtgcatcatgttagttattgtcttacgaagtacagtatatggattattcacatgtagctttctctagtttcgagttgtttacaatgtttaacattagtattgaacgtttaaattttataaacacgataccggtgtgtagttatcagttggtgacgaaatatccttgatgtgcaggtttgcccgatgtgcagcgcggaagtttccacatcggacagcaaccaggcatgaccaatctttgctgccattatggggcttgatgggagcaaatagcgggcatcatatggtcgcatcttgtaatgttggggagaaggcagataaaactttcggacacatgcgagggaccagcactatgatcttttgcgttcttcagtcctctcctggcttagctccactgtactctgtttgcccgtgccgctatgctctgcattccctgtgggggcctcatggctgttgtatgatccataaatgtacaatggttatattattatattatatattgctagccattcttttactacctcatatagcactatcgttgtaatcttgctttttgaatgacgtttttttcctctctttacctagtcacgtacttaaaaagtttttgatcaaatggcctctcaatcatttaaaaagttactt

SEQ ID NO: 26619 - DNA, 3503 bp, Oryza sativa
gtagaagcatcagcaaagacaattgattcagtcttggatgcctttttgagggaggagaaccaatctttatcaccggtcatgtgccacgaacaaccggaatccacaatccacacgttctccttccttgccaccaaagcctacacacaagtagacgtcgaagcctcagtactggggttagatgataataaaaatttaggaatccagtactgagacacacgaccagaagatccaataggcatatatccacgtgcaaaatcaattttagaattttcaaaaaaattcctccgaggccggtctgaccgaggtacagtggccggtctgaccgggggccggtctgaccgcctctgtaccgccggtctgaccggtgcccggtctgatcgaggctgttcagccggtctgaccggtcgccagtctgaccgcgggacccactgcggtctgaccggtttcttcgagggaaaaccagatttttgccactttgattttgcaaaagcaatctctctctcctttttctgtttatgagctaatctgaaacaaaaatcaacaatatgtccatcttttccacaaaaagaacaagtatatttttcacgttgtttagacacattgttagagctagaagatttagcaacacaagcagaaacaggaggttttgcatgcacaacattggattttgaagaagatgcactcatagtagacatgataccagcagatttaaacacagttttatttgtatcaggtttaatcaaaatctcaccacttctagcaccaacacctaacacaacaggaggatgtctagagttatgagcataaggatcaaaacctaaaccacagttatttgtgctaacctttgattgatcctaaatcatgttgaggttctttttaccatcagaaaatcttagcaaagaatttttcaaataagaaacctctttttccaaattaacacaattttcacaatctaccattacacctttgcttttccgacatttggggcaagaaagcacttcattgtttttcacaacatcttccatgtactcaacatgacctaaagcatcttttagtttcatgttattcaaattacatgttgagcaatccaaaacatcatgatgttgttttaactttttagcagaaatcatgttaaacatcaaactagcataaaaagcaatttgatatttttgcaacaactttttagttaaaaacaactcatccaaagtgcgtgtgtgcagagcaaaactacaagcaagagaaggtctatttttcaaatcatgtgcagcattaacatctctaatttttgaaatctcattcattaaaacctcacaattttcacaatcatcatcattaggaataagagattttaatctatcaatttcagatttaagagatttaatgataaactcctgttttttatacatcttctcacactttttattttttgcactcaaaatattaatagcttcctcaaaagcactcacctcattgtcttcatactctgtgtcagattcaccacgcgccatgaagcaaacatcggagacgttctttcccttgtcatcatctccactttcaccatctacatcacttagtggctcgaaagcggcgcaaacttgttgaaaagccttcctaagattctccatcttcctcccttggttagaacccttcgacttgtagttgttgggcttgttgttgttggtcttctcaccatctttgccttctcttttgcctctcccaagcttaggacaatgcgaacgaagatgatcaattgaaccacattcaaagcaacgatttggaccacctcttttcctgttcctggcattattcatagctcaagcaattcggttagcaaccaaagccaaatcctcctcctcgatttgttcgagttgatcatcggatgtggcattaaaagcagcaagaaaagaaggcatagatgaagaagcatcaacaaccaaagaggaagaagaagaaaccaaagcactcgatttagaatcaactttgcgagaaagaatattcatctcatgtgttttcaatttagtataaagtgaatccaaagtcaaagtagacatgttaacagactcctgaatagatgtaactttcatctcccaaatagacatgtcgagaccattcaaaaagtgacaagaaatctcagattgtggataattaacatcataagaagaatcaacagatctaagatcactcaaaattttattaaacctagaaagatagtcatctaaagcttctccatgtttcatctcaaacttaatgtactcctttttaaaaagatctcgacgaagctctttaatgttatttgttccttgatgaaaattcttcaaagcattccaaatctcatgagcagtttcaagatgtgcaacacgatcataatgagaacgagaaatcccactcaaaaaaatgttgcgagctttgcaattttgttcaaaagcagttttttcagcagcagtattaataacttcaggaatcacataagcatgagaaacttttctccaaatatcataatctttagccataatgtaagactgcatcctactacaccaatgagtaaaatccgttccatcgaaaacatgaggcttagttgaaaacctagcgggagtagccatgacaaaaactttagatcgataaaaatccaaagaagaaaacaaggctctgataccaattgtaggatcgtaaagggcctttcccaccccaaaagctagccattgaggtgaggggctcccccacttatatcttaggtcctttacccttccacaaccaatgttggactattcaacaatctcccccttcacacattggtgtccctcagcccttcaccgccccttcaccgtatccgggccccaccggcccatggtccatcaggtatacgggccccgcagacacccacggtccatcaagccttcacacgtgtccatcgggccagagatgttaacctagccaggctctgataccaattgtaggatcgaatcacaagaactaagccaaccagagggggggtgaatggttggtatacccaaaaaccgaaaacttttagcggaaataaaagttaccctcgaaatcgatggatcgcagtctgaccgaagtagttgagccggtctgactgcctgatgaacgtcggtctgaccgatgtagatcgatcggtcgaaccaccgaaaacacctaccgccgactcctgtcgccgccggtctgaccgccgtgtgcccgccggtcggaccgccgcgatgccgccggtctgaccgccggtgtgccgccggttagaccaccgaaacccggtaaacacaaatcgaagaactcttaaagtggatgacgactttattgattctctctgtgtttacaaagtgcaccaacagcactccttacaaaaattttgactaaactcgaaaccctaactcaaaactcaactctattgctttttaaagtgatacaaggaagcctcacgctccccctttaattaaacattaagtaagcaagcctaaagccacgaaccaaactcatacgggctgcaggaa

SEQ ID NO: 26620 - DNA, 8487 bp, Oryza sativa
gtgaaaaccaattatctccaaaaccacttcgtgattaattccaaatacaaaaccaataatgtccaatgcccaattgttcatcacagaataataatcaaaaacacctttgattttacagcacgcttaattcaacacttcccggcttcctgtaatgtttgtatagccaccaaagcaagggctgtgtttagatccaaactttagtccttttctatcacatcaacctgtcatacacacacaatttttcagtcagatcatttccaatttcaaccaaaatctaaactttgcgctgaactaaacacatccaagaattctccaacggggaaaatttctgggattaatcaagttcagaaacggggcagccaggtatggagattgtcaagaaacaagcacggatggacgatcgctgcctgtttttggtttcttttcactattcatgtcctcagtcctcgagcaggtgcaccattgtccccagggccatggcaatgtgccaaattgccaatgcttgtcatgaatatgacaacgctagctagctcagcggaccacggctagaagcacagtggcaacatcgccaccagtgtcgtggtcgttcgccgcccacagttggcaataccactgcattttagtagcctttcatgcatgttctgcctaattcgtgatcgaagaatcatgtactatataataacgtatagattatatatttatatgtaggggtagggaaaataaacagtttaatccaagaaaactataatagcacgtactagtagaaattatgttatcttcctattgtttgacataaaatgtactatctctgttttacaattacttcttgttctaattttattctaagtcaaatatttttattttcaatcatcatttttttatatattatgaaaatatttctcattatacgttaataacataaatcttacaatattaaactataaattaatgtttgacttaggatgaaagacacagtactctaaaatggaccagtagcgtgaatgtctcggtcagaataaatatgtgaaccctgtaaaattttcacgtaaaagtaatataccatgtatgcatatgtagtagtaatatatactgaaattttttttaacatttttgatagataaagttatgcaccataatgtctttgattttttttttcaaattgtttgagtacgattgaattatagaaaaatatagcaacacctaaaacactaaattaatttatgaatttgacattggatatattttgataatatattagttttgtgctagaaatgatgctatatttttctataaacttgatgaaacttaaaatttctaactagaaaaaataatcaaaacgatgtatagtatgaaacgaaggtagcagtatattttcatacccgtacatgagtacaacagctatttaaatgggagaaaatcttcccttttcaatcaatcataaaaaagatcaccaaaatccctcccccaaagaaaacacacacagtacaatccaaatcacaatcgacgtcctaatcgcacgcgcttttaatctcgattaaactactgaacgtaaatagcacaactatccattccctcccccagccaaagctatagcatagagcgacctttcgatcgttccctataaatcaccacccctcctcgtcgcctccctttcgctgcttacatgcaaaaaaactcccataaacccctcctcttcgagaaaatccctttttgttcaaccacgacgcgaattcccaagcaacccccccacacccagctgagtagctgacgcagcaccagcagtcgcggggaaagggacacgtctcgccgccccagcttcccgcctccctcccatcccgccgccgcggacgcgtccaagccacagcaacagcaaccactccgacgaacacctcgcctgcgcgatggtggcggcggcgctggacgcgatggcggggacgaggtgggggaggtggctggggctcgtgacggcggtgtgggtgcagtgcatctccggcaacaactacaccttctccaactactcccactccatcaagacgctcatgggcctcacccagctgcagctcaacggcctctccgtcgccaaggacgtcggcaaggcgttcggcctcctcgccggcctcgcctccgaccgcgtccccacctggcttctcctcgccgtcggctccctcgagggcctcctcggctacggcgcgcagtggctcgtcgtgtcccgggccgtcgcgccgctgccctactggcagatgtgcgtcttcctctgcctcggcgggaacagcacgacgtggatgaacaccgccgtgctcgtcacctgcatccgcaacttccgccggagcagggggccggtgtccgggttgctcaagggctatgtggggctcagcacggcgatcttcaccgacgtctgctccgcgctcttcgccgacgacccggcctcgttcctcgtcatgctcgccgtcgtgccggccgcggtgtgcgcggtcgccatggtgttcctccgcgagggggaggttggcggcggcggcgcggacgggcgggaggaggaggaggaggatgggtggtgcttcgccgcaatcaacacgctcgccgtcgccatcgcgctgtacctcctcgccgccgacctcaccggcgtcgggggaggcggcggggtcgtgtcggccgtcttcgtggccgtcctccttgtgctcctcgcgtcccccgccgcggtgccggcgcacgtggcgtggaagtcctggatgaagacgcggaagctcgcgaacgccgacgtcgaggaggcggaggagtgcgcgtccgccccgctcctcgtggcgaaggcgacggcggcggcggcggcggaggcgcgcggccccggcgagaagccggtgctcggggaggagcacacgatcgcgcaggcgctcatgtcgctggacttctggctcatgttcgcgtcgttcctgatgggcgtcggcacggggctcgccgtgatgaacaacctggggcagatgggcgtcgccatgggctactccgacgtctccctcttcgtctccatgaccagcatctggggattcttcggccgcatcgcctccgggaccatctccgagcacttcatcaagttcgtctccttctcccatccctttccccttccatctccgtacacaaaattgaaccgcaaaatccccagcgcttattattccaaaaaaaaaaatccccagcgcttactgtcgccatagatccgtagctccgtagcacggattaggtgtggcattttctttcgctagagttggaatcttggagcccactagcccgccattggtgatggatgggtgctgcaaccatgtcggcatccgtagtggtggtgcccaggttggagcaaggcgagcatttccaagacagagtcaagatggtcaatagaatttcagatattgcaacttgcccactttaattgtagtactatagtatgatcattatactaagctgtaggattcccagattccctcggatacatctgcctaggaataggatggatcaagttgacagactgagagaacgagagagcttagttgggattggggaaaatggaggttttggttctagttgggaatgggggaactgaagggtttggttcttgattcctttggaaggatggcttacactaatctgcaatataattagcaattgtagagacaaataatcatctttaggtatctgcacctgctggttagaatggtgataagatagcagtagcacaagttgtgtttaagctgtaccccgtagtacttatctgcaggtactatccatggagaattggtagtcctatgctttcagtggtcactacctaagtacctaactgcagtccatactatatggttactcaattcacatgtatagagtacatgttacctttctgtgttagtggtcatgtgtgcatagcacatcatgtacagctggtgtttccattaagaactgttatcggattatcaacattggcttccttttcttttttggatcaacctattctggaagagcaattcgacatattattagtctgaccaaatttatgtaaaactagggagtcaatgtctacaacttaatgtgtccacttcgtagtcttaatccaatgttcatttcatttctgtatgcgtttccctttcctcaaatattttgctgagcttctgaacgtgacaaaatttcaggacaagagcaattccacgccccttgtggaatgcagcttcgcaaatcctgatggccgtgggctatgttgtgatggcagttggtatgccaggctccctcttcgtcggctccgttgtggttggcatctgctacggtgtccgcctggcggtcaccgtgccaacagcatctgaactgttcggtctcaagtactacggcctcatctacaacatcctcattctcaacttaccactcggctccttcctcttctctggccttcttgctggcctcctctacgacgcgcaggccaccaaggtacccggtggtggcaacacctgtgttggtgcgcactgctaccgcctcgtgttcgtggtcatggcgattgcctgcgtcgtcgggttcggtttggatgtcttgctgtgcttcaggaccaagagggtgtatgccaagatccatgagagcaagaggcagagcaggtcggcagttgtgcagagggtaagctagccaaaacctacagctatgagaaaaatggtacagattcgcgcaattgcatcaagattcaatgattcaacgagtgcaggttctgtaaattttgtgcaaataagaggatcccatgtcttgattctttggaattagatggatggatccattcaatcggtatagtttaactgccacggaggtttctaggggctgattcgagcaatgtttgccctgtgtgtgtaattcagtactagtactgactactactgactgagaggctgcagattgtggagttgtctgatccctcggtgtaatcagtttagtcagtgtatccttgaggaaatgtattctcggttttagcctgtacgatgaattgttgtgcaattagcctgttggcatataaattcagatcaattcaagccattctttttggaacattgttaagtactctatttattttgagcatgaatggatgtactcagttactcagagtctgaaactagaaaccaatcaaccatcgaggaattggaatattggatgaaagaaaactaatctactgggttatatctccaaagttagaaatggcgaacctgccggccgccgtcgccgtcgccgactccacccaagcgagatcgtcgctgtgccgccgctggcgaggaaccaatcggtgctggtgcgggtgacggcgacgcacccaatctcggatgcttgcgcagaggaggatctggagcacttggctggggatcgccgccagcaaagggaaggggaaaaactgcctggagcctgctggaccgtaggcttcaatctgggccgtccaatgcagcggatgtggggagcacgaatcttggaatacttatggaaagagccccatgtacttgggaacaaaatgtgttgaaagttgaaactataattatctgtagttcgtaaaagaatcattctttggtctatggatttgcttttttgtgattcacttgagttaggatacaccaagcttcaagaagataattaattttattcttttgattaccacctttatggactgatccgtgtttgcttgtttgtttcgtgtgttgttgttcagtaactaaattcttgcagctcgcgtgcccatttctaaggaaaggaaaatccttcaacctgggcctaagaattgctaattctgctcctagccaataatcacctggttatgcaagaaacagctcgatattgtagtaatttatcagacggttcttaatgaaaccatagtacttcaagcgattcaggtgtacttgatgcttgagaacctgttccccatcttgatgttatgaggctttgagctgcatttgcatacagaagtaggaaacagaaaagctcatttccaagtcagtaccccatagtagcaaaactcatctggttgtcagattactaaattccaccattttactggatttatctagccattgttcttcagttcaacaagcaatcaagcatgtctgaatttcattgcaaaagcaaaaatatcttgtttctccatctggatattaacttgatcggtcttttgtcaacatttgtgtagagctgattttctaatatgattagtaccagtggatgctgacagatgaagggcacagttctgaaggtagtcaccataccttaatggcttaatatcacgtccccgtcgaaatctttcagatctgtttgggcctgtttggttgctcgcctcaaatcctgacaatgtatacacatgttctaaatatctatccagcctcactttttctttccttcattccaagattttacatctggcatttgtggccgtaaatgcacatgttgaaacggagcacaccgttgaaatttccttccagatgctttcagcagatttattgacctggcggcaaggatatgtcagttgttgaacagtctatagaatatttcagagaatccgattattaacagacgaaggaagtataattctgattatattcgaacggcatttttggggaaaagaaaaagaaaagtaagatttgcagaaagggttttattgtcactgctagggaagacttgttttcatttcatcaaagcagatatttttgtcacattcttgactaatacacgtatagctatatttcaagccaaaagccatctacggtaacactagcttaaactatcatattcctactgacttacctgaattattttggtagcatcagtttacacaagagatcaataggtccacgaaagccagcaggtgcagaggataagtaaaatcctgctgcctaaaaagaaagaaaaatgcacagcttccaccatttagcatatgcagattcagcgaaagcattttgaacctacaggtcctgtaaattcagaactaatgtatgattcatgtcttgattctctgaagaagatgatggatttactcaaacggaatagttcagaacgacatcgcgtcaattcagttcatgaagtaaaggtgcatagttttcaaggaggccctcgtactattcgtattatcatttacattcacaaggagtagttctgggcttctgggccgtcggtccgttatgagcgtccgaaatttatcttacctggtgaacgaacaagttacgtgtattttacaataggacccctatagttcatcctatttgtattttgaaatagaggactcaaaagagaaagtttcttccaagtcccgtgccgaaatcgcatcggaaacaatccaccccatgcctacgggagggaggcaggctagcgtcgcgtgtttgattggtgggattgcatagtcgcggattgggcgggaccgcgggagtttccgatcaaggctgaggagataggcggtagaaacctcgaaggtgaatctctctgtctatatgtgttatccaatccacatttgttttgatcagatctagatgttgagaaacagtagcgaggctcctgttctttttttgccgggtcagccaaaggttggccgaccaatttcattaagaaaggaggaaataaagttaaaacaacttagttacaacgacaacaaattgtcgcgctagaacgagcgaagcacgcccagcagaaacagcaaaacaaaggaaaggagcaaacgctcaaaacttccggctgattactcactaatgagggaaaagatcccggctgctttccaaacttcaatttcctccctgatgtcctgcacaagctgctgtgctgttctggacacattttggaaaatccttgcgttcctctccttccacacaatccaacaaatcagcatgaacaagcaatcaaaatcgctcctgtagctcaaccgacagcgtgatctgaccgtcagccaccaatctgacagtggcgtcgccatctccgctggcagggggaaatccacaccaagccaccccctgattcgccgccatacctccgtcgtgaaagcacaatccaccagtaaatgatggccgtcctcgctgttttgtcgacataactgacaaagatcctcgtgaggccagtttcgcttggcgagattatccgctgtcaagcatttacctttgagtgccaaccacatgaagaaacggactctcgacggagtcctagattgccacagcagttcaccaaaaggacagtcctccttggctaaaaagaaaagattgtatgctgaagaggctgaataaagaccatcagcagccatcttccatcgaatggagtcagcactgttgtccagagttacctcccgcatttcatcccaaagctgaaagaactccccaagggcttcagtcgacaaggagcctagaagatccctcgtccatctatggtcgaccaatgcttgacataagtgaaaagggtcggccatctccaagcaaagcaacctttcccagaccaatctacagtccaaaaccgtgtatcttgaccactccc

SEQ ID NO: 26621 - DNA, 11820 bp, Oryza sativa
agcttgtcgaggataggctgcagtccagccttcgtgggtttcctggtacccaggggtagaccgagataggtaatcgggaagttctccactcgacatgagagcgtctcttcaatcaagctcagctgatcggcagagcagtggatcggtgtgttcgcactcttggagaaattggtcttgaggcctgttgcatcaccgaataggcccaagattgccttgatcactagagcctctctggccgtaggccgaaaaaacaacacggcatcgtcagcatagactgagatagaaggtaaattctgtcttgctgagagggggaaagaagatgcatggttcttgcttgatccaccaaagcttgaagggaatccattaccagtacaaatagcaacggcgataatggatcgccttgcctcagcccccgagccggtttgaaggggttcgatgctactccgttgatcaggatgctcgtcttctctgtaacgaagatcatagaaagccaccgcctccagctcggcccaaaaccccgaaatttcaacatggacagtaggaagcaccaagataccgtgtcgaaggccttggaaatgtcgagcttcaagagaatcatctcctccttccgtttgtgaaactgttgcactaaacccttgacaaagacataattctcatgtatacttctacccttaatgaatgcagtttgcgagaagggaaccaattcatccagtcttggggccagcctcctagccatgacttttgttgctagcttgctgaagctgtgcacaaggcttatcggccgatagtcctttaggagagttggggcttctttctttggcaaaagagtaatcacagccgaattgagcaaatctaagttttggctactacctgagcagaatttgtcaagtgcttgcatcagctctggtttgatcacgtcccagcaagtctggtagaaaagccccgtaaaaccatccggcccaggagatttctcattcggcatactccggatagctgcccaaacctcatcttcagtgaaaggattgtctagctcaatcatatctcctctcctcaactgagtatgctgaaaaagaatctcccttttgtcactctcccctgagctcatcaccatctcgaagtattctcgggccaaagcttgcatatcttgttgagatgtggcgcatctcccatcgtgttccaagattgggatcaacaacttccttcttctagctttaatcttcatgtggaagaaggcagtgcctgcatccccttccctcaagtttcttacccgagccctttgtctcagccgaattctttccaatgatgccaactccaaacatctccccttgcagccagcccctaaggcggcgctccaagtccgatagcaagcgagattcctgcgccacatccagacgcaaaatcacttcgttcgcaatttggatttgaagcctgaacttactgattcttctttgcccccacttggtgagtttcttgcacagccgcgccaacttgacatgcaaaatcgagtaagggtcatcagactgaacttcctgctgccagctctccatgaccgcttctaagaaaccatccaacttcgtccagtaggattcaaacctgaatcgtctggttctttcccctgcaacaccgcaactaagtagcaatgggcaatgatctgagttggaggaactcaaagcctgaagatgcgcttccggaaagcactcttcccactgggttagacgagcaatctgtccaatttaaccagcgtcggctgctgctgctcattactccatgtgtatcgcctcccgaaaagatacatgtccctcaattcgagctcgttcagcttgttcctgaaggcattcatcaaccttctgttaattctgctattgctcttgtccatcgcagccgcaatgaggttaaaatcaccagtgatcatccattctccctgacaactgttcctcaccatcgacaattcctccagaaacagcagcttgtctgcatccccttgtggtccatagactgacgttaggaaccaggaacgctcgcccaggatccaacgaagttgcaccgtgattgaccactgtcctatatgcactacattcccctggaaagccgcccccttccatgctataattacccccccgcgagtctgctccgccggcaacgcagcgaagccatcaaatctaagccacaggagtcaaacaccaccgccgaatccaccacctcaagcttagattcttggaaacatacaaccgacaccccactcgacatcacagactcccgcacaagggctctcttgtcagcattattgaggccccttacattccacccaagtaaactaaaagaaagagaggaggttgacatggaaacagatagaacaccagcccacaccgcctacttcgaccccgacgtcagacgtattccctcaagccggagacgccgccgccatgaaccagacggaggacagaaccaggctcctgttctgtcctccatgctggaaaaattttgcctgaatcagtcgtaagcatgtggattggtacatggtttatgcttttggttaccatcttaattatgcattgcattcctgtatgcagcatgaatatatacataagccaatctaatacctggtccaattttaccggtctagctaggctggtgctgatttgacaaaatagtcctagatgaaagtactttctgaagagattcaggtatatttgatgcctcaattcaacacctcatcccctcatattctaatgtgagtctttgagctgtttatatatataggccttttaggataacagatcaacagtgtaactcaccaaattcagttgtcttgcctttgaccctcagtttagttggtcactcggatttgcaagaaaaaaaatatcttgcatctctagctggatattaacatgacctcttgattcttgttggtgctgtgtagatctgattttgagagacagtcggtataagtggatgctgatatggtgaagctcatactttttaatgtggcccatgttgcttaatatcatgtccctgtcaaaaccttccatgatttttaacggctcacatttgataaacctgtaattctaaaataaaagttggtctagtgtttttttgttgtttttcagtggcacttcgccccataaagcacatgctgaaacatagcaaattgctgaagctgccttccaggtcatttcagcggatttaacttcaaggttaagataagctgattgtgttgtagacaatgacacatttcgaatatgcttgacttcttctgaacttagtagttttgtttgatttcccctgaaatggctgcaaactcttgtcggcatgaggattctgaagaatattttatacccaaatacgggatgaatactgatttcaggattctgaagaatattttatacccaaatacgggatgaatactgatttccctcaacctaatgcatatttacagtatatcaggtttcgaacctttgcactctatgcaatgaagactaagcttccacttcattaatacaagtacttttgttatattcctcattgatccataattaattctttttcgggaatatgcaaatgcaaggagcgcatctttatattaagagaaatatcaatgatccataattcctatacaactatatctcttccagaaaaggaagaaaaccagatgccactaccccctcctatacacctaactggcttattcccaccaactttacgtacaatactctggaaaatttaattaattgctaaatgtaaggaagtgaacagaatcatacagttgggtttttgcctgactgacagatcacctgcagttgctgttaggactgcacaatagcatacgcacgcaatcatagctttttattccccaataggacaataggatgaccccagagcaactactacagtgacatatgacaatggtttttctacagtgtatggtacagtttccactgtatcttccccttccatttttcttttttttttttggaatacgcaaggagcgcatcattgtattaagaagaaataaagtttacgtactccatttttcttttttgggaatacccataaggattgtgtatctttgtattatgcccttccattttgaatccagcgatgctactattactgcctagttttgcagtctggtaggggctgaacggaatctacttccttttgccttgaaaaaaactagaaaagcaagaaagataaaaaagatgctcccaagaacattgtagctgaagcagagatatatttaagcagcagatctgatccaggcatcaatgtgccaagttgagctgaggttccatgaaaagaattagagaagtttttttatatacaaaaaagaggtagaaaaggaaggctcaaatttctgtaggggcctatagtgtccatctatcagtggttcattttttgctcagagcattaatattgcccctctatcaatggcttccaaggctttttatggttgtcaattctgaatttctgattagtcacttaaagaaaggtgcaggaaacagcctggattgctatgttgtcacattctcattaaaaacaaaaacaacaactactcgtttatcaggtatctactttttcttattctaaaaaaaaactttttcatttcttacatgtaccagttgtcgtggtgaaaagtatgagatagcatgattctaaagaggagatatttcataatgcatgtctttgatcttttctttattgaagatatgttgcaatactagttcaactatgtcagactttgcaaacaaaaaaattattcgcctaccagtgaatagggatcttacatgttggaattatgtaactgtttttttcatatttttcaggattgttaattcgagcattactacaaatctagaatgaagtctgttagatgttggctctaatgcactaccatcaaatatatcaaaaagaactcgtaataatctgaggttggtgaaattctactgaagtcggcaatggttagtacttattttttcttgtaaaaaaaggtgcttggtacctttttcttttcctgaagacctcttttaagactttgctaccaatatgaaattcgtgcatttctgaactataacttggttttgtcttctctccttgcatttgttcttttcatgccatattcattctacatgtgcagtaataactttctaatttacttgtgaggtctgactgttttcactaaatctaccgtactattctgtcggtatttacttgggtggtgcttactttactgagctatctgaaaggtaactttatggtttatcaataagtaattattctcctttttcttctgatgagcatatcttcgagggccatcccaaaccttttcaagatctgtcccccgttttattttgctctgaatcaccatatcttcactttttttccccagagaactttcctctcatcatcagaaggaatctgtggttatcactcaattaacatcatcaattacgtcctagtctttttcagaaaggtgatttttctgttcattaacgcgtacaagtcaaaacccttcagccttattctgagtttctgatcacagtaactggttgcaagtgtccacggagtaatgaggaagacaggacaattgtgatgactggtagcttatgtgggaaaaatgctttctgaggacagcatgggttaagagtggactatagtcactaaagtaaaacatgattcatagcttatgtgatcacatgatttggcaccaccaggagccttaaactaagccttgttttaccagcactgtctttttgtaatggtactatccatttttgtaagcctctcttttatcaaaaaaaagaaagaagtaaaacatgatcatgaaaatgcttaaggattgtcaaaacaacaatcatcatctaactttcagaaaggtaaaagagattcattagactgataacaggtgatgaaattttactatatactttctttacttggaatacagcgtgtgacatgaatatatgtgggggcaaaaaaaataataataaaaagacaaaaatctatacacaagaagtaactaaagtagcaagtttcctgaaaggcagaaaactattgcagtcttgcagagagttcttgttgactgacacggtgacaccttaacaagtcataataccactagaagtccacagagcttcaatccttctatccacaagcaaaaggctaaagaatatcgcttcacgtcctcatcctactgctccaatcttgtttttttaaaaaaatcggaaagcaacaccggccacttcctaccgatcaagaatctccatcctcttgccacatcagggtcatctcctatccggccttttttttttgactgaaatatccggccaatttaatctttagctagctagtgtagcacaagcaaagccattactgccactgctaatgtggcttgcagcaacaacgacgtcgacgccggcgccgcgccgtcgacctcgccggtggccaagctcgccagccatgagtcgtcctccagctgcggatccttcggcctcggcgacgggtcattgctcgatttctgactgcagagatagaatgacacatgatatatatgttgatgaacaaaaagattattaaaaatgtcatcaatcaggaattcaagatgcaacctacagaagaagaatcaaggatgtttagttaatgtatgagagattagaccgtcataagacaagttaattttaccctgataaccgtgtcgcgatagtatgtgagagattccaggcttgtttttttttcccttgattttttggtgattttttgtccagttaggcatgggaagctttaagctggacagccactagcaatggcgggtgactgatgaccatacaaggtggggaaggaacaaaggcgaaggcggcaaaagaagagaggagaacaatttaaagctagctagcagagctctctctcttttctctctcacagcttatccttgtctctctctcaaccccctcactcctttctccatctcagtttgatgctccttttgtcgaaaatgcattttctaagtaatctggaagatgcccatattctccagccattatgtccgtccatgtttcagctctgggccaccgccacagctaccctcacttgatagagggaagagccctaaacttgacatttttttctccatattatgatgtatcttgcgactgttcaaccaccacaggacaaataacctatgaaaataagcctactaaagtgtatgctaggcttaacttgcctaattaaggaggtaccaaatttttacgctacaaaaatctcctatgtgagtccatacctttgaccaattgagcttgataagctgctgaagccaaggctgccatcggttggtttaatgttgatataaaccgtacgatttatgagtaatatacaaaagtaaacattttatatgtatccttaaataatttaaaacttaatatttaaaaataaactccgatgaaaaaacaacaaaaccaactctaaaactaaattttaaaatttaaattttagctgtggtctataacaaaacataggagcccaaaattcaacagtgttaatagatatttcttccgtcccagaaaaacttaacctgacacatcctaatacgataaatctagatatactctatgtccagattcatagagtatatcgtaggttgagtttttttttgggacataggcagagcacgacaatgcacacgcaaagtaaagcgaagaggtaaaaattgtaaaaaaaaaaaaagagttggccaacctgttgggattgccgggtcgaggacagaaggtgatggagtagtcggtgccggtgcaggtgaaggtcgacgtggcgtcgtcgtaggcgtagctgtacgacctagggcacgccctcttgaacatctgcgagtacaccgacgggtgacacgtgtccggattgccgtggtcgccgctgcagcagtactccggcgtgccgaacgcctcgcacgcgctccggcaagcctggccatggccggccttcagctcggcggggcaccgctggttgaggtccacgacgcacccggtcgccgggcaccccgccgccgccgcctccaccaccatgggcaggttgtacccgtccaccaggctcacgtcgtagtagtccttcccgccgccgccgccgctgcccagcgtgaactccaccagcgtcgccggcggcgtcgcccccgcgccgcggcactccacctcgccggagccgcagtcccccgtcgcgcaagtgcccttgccgtcgtcgtcgaacgtgcaccccgtccgcgcccagaacctccccgaccaccccgccggcgccgccagcgaccgcgtctcgccggcgcccagcgcgaaccccgtcgtccccagcgccgagctccccgagttcgacagcacccccggccacaccgtgccgccgcacctgttcgtgaacgtgaacgtcacgccgcccaccattaccaaccctgcacacacaccaaatccaccatgatcaacttacaaacagaacaaacccaagaaccaagaattcaattcaccattgccaatctcaataccttgaaagaatgataggatgacgaagaacacactcatgatccaagtagatcgagtgatgatccaagaagccatttgagcagcaataaattgtaaactgaaacccaattcaaatgtgcgttactgttatatgtatatatatgctggatatgcaggaaagtgatcagttatggcaagagtgaccggtatgttcttgaaattggcagtcagctaaccctaaatggcaagacggtggttagaagcttggaggaagttagatgcaagtaaactagtaatagtggccactacagcttgagtgtgcagagtggaagcaagccgagtgtaggcttgtttgcttacacacctagcctatttatacagctagcagtgacgtcagcaatgatatgcaaaatgatgataccaagaattactacttcccctctcgtttcacttattccattgccttttgttttctttgccttttcccttttatttttctctctcgaaagaaaaacaaaaaggaagaaacagagtacttgggataaaaatgccccaaatgctttcttggaaaggaatggaagaggcagcagagcatatggaggtagaagacgaccgctgccattcacgaatgatgtcttgctggtgtgtgtgggggggccttcgttggttggtccttggcccatccgatgatctgatcgatcgatccttcgttttctcggcgcattagccgctgcgaaaactttggtgatcactcgccatcatcgatcgattctttggctcgttgctgcacaatgcctctgctgcgttttgggcgtggcggtcgctcgcctttgtcgtgttttttttgcctctggtttgggccagtgttggtgtgttggaattgtcggtttgcacccgatgtccaggtaggtccatggccaatgtggccaggcaagatcgttggaagaacgaaccgaccgatgtccagcctccgtttttgctgctgctgctgctgctgctgctgctgacgatgatgatgaaaacgaagggaaacgacaggtaatgcatggtggtcaactgaaagcaagggtcaagatcacggtaccggatcgaaaaccggtaggaacgggatttccatttttcacagaaactgttggttaaccaacaaaaaaaatcagaccaattttgtttaaaaaaggtaaattttagttgaatatttttattttgagccggcttggaagtccggttttcacgaaaactagaatgttgaacgttaagattgcttcttgctgctgtatgctggactttgtggattaccagaaacactatggtgtttagagataaattgatctactcccccctaatgcttcctttccaaactactttcttattatagtggaggcctcgatctgatccaaggtgtggagattggtgagctggagttgctgataggaaagataatggagttcagtgctgggcttcgccagagtagaacaggtgtagggtagctctagattgatgtgtagtttcttttgagggactgtggaaacgtgaagagttgtgtctttctatgtctccagccgtggctattttgatgctttcgtttctgaatgtctagtagttggtttgctgatggtgctgtgtcattttggtctgtactctgctggtaagctggaatccaagcataactctgatgattagcgttcaatataagctgggtccttgtgactttttctctaaaaaacaaaactagactgttttttgttcttttagtttggatatttcagagtttttttttaaaaaaaatctgagattacacgtttcatttttaaaaattaagggtggattgttatggctgccagctgatccaatctaattcaactaaataaataataagcctagatcaatccacacatgtccctatctaaaatcggtttatcttcgtgtcagcaccgaagaatcagtttattaccaccaacaaaaaagaacgcaaaagaaaaggaatcattttctgcagaactagctattcagagatggggaaaaaaattacaggtgatcatattactgtcacaaaggccaagcacagcggtacgtatcattttcaggacgagtcggcgttgcactaatcacatcgatggtgcagtgcagtgctggatcaatcgttagattagatagatttgctgctttctgtttgtactggaggtagcagcagctgctagatactttgaacgcctctgcaattaatccaggttggccagcagcgttaacgacgacgcagcagagattgctccagcgatcgaaagctacctgcagctttccaccgtgtaatgctagctaagtaacattaaagctcatgctaagatattcagcagtgacactgcacttacctttcatgtgaaaatgatatgttcccaacctgtaattagtcgagtagttacatgaaagcaccagttcggctctgtcggttacaaccagcttcagttaactgagatctaacagttaccttatgcagggagaaaaatctcttacatatagtgatatggatgataatgtggggattgtctgatccgaaggtcctctgccggagtagtggtgttatcggcaccgaagaagagaggagctcagttagggatcttggcacggatctgacagtggagaaatctttctcaatttttcagtcaaatgccacttagcaaatctggataatgtttcagttttgagctaaaataagatgttctgtgaaacattgttagattgatgaaatatttattggttacagtgggattttcttttccattattttgactcctacatgcaacaagaataatgttttcagatagacatgtgccagctaaataagtttagttgaatcatacgtaggtagctggtaggatcagggcataaccataatgctggtgactctacacaccactttgatcaaatccagaagaccagattaaactatatgtgcaatgctcgatctttgcataacctacgaatggacattttctttttaacaaaggtaacaatcaatcttgcagagtttcaggtatccattccatccaactaacttgacgcccattagttccagtcgtttacttactttctctgatcaatcactgcacagcaaatggcaaacggggaggagtgttcgatcgatcagaacgatttgattttcttcaggcagaagcaaaaggaagaaacagaacgacgaagaacaatcggcgcacaacctcggcagtacacaatgctgctgctgctgctgctgctgccgtgtaaagcgtacaagatgatctacacttatatcggataagagatcaggctagttctttcttcttcttcttttttcaaaacc

SEQ ID NO: 26622 - DNA, 7151 bp, Oryza sativa
  unsure (1)..(7151): unsure at all n locations
acgacctccaaacagtcaaacagtcatctgctgttgctttgacggatgatacgaatcaatccctgtgttcttggatgcatatgcatggcatatggcacaggagagaagggattaaaggctagcccttacactgtttcgctgcttttgtgtgcttgctttttctgaatgtttttttcttgccagccttgccactgtttcgcttgaccttgcacagttgcacgtagctgaagtcaatgggcaatgttggccaagtgccgttgaggtggagtccatgcggcgccaagtcatctcgactccgacgtgactgccgttcatcggttcatgtgcaaatttctctcttttgtactctttcttaaaaaaaaaaccaactctatagattttttttacataaaggattatcaaacctggcctctacagcttcgtgaggtgtacacagccaaataatcaaattcagagaatgtatgttcaaatttatttttagaattagatttttttaacaaaaggaatactttaagagtcaattttttctaatagccgaatgattttatgataactgttaaatgtacaaaagaatggatgaactatgacaattaaaaaatggatttgaaatagttgtttaagaatcgtatatgaaagtattttttatatataagaattgtatcgcttaagggcctgttcagattgccaaaaatttggcaagatagcgatattgttaaaattttggcaggatttcttatgtatttactaaatttggtaacaaagtaaacgtagatatttttttggcaactttaccaaaaaagtgatatgattgaaaatggtatcaaagtgaataagccctaaaagctgagaaagcttgctgctgaatggaattccattcctcagaaagaacacgcccgagaagggcaccaaacgactcaaatgttaagcaactgagaaaacggcggtatacgtgcccccgtacgtacacgtacgtatatacatacaaccctgtgtcattgcactaggtatattgatggtgatctcatccggcgacggctgcgtcatgtcaatgccatgtcaagcaaagggaaacgatgaaattaaagaagtcaagttgcaatattgctaaagaaaaggaagagtacactgtacacaggtgcattgcattgcatggaccggctgctggaaaaagatggggaagatttggggcactcttttcgccgagatataaagcgaccgatcgattcacgtctgccatgtcggcattgcacattgcctgccgctttgcacgtacgcatatataagccaatttcatttctagctgctgctgccgccgtcgtggtggggcctacgggctcgtcaccatgttaattttagttatctgcactatatctccttttactatttcctgcactttgacatggatttgtgacggccggagataatcttagttattagtagattctaggagtaatcggcaaaggctacgactactcgccagctgagtgcgttgcgttctctgcccctctctctctctctctctctctctctctcgcactatcactgattcatattataagtcgttttgacttttttcttagctatatttttttaagtttaatcattttttttaaatataacaatattttgaacacaaaacagatgtattatcaaaatatattaaatattagttttaataaaagtactattgtgttctttacattgctaacttttcataaacttgattaaaatttaaaaaattgaaaaaaaataaaagcaacttataatataaaacggagggagtgcaacttactcttcctaccttttaatcatctgtcatcaacggtgtttccagtatttggtaaaagtagctttggtagtgatagaagtgttctgttatctcggcaaggaggcggatcaggcgaaggtagatcccgtcggcggcagaggcntagaagtctaagaggcagaggaggattccgacgtcggtggcggccctatgggcgacggagacctaggaatccggtggagcggaagcggatccttttaactcgcgtctggtcggttagttttgattggacgatgacggatgaaggtgggcttaccggcggagcgtggcatcaactcacttgaagcaagtggatgaagatgacactagcggagttttgtagcaacaacgcactagggacggcgtcagctagacgacctccactcgtcgaatatggccgtttcagtagaggatgttaagaagtaaggatgtattgagatagtaggtttttcttttttttttctttttttttgtgtgttctcctcttcaatgtggtgtgagcctaagtgctcttgtatcatttggctgtgtatatcccttgtggatatagagaccgggttaataaaaatccattatcagaaaagaaaaaaagaagttatctgtttcctgttataccatgttcaaaatggatagactttgaactgttttattcattgtaggtccataaaactggctctaaaacagtaagcacattggaacccatttacacatgggcctttacagggacaccagctcaaattgtcatggaataagtctgttatttctccctcatatcttgctcctgattgaatcgtaccctcaaccgcaaaaccggatataatgtctcctctatcttaaaaaccggtgcaaatcgactccttcgatgatttggaaagcggtttctaccgacgtgacaggttgactgtgattgactcattgagttagcaagtggaacccacgtgtcaacgacttccacctcatctcatcttctgccatgccgtcgcagccgtggatggccaccacgggatgggggaggcaaaatagacttaagcctattgtcatacatttgagccaagtatcttgatatcctgtactcctgttgtactaccagactactgcaccagagggaaaggatcaaaggaatcagcatctgcagtctgcactgcaatgaagtaatgcagcgatgcatgctgaagttgatcagttcatcagatggaccatgccatgcaccagagtggtccaaactctgcctgcccaaccttttcagttttcaccatgcattcagattattcagagtcagccatgcgactatagtactacagtagtacgtgcccacaactgctgccgctataaaatcacaacgagaccggaaagaccctgacgttgcaactgtaccaacaactggcactgctcgagacaagcagtaaccaacaagatccatcgtgaaaggattcagagtttcagacatcgagcccagataatcagaacagatgatagtttgattcagaattcgtgaagaccatggatttgattcagcagcattcaggatttagatttctgaagagtgaagtgaagaccatgcctgacgtgtacgtacaaaataaggaaacgctcatgtgatcgactcaccgacccatctgcatacactcgttgtcccatgccctaacccacctgcttctgttctgcaattctctaatctcaaaaaaaaaaatgtttggttgccgccctgctttttttaatgaacttgatagtgcagtaataaggggtgtgtggttttaaccccaaggtttcgtatttaatcctcaacaccctcataatttcttttaaaaaaaatgttcgcaggacgtctcttccttcaaatttagggaaaaaatgtcacaggtttggttgctgcaatgtggatactacgggtgtgtttagttcgcgaaaataaattttttgggtgtcacatcatatgtttgaccggatattggaaggggttttagacaccaatgaaaaaactaatttcataactcgcctggaaaccgcaagatgaatttattaaagcctaattaatccgtcattagcacatgtgagttactgtagcactttatggctaatcatggactaattaaacttaaaagattcgtctcgcgattttcaaacaaattgtgcaattaatttttttatctatatttaatgctccatgcatgtgtcaaattaagattcgatgtgaactttttggaaaaaaaaagttaggaacttgacctaggctgtgttggaagtttggttgaaattggaacgatgtgacgaaaaagtttgaagtttgtgtgtgtaggaaagttttgatgtgatagaaaagttagaagttgaaaaaaaaattggaaattaacttttttttgtgacaggagaccaattaattacttcatcttcccaattaatcaaccaagtttttgtactagatgcggctgccattcaccgatccatggtgattgataatctatacaattcgcgaatcgcaatacggcccgaggtcaaaatgtcgggccggccggcacatggcgccatggcggatcagcacggctggccggcacgaggtgtgctccggcggatgacggcggcggcggcgatctctaccacggcagccagtggcggccgcgggcggtgcagagccacgcgagcacggcggcggccgcttggccggcgacggggaggggactgggcgccgtcagcgaggcgctgctcgacgcgtcgtagtagccgccgttgccgccgccgccgcggttgaggaaggagaccgtgtcgttgatgagaggcagccccgtccccgacgccgacggattcgtggcgccgccgcccaccgacgacttgaggctggatatcataccagagttagctttctaacgcagggttggttgatcactcattaggtttttatcacgaacacggaaaaatattacacaccaatatattagaagaaagtaataaacacaaagtaatcgacaatcggccagaagaccgttgctgagggcaagaacaaaaaggaggctaattgcacggctatggcttatacgtgtatgactttctatggcgagcatattcaacgaggcaaattatctactctctccgttttataatacaagtcgtttcatttatcaagtttataaaataaatatagtaacatttaacgaaactaattagatattgtagattttactagcttttttaaaaattttgatcaaacctaaagttttttattattttctaattaaatcaacttattataatatataaaaaaggagaaagtagttgcttgtaacttaatcagtcggcacaagacgttaataaagcctgcaattaatcatcttcaacgtagtcacgtacattggatcatgcatgatcattgaccaaccatccaacccacgttcttgtcaaatgatttgatggttggcagtggcacatgatactgcatttgatcaggctcactgaaatctgaatcgacgattcatctgttcggcttaattacctggagatgatagggcagaagacgacgaggtaactggcggtgccggaggcgcaggtgaatgtggacgtggcgtcgtcgtaggcgtagctgtaggcgcgcgggcacgcgttcttgaagaactgcgagtacgccgacggccggcacgtcgccggcgtgccgaacgcgccgttgcagcagtactccggcgtgccgaacgcctcgcacgcgctcctgcaggcgatgccggcgccgtcggcgccggcgaccttcaggtcggcggggcacggcccgttcaggtcgacgaggcaccccgtcgcgccgcacgccgcgccgccgccctggggaaccaccaccatcggcaggttggagccgtccacgaggctgacgtcgtagaagtcgttcccgccggcgccgtcgagggtgaactccgccagcgtcgcgggcggcgccgcgccgccgccgccgcactccagggcgcccgacccgcagtcgcccgtggcgcacgcgaacctgctggacccgcccgggtcggcgccgcagagcgtccgcccccagacgcggcccgaccacgccgccggcgcgtccacggcgagcgactcccccggcgccagcgcgaaccccgtcgtggccagcggcggcgacccggcgctcgacaggagccccggccacaccgtgtacgcgcacgagtttgtcagcgtgaacgtcgtgcacaatgcccctgcaacaacagcaacaacagcagcagcaacaatctcatcagaacacagctactaccacattgcacagctgatcaccaatgcaagtacgtacttgagagtgagatgagtaggagagtgacggggaggagacggcgagccgtcgccattgccggttgcagcaagctagcagcaagatggatcaaaaaaaggaaaaaacgaaacgagtgtatgtttcttgatggattcttgtggagttttcgtggtagcgatgcgattgcgcgtaatcaagcaccggggtttataagttataagagactgagagcgcttgcttggagcctcgtgatggccggtgctgtgcgcctgtccgcaggtcaacatgttatgctggctcaacgttcgagtttgcaaagaggagcggccaatcagaggctgacacgtggtgaaaccgcgagatttaaccctggtatgaagcgacagctgaaaagacttttcgtgtacgagaatgctacctagcgatcgatcgctagggatcgctaggagcgatcagatttctgattccctcccttcacctgattttcttttttggcaccacattatttttctattttagtaaatttatacacctaaagtttgtacacctcaagtttacacatctccacaaattttttttaaaaaaacaaaaagttagaaaaatttatgtatagaaatactatatataaaaaaattgaattcaaattcaaattcaaatttgaatcgggtatgtaaacttttaacttataaactttgggtctttagatgtatagaaatactatatatagaaaatatttgaattcaaattcaaatttgaatcggatataattcaaattcaaatttaaaacgggtctataaactttagatgtataaactttagatgcataaaaatactatatatataaaatatttgaattcaaattcaaatttgaaacgggtatgtaaacttttgacttataaactttgggtctataaacaactttaggtgtataaactttagatgtatagaaatactatatataaaaaatatttgaattcaaattcaaatttgaatcggatatataaacttttgactaataaacttttagtctctaaatttaattgtgtaaacatgaggtgtataaactttaggtgtataaatttactaaaatag

SEQ ID NO: 26623 - DNA, 2103 bp, Oryza sativa
acagaatacagacgtacaagtcataggaatatggtccgccgcctcatagtatattagtatatacagaaaacaatgatgtactgctacagatatgctgcaaacaagaatgatattctgatggcaaagactataagatcgaaacaagtacctggaacacctttgccagtataaggttaacctctggtgaagttgactaatgaaaagactggaacctgtaattgcatctgaagcatgaacaaaaaattggtgaagtgtacagtcatcattgagcagtgaaaacagtctaactgtgaggttgcacatgtgcgcgcacacacaagagcaagaaccttgaagtaaagaaaatttctcttatagatgagcgaaatgtaatatacacgatacataggccaaagagagtacaagatgctaatctcccaaaactatacctccaacaagagcaacttaagttctgaccatcaaagcctacaaacccccaggacacctgaagcaaaattacctctcagcatgaaaaacccaacaaaaggtgtaactttaacaacttttttcctatgtcggggataaaaaaaggttttaccagagtataaatagaagccacccgatgtatgtacagtacttggtcattgtaaagaagaacagctttatattcttctttcatgccttccaacaacacaaagtgatttaatggtatccttttgcacctctggattggtacagttccaatctgatcttggcctctggcaacaagctctcaattagcggatcttgcatcatgaacgactgtttggaggcccattcaagaaccgtaaggatctctgcttgcgccaactcctcgctatctgggacgttgtgtgcaatgtaacatacaagggcgagtgctgcaagctgaaccacctgctcactaaaatacacgagctgaacaaggtgcttcgcaccacccgcactgatgatcgctttcgagtgatcaacacgcaggtagttctctgtgcatgcaaacttggtcagggaaagtgctgcctcccgagagacatcagcttccctctcatcaagaagcttcaccaatggcccaatgatccgagtctcagttgcacggaaggttctggacagacagcctaatgagataatgcagggaataaggagatcatcatactcagccttgtcgacaacacgtaagagttggtcaacaacagcacgggcagcaggagaggttggcttaaatgctgaccgtcgcaggtcagaattctgctcagcaacactgcagatttccatgagagccatggcagaattgtattgcacatcaccttcgcctttctcaagtagcaccgcgaagcagagcagagcccttgactcagtgatgctcttgcagatagctgcattgcccttggcaagatgccacagcgccttcgcggcatttgccttcatagatgcctttgtctcagggtcctcaaactccctgcccctcgtagtcgctcctgacaacgatacgttgtgctgcttcgatgcgacgacaccgccattactgaccttaccactgctcccattaggctttgcagccatggtggaatgcaccaaactgtacatctcgttcttgctctgcgaaacgtgtccacctgggtgcctcgtaccgccatgctcccccgcgtccatcaagtccgggatcaacgccccgcgggtgctgttcttcttgtccatcaccacggaatgtatggacatcttggacgacgtcacggcgtacttggagtgctcctgcaccgtctcgaacgcgaggtggccgacgagcagccggatcacgttgtgcgacgcgaaggcgtcctggcacttggggtggttggcggccagctccgagacagcccaggccaccgtggcctgcaccttcatgggtccctccttgagcaccttggcgaaggcggtgcacgccccggcgtggaccatctgctcgacgcactccgggtcgcggccgaggaggccgatggcgagcgcggcgttctcctggccctcgagcttgccctccttgaccagcctgaggagcggggggacgccatcctcctcgatgatgagcttggagtacctgtcattgtcgcgggcgagcgagacgaggctggc

SEQ ID NO: 26624 - DNA, 21996 bp, Oryza sativa
atttggaataggtccctgcttttttttggagcggcgggtactactactacttggggttggggtgcgcgtcgcgtgagctggtggggagagccagcagagccgaggacggcagcagcagcagcagcagcaggcaagcaaaccgcccgcctcgtctcggtgcgtgcgggcgtttcggtcgcttccgcgcgcgatatctgcggtgttttttgggctgggtgcggggggagtcaatggacggtgtggggggtggttggcacggacggaggctgtgcaggctggattggatagttgtagcggcgacttggcgaggggaggggggagcaactgctacgctggttaggtgcggcaccacgtggatgaactcgttttgtatggagccgtgatgtccgtgccggtgatgtgcggttgctggcactctctcctgttttatggggacgtgtaggggccttttggggggggggggggtccaggcacgttccctaccaccatttttgaaaatggaaatgttaattatagagaaaagaaatgatcaaatgaggttgagactacggtagtgttgaaatgattcttatattgtgtgtgaaatatagtcgcatctattaaaacggaagcaaaagttaaatatgtttccttaaaacatcacgcataatataatgcgacatttcatatgtagagcgacatttcatatgtagagcaataaaaaaaaatatgacaatagtataatcctaggaagccatagccaggtagaaaactatagccacacgacacgtctatcaccaaaaaccgcgcgctactaataagatatgaacacgacatcataaaggaaaaagaatcttctaaacagcaccttctacaatatcaagagtgctgccgcgcctatcgtggtttttacctagagcattccatcaaatagtaggaaagatcactcgaattatctatcagagggcaatatctagaaaatgaggctgcagccaagtggacacaacgaggagagtgcagttgtaacggagtaacagacttgttggtcatcccagcactccaattggcttctgatacctccttgtttgctcccaagcacccatcaaggaatggtgacatagtggcgtttgatactgttccttaatcacacacaaaaaaagactcatttcttggacgtatggtcatggacaccacctaaactgccaccatcccggatagcaaggaataccaacaagctgcacaacttcaggggtagcagagcaacatcgttgtcatcgcgcccaattgcaagcttttcttcacggcaaaagaatgcaagtgtcgctttgccagtgtcgtcgtctcgtgcaccaaccgaacagaacgaacacgatatgggaaaaagaaaggcctcaacatggtggtacagcttgtagaaaatgatttttaggctattgttctacaccaaaaatgctcgcaatttttccctcacgaaacaaaagtgctcgcaattttcctagtgttagatcctactggtgttagatcatgtgctcacgcagctgttggtttataacttttttgacttcttgagaagaagaagaaaaaacagctgtttgatttgttcgtgtggtccactttggtgttacaaacttgcaattagtgcgagaatcaggcgacttaacagcaaacggattctgcgtttccaactaaattaaactactgaagtaacccgttatttgctgtctggaagcgagcttgaaatggtcttcatgccaagttgccaacctggtcaatgcagctaaagaaaaatggttactcacatactagtacattgctcccgttcttttctgtaagaagattaagattaagattttcgtaatatattttttaaactgctaaacggtgtgtttcgtgtgaaaactttctatatgaaagttgctctaacatagtaacatatcatattaatctgtttttcaactttgtaataattaaaactcaatcaatcatactttgataccatctcgttttacgtaaaaaacttaacctccatctctcattttcaggagaaaagaacaccaccattgttcgacaggtagtagaatcgcagaatggacttggtcagttgaagatctcctcgctcacatgccactcaccggctgaccaagtagtggtagcctgtcagccacgcacgcgcgcagctgatcgattcctcttgacactgaaccggcggcgccggtgaagatgatggcagcagtagcaaatgtagcagggacagaaatgctaccagggaatcatccaatgttcaggtactgtgggtgtttgatccctgtgaaccgaagaacagctgggagaagaaagttcaggaaatggagaagacgacgagcgatcatatcaatctgtggtcttgcttggttgtttgctgcggcggtggagaagacgacattgccatagcagatgactgaactgtgtgtctgcatagctgaactgctgaaaaaaaataaaagaaattatcggctacagtttctagatgctctcctcatcttgttggttatcggtcgcaaccaaaatttttacttaacttaagagttaattttagtttttttttaatatcgtagtatattttcactcttgaaatttaaaccatcaaggaaatgtaaaagtttcagttttgcttataaattattttttcttccttcatttctctatggcttctactacctttgtcccaatttaagtgcaattataagttttcgtgtttaacgtttggccgcctgttttatttgaaaaaatcatgaaaaaaaataaaaaaaagccacacatgaagtattattcatgttttatcatctaatataaataaaaattaactaatcatggaaaaaatttcaaataagatgcaatacaaaactacacactttttgggatggaggtagtactacctaaaaagggaaatgtaaatatcatagtttaaagggttaattggatccatgccattataattttcacggttttgaaatatgccattactattcacctatttgtaaccataccattataatttcccaagtattggagatatgcctctacataccctttcaatgcattttctaattatttaggaccaaaatacccttgtcttcttccttcctcatccctcctcatcttctcaacgagtctctccttttttttcgccgggctggcaaaacttgccggccaaagtatattaagaaagaaagcgagaatgtatattatttcctaacgccccaagaacagaactccgggagcaaaaaagcagagaaaaagctactaaaaatccctccttaaacagggccgccccaactacagatcactctattggaatcaaccccgcagctgtccaggtctcccattcatccatgatggtcacacatagattgacaggggagcttgctttcccttcaaacacacgcgcattgcgctctttccaaatcaaccaagtcaccaaaatgacacccgcatcaaatacctttctctctttcttagcaacaatcttacgagcatcacaccactaggaggagagatcagcagacggcgttgtttgaaggagaccaaggcgacctctgacaaggccccaaacctcctgagtaaaggaacagctactaaagatgtggtggcatgactcgccgctgattgagcagaggtggcaaattggggcaagatgccagcccctgcgttgaaggttgtcggcagtaaggcaagcgctcttcatcgcacaaaacataaagaatttgcatcgttccgacgcccgggatttccagatgatcttgccaagagcgcagcgagaccgtcccgtggacaaaagtgaataagccgatttgacggagaaagttcccttagagtctggacaccacctcaactcatcgcgcaccccatgatccagctgcactagtgctagaagatcccaaagcgcgaagaactccaggagggcctggacagacaggccgccccgaacgtctcctacccaagaattctcgtgcagcccttccgccaccgattttgtcttgttgcgaacataggagaagagcataagggaacgatttgcgattgagccccctcccgagagccagctatcagtctagaaggatgtttgttcaccattgcccagttgcaccatgcagccagccgcaaagcagtgcgccacttttttgtctattggctacacaaaattaacccagggcctcttaggctagacacggcagagccatggccagcgagttctcaaggcgacgcccatgagacgcaggtccttaatgccgagacccccgttctcgattggtagacagagtttatcccaggccaccaggctgcagctgcccgctgcgttttcatcccctttccataggaagccgcgacatttcttctcaatttccttgattgcccaaactggtagctccagcacagacatgaagtataacggcaacaccatcaacacatgcttgatgattgcgagccgagcgtctagagcgaggagcttcggcttccaactagccagactcttagcaagacgatccatcattggctgcaggtccgcttttcccagcttgcgcactgaaagaggaagtccaagatagacgatggggagcaaccgcaccgggcaccccagcacttcagtcacagccgcaagttgttcgtccgagcaatgtatgggcgtgatggaactttcgcgaagttcgagaccaaaccagttgcatccctcataaacctgagcaaagtgagaatggtcgaagcatcctgagtcgaaggatggaagaaaacgatggcatcatctgcgtatagcaaagcacgcagaggaaacacgccaccagcaagaggcgacagcgcgcccctattggcagcggtagcacacaaagcggcaaaggtctccatgaccagcacaaagagcagcggcgataaagggtcgccctgccttaaacctctcgccaacctgatcctttgtgtgtcacgcccattgatacatacagtagtcgacgaggagacgagaagcacggcaatacagtcgtgccatttaactccaaaaccgagatggcgaaggagctcaagcaggaattcccaggacaccgtgtcgaacgcctttgcaatgtcgagcttgagtaggatagcagggcatttcgcacggtgaagcctctgcactaccccctggacataaaggaaattctcctagatcctcctcatcttgataaaggccgactgagccgggccaacgagatcgcctatgcgagcagcaagcctagtggccaagactttagtgaacagcttgatgaaactgtggattagactaattggcctatagtcggccagctgcattgggtcttccttcttggggagcaagataatggacgccgtgttgagaaggtgaaggtgttgcgagttcgcgttcaacaccaggttcagcgccgccaccacatcctccttcacaatttcccaacatctcttgtagaaggctgcgccgaacccatccggccccggtgcgcggtcactcagcatttctagcatgactttcttggcttcatcctccaaaatctcaatttccagctcagagagatcaagggtagggagaccaaggcgtcctaggtcgagcgccaccattggtggcgagggcgagcccataatttcgaggaagtagtcatgagccatagccaatttgtcctcctctgtcaccccccaaactccgccttgctgcagcacaggaattgtcttctttcttcttctcgcgttgatcttcaagtagaagaattgggaggctgtcccactgtgcttgagatatcgcaggcgtgcccgctgccgcagccgaatgcgctccagcgccgcgagcgccaaacaccggcctttgagtgccgcacgcaaagaacgctcctcgtgggacagcagacgcaagtccatagcaccgtctagtcttagaattatctcatgcgccatcgcaagttgcaaacgcaactcgctaatacgacgctcaccccatgacttcagcgccatcgccgtcgctcgtagcttgaagtggagggaacttagggcgtttgaaccagctggcaccacatcccacgccgaccggaccacctcctcgaagccttccagatgaagccagaaagcttcaaacttgaagcgtcgcgatctgtgcaccatcgcctcacaagccagcagaagggggcaatggtcagaggccgacgagctgagcgcctgcagatgtgcgtcacggaagaagtcctcccaatcagcattcatcaagactttattgatcttggtaatggttggtcgttcttgctcactactccatgtgtagcgtcggccgaacaagtagagctcacggagctccaaagtgttcaacagacccctgaaccgattaatcaagcctctattgacattgccattgttcttgtccgactctgctgccaggaggttgaaatcacccacaatgcaccaggccccctgcacgcactgttgccccacccaggttagctcctccaggaactgaattttctgctcggtctcctggggtccatagacatttgtcaacgtccatgacgcacccccttccagattggtcacacacagcgagagcgaccatacccctttatgaagacaactcatattgaaacgatcactgcgccaggcagtgaacaacccccctctagttccctcagcagggatgaactcaaaaccatctaaaaaagagccacaagattgaacaacaagctgtcgatcaagcacggccagctttgactcttgacaacaaaagatagaagcgcgggaggatctaaccatctccgctacaagaggccttttaccagcattattcaggcctctgactttccacaccaaaagagaacacgacattgaaacaggggcttcaaagcgcaagcggagaaacagggcttcagcaaacctcgacgctctgaggagacgacagcctgacgttgcacagtgccgccaaggcttgcacatgggccggcacaagaggggacttgaagagctccaagtatttgaggatgtcagtgtcttccaccttgctctcgtcttcaaccaccctgagcttcttcatgagcacacgctgggctttggacaccgagtgctggtgtcgcccgccattaatggcggccagcctttcgctgcgtcttggagtgtgggagtatggctcaatccgccgtttggatcgagctggtgtcgcctgcggacgcgtgccgatgatcgccgctggctggggtgccacaaggtcacccagcgatggaactgcctcacccggagagagagacgcggcggccgctgggaacgcagcgctgggaagcgccagggagccatcaatgacctgcgaggtccgctccgagtgggccagggaaagcggcacccctggcgagccgtcctgagtaaggcccaaagcggcccgatgggtaggccacttgcggcctgaggttgggaggaggtggcgtttgcggtagactatttgtgggctggcgacgtgcacctcgggccacggcccaagaaccatctccagcgcccctgtagaaaggggaaccgattcccgctcaccgggcggattgaacgtgaggttcgcgccctccacaactgccagcggcgccacagccggaagaggtggcgacgatgtaaatgccactgaactcagcaaatctctggcgggttcttcgaaggatatttgcctggcaagccccacacccagggactcccttacatgtgggtccaccactagttttgctggcgctgatgctgggcgagttaatgagcccggccccatcacgaccgtctcgatggagatcagcacctcgtttggtgacgcgtgctcgaccggtgctcccaagatggtgaccgtttcaggcccttccggtgcgagcatcggtgacgagaccacgtcggagatgacatccacctccaaaccgccgagggccgtgcccggcggggatcccagagatgccaaggacgccatcgcttccggtgtgtgctcgggcggagagcccaaggcggaggccggctccatctcgactggcgttggctccggcggggaaagaaccacctgaacggaatcgcaaggacgatccagaactgctcccgagatatccgtcgacggtgccgacggtgtgacggctagcaaatgcggccccctagacgtggctcaaggggccgctgtcgttggagacccccagccgttcccgacctcggccccgcgaaacaatgaccaccgcccagaggctaaccgggccggtgccatcgatcctgccgaggaaggtgccgtaggcgcacctgcgcagagcctcgcgatcgtcgttgtaggggtcatcgggggggctgtccagcagctgctgaactgggtcaaccacttccaggacatggatcagcaggtcaaacgagaggcacctcttctctatcgggggcgccggcggtgtctgcgagactagcggctcgtgtatgtcagggtcctccatcaccggcggcatccaccattcttgcatcggctccggaatgtcgagggtgaattccttgggaattttggacgggtccaccgaccaggccagcacctccgtcatgcatgcgtcgactggcaagaacagttcgatgaactggcagtcaatcttgttgaggaactgcttgatggcttcaaactccaatgcatgcgctgggagcccctccacggccagcttgacgacaaacaggagcttggacctccgagcatgaactgagcggtgccaatgacggaaggagatcgacgccccctccacgctgaacctgccggaccaccccaggacggatgcgcagtcctcctcacgccgaaaggagatgaggaagtccgagggcctggtgacctcgatgcgaacatcttccgagggaaccctgcagcgacgccccaaagctgcgaccaccatcgccggcgagacctcccttctcccggacagcaccgacgtgaccagcgcacgcttcctcatctgctgctcaatcgcggccatcccaggggtccaggacaggactccacggcccccctgcggccgcaagaggggggtctccagctccaatgtcttcctccatcggcttggtactgacggacttaaccggggcgggcgggggcaacgcagtagggggtagcgccgtcttgctatgcaccggctgaggatgctccttgtcacctgggacagaagcgctggtgctggcggccaaatgctggggacgcttgggcgccgcagccgccggcactttccgaggaagggtggcgtcgatgtcgaccttgcagttgcgctcgatatgacctggataccagcaacgatagcaagttgggggttgactgcaggaagccttaaggtgccccagacctaggcagcgaaagcatctgccgtggagccaacgcggaatcggacggggctccggcggagtaaatgcggtggttggccgaccggcagcagaagagcctttactcctgcgcctcaccacacgccaccccgcgtcgacttcctcctgcgacagggacggacgaggagcaggcggggaccagacgacatccgcccaagatgcagcagaaagcgcaggggccttatctgggcaacggccatcggagcgagcggccgccggacgaggagttggtaggtggttggtcgccgaggctctcgcactctctcttatctctctgtcaccaccgagtctctccttttcaccgatctgtacaccggtgggctttgcctgctggtctcatctagctctaccagcgatggtgtcatgcagtgattctttcagcatgttcctgttcaagagggccaacagtgttgttgatgaatctgcaaaggtgatgcagaggaccattttttgtcctcatggcgtctgatctggtggaaattggaatggggaaggtgagggagcgatgatgccaacatgtatggcccggcgaggtggcccaagcggcgcgatgcaagcttgctgcaggtagctcgttggctggaagatgacaaacggggaaaggaagaagaagggggatgaatgaagaagacatgggtattttagtcctaaaatattagaaaatgcattgaaagggtatgtagtggcatatttttaacacttgataaattacaatggtatggttaaaaataggtgaatactaatggcatatttcaaaaccgtaaaaattattagggttaattggatccatgccactacagcgttgccaaattgaaaaaataccactactattcgtcatatcggctgggtgccactgtaattttgagaaattggatccataccactcagttgcgtttttcatccactcctgttgacgccgtctctccgcgtccgaggaccaaggacacctgctgaaaaaaatcagagaggaaaacaaaggaaaaggaaaaaaaatgaaatagctgctacggccgtgtttaagccccgtttagttcccaaaaagtttttcccaaaaacatcacatcgaatttttggacacatgcatagagcattaaatatagattaaaagaaaaactaattgcacagttagggaggaaatcgcaagacgaatctttttaggctaattagtccatgattagccacaagtgctacagtaatccacatttgctaatggcggagtaattaggctcaaaagattcgtctcgcggtttccaggcgagttatgaaattagttttttcatttgtgtctaaaaaccccttccgacattcggttaaacgtccgatgtgacattcaaaaattttcatttcgcgaactaaacatgccctgtttcccccctatttccaactttccgtcacatcatatcacatcaaaaactttcctacacatatagggtgtgtttggttgggcttttcaacctgcttttgcttttgcaaaagccaaaagccaaccaaagggctcaaaagccacagctgcttttacccaaagccagcttttggtgtagtacaaatcaaaagcagccctcccccatgctttcagctgcttttgggggaaaaaaattacccaccactgccattacacaaaaacaaattgcgtgttccttttcttttctcccatcggcatcgctcctccttctcactttgccgtcgccgccgctcctccgcgccccaccgccgccgctcctcctcgccgagacgctgccgtcgtcgctcctcctcgccgagacgccgccaccgcagctcctcctcgccgacacgccgccgccgccgccacccctctcgtcgcctccgctcctccttgccccgtcgccgccgcacctcctcgctgagatgccaccgctgccgctcctcctcaacgagccgccgtcgccgccgccgccgctgccgccgcccctctcgtcccgcgccggcccagatccgccgacgaggaggtgagggaggagaaagaggagtacgaaggggaggaggaggagatggacggcgaggtgccggtgtccccgccgcccgccgtcgaggccgactccaccgccgcccgcgtctacctcccctccggcgccaccaccgctgccaccgaggccgatgacgccgtgcgcactgccgctccccgccgccgctcgaggccgacgacgccaccgaggcctactccgccgcccaacccgacgccggcgccactcttgcccttccccgaccggcgccgcccgacgccgtccccgcccatccctaaccgacgccggccaacccgacgccagcgccgctcccgtcctttcccgaccggcgcctcctcctcccggcgccgccgccccttcgttcgccggccgtggaggaggcgcgtcctccttgccgagccgccgccgccgccgaggccgatgacgccgccgccgctgccatctccatctctccccttattttctttcgacgagtgtatggcatgtggggcccgcttgtcagcgggactagttatttcaaaagccacagctgttgaaccaaacgagctttttcaaaagccacagtccatatttcacagctacttttcaaaaagccacagcccacagctactttttcaaaagccacagctcaaccaaacacaccctcaactttttttccaaactctcaaatttctttaaccttccaactttttttaggaactaaacacacctacgatgagcagccagcatgtagtggcgttgccatccatgagcaccgcccgagcagactacccatcaacgactgctggccatcccatccgtccctgatcgcacagagctcgctggtcatcaccatcacgtcttatagaaccgcttctgcttcttggacggtgaacgccgggttggggaacatcaccatcttcttggcccatggccagttcctggggaaaaaccagattcgcagataccgatggccgctcgagcgacgaggagggcttgaacaggatgcgggactgttgttgcttgctccgtcgcttgggcgtccacgacggcattgcgcgccgccgctacttgccattgcggacctcgcgcgcgcggacgcctccgcgccggtgacaaggaggagcaggagaaggcgccggtgccgcccgtcgccgtcgccaagctatccagccgcggaagcgcccgccacctccagccaaggcgccggaagccccaccggaaaccaagcccaagatttctccggcgccgagctccctcgccgtcgccgccaccaagctccttcgtcgccgccgccaagctcccggatgaggatgaaaatggagacgctgtgagagatgagatggaaaaagtgacgggagtgccatggttctgatttttgaaattttcaagggttaattagatccatgccattaaaattttgcctgttttgaaatataccattaatatttgcgtatttgtaatgatgctattgctacttgtttctaatcttagtggtgccactgagatacgtattttgcatgtattggacaaaaatgccctcatcttctacctctctccctcttccccatcttctaccctctctatcttctcactgcgccgccatcccgccgccgcgtgctgcagcagcggggcgcgcgctgcagcttgctccaccgctgtgtcgctgctgctgccaccgcagctgctgcgccgccgcgcgccgccgctgcagctgctgccgtcgagccacatcgcgccgccgccgctgccgccaccgagccgcgtcgctccgccaccgctgcaactactgccgccgagccacgtcgcgccgccgccgctgctgtgccgccgcgccgccgtcgccgcgtcgcgtcgctccagccgccgccgtcgagccgtgtcgcccctgagaaggaagagaggagggaagagaaaggggaagaaggaagaagggggaaaggggtagtttggtccaattttatctgaaaatacatccaaggggtaagtggtatcttttggatatgtgtgaaattataatgacatatttccaaatacatgaataccttttaataacatgtatctaattaacccaatttccaacggcacccagctgatatgacgaatagtagtggtatttttttaatttgtcgaagttgcagtagtatgatccaattaaaccaaattataatggcatagatctgtgcacaaatgaaggagtgacagatcttagccttggtttttccatcggacggtgggcgtgaggcgtgagtggtggtgcgcctgtccgccccgggcagtcgcctctcgccggcggcgggcttggacggccggagataggccgcaaactcgcgaaggcgcctccgtcgcggcggcagaagcgggtggcgtcctgtcggtggtcggcgtccgggtggggggttgggggaaccctcgcggtcgcggcggcggggatggtgaagatagtgacgtacaacgtgaacgggctgcggccgcgggtggcgcagcatggctcgctccgccgcctcctcgacgccctcgacgccgacatcatctgcttccaggtccgctcaatcgctcaccccctgcctccccaccgcactccgcagcactggccgatgcctcgcaatctcatcatgtatataaaccctagctgtttgatggggtactacttcagtgattcactcactgtaggtcaccacaaatgatgtaatcgatcgcactgttatgttcagcaatacgcaaatgtgctaaattagcattgtgttgccatagccgcttgatttcatagagattcagaacgcgtaccgtttgtttatttatctctgaactgataaatgagcattgttctgtggtggaagctgcacatttgctgttaaatgtttagtcacgccaacacgtgcagtttctgtatgaactatgaagtaagttaagcccgcgattcagcagagctgactaaattaatgtgatgtatttcaggagacaaaattgtcgaggcaggacttgtcgggggatgtcatcatggctgagggatacgaggcttttatttcatgcaatcgttcatcgaaagggcgtggagcttactctggtgagtttttctggagattaaccaggaaatacccatcgactgatttggggtgggggtcttttagcaacgcactattagttgaagttgcttttcaatcattcaatctattggttaatttactttgaatgttgtgtcacgaagtgtaagtttctgtacttaactctattgtaggtgttgccacgttttgccgggtaacatcagccttttccagtcaagaggttgctttaccagtagcagctgaggaaggctttactggattgcaagagactgcaaagaacagtgaaactattggggattttgttcttgtaactcctgtggaagaggaaggtcttggtgaagtaacaaaagaagagctgctcaaggtggacaatgaaggacgttgtgtaattacagatcatggacattttggttggtctcttgttctgtccccttgaaatatagacagcataagtagcattcagcatgttgatgtttattcgttgcacatttgatttcttctctttatttgatgatatttactgcaccatttctgcagttctttttaatatatatggcccagctgttgaagaagatgatatagaacgagttcgctttaagctactattttacaagatactacaggtacttcatgtgcatctcagtcagtcagtaaattttggaggaatagtttcacgattgattgatttctgccaatgataatagcttgtttacttactctgattttatttctttttagtgcaaaatgtgcacccctcctgtgtcttccttaaataactgttaatagcttagttaaaggactgttatttatactgtcttcatctcatatcttctagagaagatgggaacatttgttggctcttgggaaaagagttttcgttgttggtgatttgaatattgcaccttcttcaatagataggtgtgatgcccaacctggattcgagaagcaaacgtaagctcatttccttttcctttttagtaagatttacttggaccgttttggaatctcaagtcaaagttttgctgaacttgcatgattttaagacatgaaaataaactgaataacctcagcactattactaaatatatcaattcgtttcataggaaaattccatttaacatgatctggtgatacttttctctgtaagaacaatctgctgttgagggctgtcaaggtcagtgaggcaacatcatatgagaagcaaaactttagcatttcaagtgaagttccatgcacaggccacgtgaacttagagctgcttctgctttcacctataatgacgtaatgcatcttgcagcactaaggctgaaagttcagtagaaattgttgataagtgaagcttgaaattttttgaacttgaccttccacttgtgatgagttcgctagtctgatgatgtgcttgataatacatcaatcatttattttatcctctctttagagtactctaacatgaagccacttgggaatgacaaattacttcattaccctttccctaattcaaggtttcggaaatggttgagatccatgctgagagaacatggaggtccattttttgatgctttccgatcaaaacaccctgaaaggtattgaaagctctctttctttgttccatgcttgtgtgcttatccaacctattttagtttttgttataattccagttactccatgcctacagggtaggtgtgtatttccctgttaatgttaatcaattttttctgaaacttaagacctactctgtatgcggcccattattgaggcttagaaagcatgccttgaatttgttaaatggaacaaatatttatcttttctctttataagattaacaactatagcagacacagaattacttgctaaccatgtaccttgatattctaaccttgctgctttttcttatgcagagtgggagcttatacctgttttaatcaaaaagttggagctgaagtatacaattatggttctagaattgatcacattctcatttctggtgcctgcttccatcactgcggttctgtggatgaccacagcatctttccctgccatgtggaagaatgtgaaattatggatcatttcagaagagggaatagcgaaaatatgtcaatgtatagaatggtcgaaagttttctttgcaggatttgcagtgacacattagaattatttactatattacattgtccacaggtggaaaggagggagaagtagtaagctagaaggatcagatcatattccagtttatattgtgctgaatgagatacctgaacttccagttcataacactccttcatcagctgctagatatcttcctgaaatccgtggacggcaacagagcataggtgagcaaccttttgtgttcctacttaagtaatataggcttttaatgtttattatagcattatagcatataacttgtgaaggcagccgctcctggccttatttgatagtttagttatgagtacatacttgcgtgcatattgaagtaatactgtttgtgtgcgcattatgctgaccaattgtattttccaacatgcagtatcattcctaaggaaaggcatgatttatgaacataaagatgccatgtccatggatagagcagatgaaagctgctgtggtggtggcttggaaaggaaagctatatataaggaagaaccaccaactgatatagccaaattttccaaaggtaacgaccttcatagtgtcatcaagcggaaaattcgtgatcaattgttaaatgaaggttcaagtggcaactcccataatagcactgcagcattactggcaacacaaagtagaaaagcttccttttcttgcagcaaggctgtgtccaacaagaaaaacaaacataacttgtcttcccaacctacgatcaagtcattttttcaacaaccaaagtcaaagccaggagatagcagtaccaatagcatagttactccaccagatactttgcatggtatggatgaattacatgatccaaagaatgactgtctgccagaaagcatccagtgtacaactccagcaaccgaagatcagggtaactcagatgtaccctgctcgctttcaacagataaatgcaatgaagcaacactggagtggcaaagaatacagcagagaatgaagatgaccctaccactttgcaaaggacaccatgaaccttgcattccaaggtctgtgaagaaaggctctaatattggtcgcctattctatgtctgtgcccgtgctcaggtatttaacttcagaatcaactgctcaattcacatccgaggaacaatcataaaggtagttcatattgacagaggatgaaaagcattggcattgtgctgtaaccaccatgtattgtctatgacagggacctgcatcaaaccaagaagcaaattgtggtcactttcagtgggccactgttaagtctaaagagaaacgccggtgactaatttctcttttatcgcataggtgtaacactcactgtaagtatttacttccatactgtacgtggtggtgctattattgggcaattttatttgtttaagtgctaacttctgtttttttccccaagtagcctggacatgtgtgtgtcacttgtttctatacacatgaaatgctgatgttcttctcgggagcaagctggtatttgagtcagcaactcggcattaatctctagttatgcattacgcaggtacataatttaattttgtgtttaatttagatggctaccatggcctcctttgttgtttacatatgttatattgtttggtcaaatgccaccttgtagctttctcgtagttttgttttctcgggtttggctagcttatgtttgcaactacccttggatgtattaattgaaaaactagctgagaagcatgaaaagaaatcaagtgaagtaaattgtgtactagcagtatattgttctgttcccactatgagaattaggcacttgaatcgtgtttctgttttctaaaaaaatgtggcctcactgagcataatttgtggcattttgttgctggtcaatttttgcccttgcacgtttgcacctatgttgttctgagctctttgggtaacacgggtctatatttgagacttgagaggatctttgggcctcttgccgatttggcccttgaggatatggctcgaaatcgaatattgtagggcattatgctagtccatgccctcatggaaagcatgatatacttgctcttacttgaataacataacaccaagcaaccaactatcgttgcatgattcatagggtttttttattatgtacgcccaacgagcatctcgtttggagcaactgaaatggatattgaattgcttctgaaacgaagcaccggctttcagttgaacttctgcaagcttcagttaacttgaaatccagttctgttctaggttaaaaataaaacacgcttaattgcagaacatgttgaaaggcttgaagctcatgtggctcaccgtgcattgtccttcgttttcgtccttttaagagcaatcgatggatggagaaaacgtacaaatccacgtgttacatggtgaataccggatagggatcgttcctattcagctagtactatattattggagagtttactataggcagctgaccgagggaaccttgacagcaaagctcccatttgtctgtagtgtgattcccgtggtaatttatcttgcaacctgaacctaaaatagaaaagtatcatgtgtaaaagatgctaattgagatgcccttggacttagagactcatcacatcctgattctattgtacagcctgccagtagaccacaataccacatggctattgcaagtttgtaacactttcacctttctctgctagtaggtgcttctgctgctgcatctctgcaatcaatcaatctatggcttgtaaatctgaatcaattaaaagctccaaccttttcccccgacatgccattccatgagcgcctggaaccttcatcttcaattcaccatgacatgttgacattataatacggcatccaaccatacaacgcaacaccatatatgacccacctcactcacctatcattgtcctcgtggcccctttcccctcactatcccgccataaaaaccatcactccctatgagtaaagaactccaaaaacgttcttgtccttagaaaaaaaaatcttgtttggccagccacacctaacgccagttcaaccaagaactcggctttgcctctgttcctccttccgagtcccaatcggaatagatcgatatcatctcctctcatctcatcttaattatctctcccatgtgtccctagacatatagtccatgcactaatcgatcgatatatctatatagttttcgagagatattttgctggttgcaattagtctcgagcttacagcgaccttccaggtcagaggtagccggattaaatccttggtttatttatagtgcttgatcgatcatgtcgtcttcctccaatagcgactccggcaagaagggcggcaaccctctggaagccatgggcgccttcttctcgtcgcaggtgaaccgccggaagctggtcaccagcgagaagcaggcgctggccacgcggctgtccgccggcggcgaggcgttccccggcagcgagcaccggccggccgaccggaagacgtggatggcggagctcgggccggagcggctgcgcgtgcaccagctggtgtggccggggacgcacgactcggcgacgaacaagatcggcatcccgttcgtgacgcgccccttcgcgcagtgccagtcgctgtcggtgtacgagcagctcgccgcgggcgcccgcgtcatcgacgtgcgcgtccaggaggagcggcgcgtctgccacggcgtgctcgcaacctactcagtcgacgtcgtgctcgacgacgtgaggaggttcctcggcgaaacggcgtcggaggtggtgatcctcgaggtgcgcaccgagttcggccacgacgacccgccggagttcggcaggtacctggtggagcagctcggcgagcacctgatcccgcaggacgaggcggtgttccacaagaccatcgccgagctcctcccgcggcggctcatctgcgtgtggaagccgcgcaagtcgccggcgcccaagcccggcgagccgctgtggagcgccggctacctcagggacaactggatcgacaccgacctgccggagaccaagttcgagagcaacgtcaagttcctcggcgagcagccgccggtggccgaccggaggttcttctaccgggtggagaacacggtgacgccgcaggccgacaacccggtgctctgcgtccggccggtcacgcggcggatccacggctacgcccgcctcttcatcgccgaggtcttcgccaagggcctcggcgacaagctgcaggtgttctccaccgacttcatcgacggcgacttcgtcgacgcctgcgccggcgtcaccaaggcccgcgtcgacggcgccgcgtgagattgcatggccgggccctgtagtaattagaggggtcgccgcgtttagaggatttgcttcgtttcgccggtgtcgcagcgtacgtacagattagtttgtgttgttcgtgttagacacgtgatttatgaatgatttattatcatgcatgtgttgggcgttcgtgtgtgatttaattgttgaaatgtatatagtggtgaaattgctcgtgtacaaaggaataatcgcaaagtgctcgttttgttgtgatcgttcgtaacgagggtaatggagaggatcaaattggtatttgattgtgttccctctatttctttttgtgcgttagatgaatgaattaattcgttaatgttacttcgagttggagacggttttgaattatttatgtttaccagtaacttatatgaacctgcgttataatagagcttcatgtgaaccatgaaaatggatagttttcctttttaccgctaagatcatgtgacttaacagaaaatcttaataactcattgtaccgcgtttcgaaaaaagaatatcaatcagcaatgaattgataaaacgggagggttttatctcgcttattggactataagccccaattgtcctaatcaacaaatcaattgaaactgtttttaaagtagaaatcaaagagtacacatgctctctttatccatggtgaccgcgacatgtcaactaacacgactgaatccaaaataaaataaaaaaaatacaggtcagcactatctgaatttgctgggattccagaaggtccagttacatagcctacaatagcccacttatttctgaaggcttcagttctgtttacttgggccgacactatgtacaggccttgcttgtgtctattcacatgggcctcagactaactaatcatgcaataagttcatctaagatcccttaacttgtcaacaaatctgattttcgtccctcaaccagaaaaccatacacaacgggtccctcaactattaaaaccggtgcagatgaggtccctcagcggttttggatgacgtggagcctacgtggttaatttaactcggtcttcatctgacgtggcgctgatgtggcgcttacgttgcaattcaatccggaaaaataataaaactcgtgggacccacatgtcagtttcacacataaattaataaaaatggtggggcccacgtgggccccacatgtcattctcacccctcttct

SEQ ID NO: 26625 - DNA, 14659 bp, Oryza sativa
tgggcgtaagaggaaggggcggtgggagttggccctagctgcggcagacggcaggacaggagctgcacaaccgaggccccgccggcgccgactccttcttgatgtcgccggcgccgccaaggctgaggaggtggacgcggtggtggtggaggaggaggaggaccgcggcgcggcgcggttccatgagcggaggctggtggtggtgtttgtgctgccatcccagccgatgtgcgccacgtgctggcggtggtggtccgccgcgccgccaccctcgccgccgccgcctagacacgcacacagcatcactaataccaaactcctaaatcaccccacaaaaaacaatcgacaagatcgagcagaagtgaagaataagcatccaagactccaaacaacgaaccttggggcttcttgccgctcttgccgcctccatcgacgacgtccacgctggatccattgcggcaggtggaggagaagaggatcacgatgaaccggtccatccgccgctgctccttgccactattgctcatggctagctagccactgctagctaagctgatactatcttggaatcaaatcgcttgccgctttggctgaacctgtactggtatgggggtcttgacccttgctcaaaaaaaaaatcttggaatcaaatcaatgtctgctcctcgccggcgtgcgctgcgatagcggccagatgctgagggacgggagcagcacctccgcggccttggcgactggtgccgcgggagcggcggcggagcctctctccgcggccgatgcatgctggctcccctcggcagcggcggcggctctgggggcgtcctccgccatggctgcgggtaagtgggagagggagggatctatggcgtggagagaggagagaccgagagagagaaaagaagctccgccgccccttcctcttccgcccacagccgccggagccatgcctccgctgccgcgccgctccctcctctcccgccggccgccatgccccactgcctctccgttgcgcctggagagaggatatgggagagagatggagggaaatggggagagagagaggaggaagaagagggatgagaatgacaagtgggcccactttttttttattattttgtgtgtggaattgacatgtgggtcccatgggttttattattttttccggatcaaattgctcgacgtaggtgccacgtcagccaaaaccgcctccaaaaccgccgagtgacgttatctgcaccggttttgatagctgagagacccgttgtgtctggttttttggttgagggacgaaaatcggattcgttgataagttaagggacctcagatgaacttattccactaatcatcgactgcatggacatgggcttggaagaaaagttgggcttacagaacataggcccggttggtttcttctcacgtgcagtgctgagtgctctagccagctcggaaggtttggcgtactgctggattgcatggtgcgaaacgatatgaatttttgttggccttggcaacccaaattcagcgggcgcgttgctgtagagtgtagagttgtattgcacggttcaaatccatcgaacgtctgtattccggagataatgcctatcgacagctttgtgcagatggagaccagttggcaacagaaagacaaatttgcactggagtagtaaccagtacacaccgaactgcatgcacgccaaattgtccaggcttcttcgttcacacgattcttcgttcacgaacgcaataataaccatggagtacaagctcggatgtgttggtaatgctacgtgtttcaaatcaaaggcctgctgtagttttcaattttttttttctaaaaacatcacatcaaatctttaaacacatgcatcgagcattaaatatagataaaaacataaactaattatacagtttgcataaaaatcacgagatgaatcttttaagcctaattagttcatgattagccataaatgctacagtaatccacatttgctaattacggtttaattaggctcaaaagattcgtctcgcggttttcagatgaattgtaaaattaaattttttattcgtatccgaaaaccccatccaaaaattttcttttcgcgggtagtgttcgatcgccccatgcgatttccctgagatttccagagtcaccacatttaggaaccgagatacactgacagtgatgcgatcgaaaaaaaaaattcaacgcagaattgcaatgcacagcgctgggctggctgctacctctccccaacctacctagagatgcacgcaccgtattactccccccagcccagcacgcagattggttacctcctcgacgcctcgcgtcggctgacgcctgacagctagccaccatccagccagccaacgcgacttcgcgggcgattgcgcattcgcggcgcggcctcgcgcacggaagaaacagcccaaacaaacagctagtatctcgcccatctccccgcgtccgcgtgcacgctgcggcgtacgtcgcgtgcgcacacgggaatttcccttccgctacacaggcgcgacgacgaattgaagcatccgcgcggtccacttccccgtttgttgcttcccccacctggccatgcacgcgtgccgcgtacggtgcgcgcgcgcgctacagcctcgttaaaacccgcgtcgttctcacacacacttccaccatctccatcagtgtgcaccaccacgagagcggtggctatgcagccatgcgggcgccgtctcctcggcgccggcaccgcctcgccgccgccgctgccgggcttgggttcggcttcggcccactcgatggaccgcgcgcagcgggcgcacatggtgcgggcgctgggggtgaccaccacggtgctcttcgtcgccagcgtctcctacatcgcgctcaccgcgctctacgcctgcttctgcgacggcggcgggcggcgacggcgagaagacggcgggtcgtcgtcggtgcgccccgagccgtccgaggagaccaagcgcgcgctcgacgggatcccggtgcacgtggtccagatgccgccccgcgacggcggcggcggcggcgccgacgaggagggcggcagcggcgactgcgcggtgtgcctggcggagtacgccgccggggacgaggtgcgcgtgctgccggcgtgcgggcatgggttccacagggagtgcgtcgaccggtggctgctcacgcgcgcgcccacctgccccgtctgccgcgcacccgtcgtcgcgcgcgtcgagggcccggacgacgacgccaaggaggattactgcggcgacggcgagagcgtcgagaggcacggcggcggcggcggcgacattggcttcctgtccgtcgccggcgagtcccgcgtgcttcctgcgatttgattttgctacgagtactcatcagctgtaatagggtacttagtaggtgtttagctcaattttgctagctgtggacaaacgtagcttagtaggatgattcgagtttgtttattggcgagagcaataacgatcatacgagtagtttcactttcagggttacaagttcatgtgcgatcaatctggttatttagttattataccttcttaaaatttctgacctgaatttgtaggaagtactgtagtatgcttgttttgcttcatactcctagctagtaaccactgattgttatggttttcagcaatctgcaatcatcgtcagagtctcagacattcagacatcagtcacctgcacaagaaatctttcgtacatacaccgtcgtcagcctacaacaaagtagaaaaatttgcagagagaaatcagtggcagagaatgttaacaatgtttaggtctgtgatttgcagacaaacaacgtgcggtcgagaaccaagcggatggagtccagcacatcatcggtcgacattcctcacaactgaattagcttagctagctactgtaggacaccgttcgttacttcagcatcaaattcagcaacagtgcaacaccttgtagaattcagaaaatatgacctgtctgttgtttttttttttaaaaggaacatctgttggtttgataaaacttgaggattttcatttcattaacagggatatacatagtacatttgcaagaacacaaaacattattataatccctacttacactctggcaacaacaacaatgtcacacaaattgtctttctacgaacatgacatgctttcttgctacaaatttgacaaatcactgacaaggaaagaaacaccataaaaatcttcaagaaagggggtaaaatttagaagccaaatccaagtgcaatcagtagagaaaccaagccggaggtgacgacgacggcggcgtgcgctcctcttggccgctcgccggagctgtcctccaatggctgccccgcgccgttcagcacctggtgctgtccaaacgcgccctgctgctgcccctgccccccgatcgggagcccccccgccgccgcgccatggccagcgctcggcgccagcgcgtccggcaccgcggcggcctccggcggcggcgacgctcccagtggcaggtggtgcggcgaaccgtgctgctgcggcatgccgccgccggcgggcgcagcaggcgggagtgctatgccacctggtgcgccggaaggtgtcttgccgtgcggcaatggcggggagagagcaggcacgtcgacgggtggcaatggcgtgtgaggaacaaatgccgtcggagccggcggtggcgacgagtacagcggctggtcaggagagacagggtacgtgtcggccggcggtggtggtggcagcggcaagtccggcgtggcgggtgtcgcgtcagctggcggcggcggcagcaatggctggtcaggcatagtgtcaaccggtggctggtcgggcgaggcgggcagcgacgtgtcaaccggtggcgcgagctggtctccgaaagacaggtccgagctcccggcgccggcgagggtcgacgccggcggcgtcagaagcttcgctgtggttgtggtcgacggcggcgggagcacgtccatcgtcggcgacggcgagaccggcgcggccgcgccgcactgctgccccgtccacggctcgccgctcgcctgccacaccgacacgccgtccttgctcacgatcctcatgtcgccgccgtcgtcaaggctcagcgttcccggctcggcgtcgatcccggtgtcccagagagagtgcccgccggcgaagagctcgagccccaccggcgagaacgccaggtcgcacgcgtcggcgccgccgacaagggtgcactccgactcccacacgctgccaccaccgccggcgccgccgccagcctgctggatttggacgtagcacgcgtcggcgcccgggccaccggcggagctgtccacggcgcggcggaggtacgcggcgtacgacccagacggcgaggtgaggaaaggctgcgcgctctggccgacgtccacggcgggcgcgacggtggcgatcacctgctgctcggtggttcttgatatgtagcttttgggagaggcggccatggcggcggcgagccgcatcacgagcaggaggacagcaagtgaagaagacatggtgaaaatggtggtgaggtgtgaggagcttggcaatggagggggtagggttttaatggaggcaagaggaggatttggtgcagcttttttgtggagcaactctcaggtgtagtggtagtaggagaaaggtgtgcattgcatggagatggatggagtagagggaatctgaagttttaatccaagattaattagcccaagtttcagttagagattgtagtgtagttggggtcatttggtcatgttcatttgttcaacagatccaacaggttgcattaggtggaatgcagccaaactttttcagtctgtactctgtctaacactctaattcaggataactttgttaataggtattgataccttcccaaaaaataaatggaaaactactggttatatcagttcaaaagggacgtactactactactcaagttatgtattgtgattttcttcgcatttcagaagagtagaatgtccatgaacagttaaatgagaaaaaaaagacagcgtgcactaaatcacatatcatcgaaatgtgaatacactataactaaacacatgcgtaagctatttgaaaccatacacatctcaagagaagataatctgaaatgcaatctcccatactcccacgcaaacggatatccaaaacgagtatgaaaacattcacagctagttgatttgaacattagttcagttacatggaattggcgttccacaaaatggtaaaaagcatacagttagagtgtgaattctttccaaacactaatgatctttggcacaaccgtacaattactgtaataactgttgcagaaatccaaagtagaaacatgcgcaggttcaaggctctcaatttctgctgtatattattatgatttttaatctccatggatcgtgtaacgctcccacttcttggtaggatcatagatctgcaagacaggctagttgttactccaaagaatatctatgccttgtacaagaatgaaaggataaaaaggtgaatgtccaacctcccatcttgatgcaggaaatatatgtttgtttttctcataccagtgtctctctacgacttttcccgcatgagactacagtcataaagcatgaggtagaaacttagaatgcaacattgggaactacaaatacaagatatcggtagacatgttacctcgtccttttcttttgttgcatcagcaatggtccgcacatcctcatgaacatcaaagtggaaaagctgagaaagaaaggacagaaaaacaagtgtcagcaaatgattaactcaggtcatcaatattcgtctggacaaacagaaaaatatcctgtccgcagaagaaccgaagttctatgttgtgacatccatgtcttaaaataaagtgattatacatatgaatgaattatatataagctatcaacatattttatcaaaacaaataccacaggagtactaacaaatcatgcattaccggtccactcttgccccttgctttgttgataatcaactcatagaagctatgttgctgttaccaaaacaacaaacatgggattaaaataagagtaaaaaaatacataaacaacaatgcaattgacaaggtaacaaacataagctttgcatacatgagggataataagatcttccttcacataaagaagattctcaactgatgttgtccgcacttcacggaactcaggggcaagctgctgctgaacagcccttaggaattctccaatggagtcacctttacggacctgccaggtatataggtgttgtttcaatcatatggtccacatgttcagaacaatcaaaagaggaacacctttttcaatggttagaaattacctggataactctcctatgcccagtgccatcccagtaactgtaagtaattgtcagaggttcatctgacacacgaggcattttgctaatcagttaggatgcaaaaattactcacaagggaaaaatagagtgaaatgattaaacactaatggtaattaatgctataagcttgtggcaatacttttaatcagttcctgctcacgcgaccattgtttcttcaaacgctctcgctctgcttgttcctctgcttctctctccctgatggatcattcttagcaaccagcttgcaggttaaacaacacatggaaacaaataatcgatcatcacagaaagataatcataaactaaaagaatacctgtcaggaagaaaacttgtctcaacagtagggtccttcccaagtttgacaggaccatgtttcttttgaggttcttctgtaaaacaatttaaagcataatgtccatacttgctttacaggtaaggtaacttcacaaacttaaacaaatcaagattcaggacacacacacaaaaaaaggacagtacaaacacaaaccccatggcactaaactgccaattcataacgtaaacaatagagagagaatgttcattctgaatgaaaccctgcccaggacccaatctttgcttagatgctttgactaaattagtttgtcgagttgattcatttaagggacgtcacatgagatgttcaaacattaacaaaaaagttagaacatggtaatacaaaataggatatcacaagaccctagaaaggttaagaggaccatacgattctcaaattcatcctcatcacttccattctcaatctcatcacagaaagataaccgtggatctcccctcactctcctctttttccgcttttgcatttgcaattcttcttccctgaaaacaaaaaataaataaactattttgatatacacatataaggtaatggcacaaattatgatagactaggactccaatctcactcttgttgcaacttttgaagcttctccttctcttcttcctcaattttggtccgtatattaaccctctgttcagccacatggatgaaacattagatggtgaaaattcactttttgacagaatggtaagaaatatatctggatattaccttctcgacatactgctcccttgtaactaaaccgactgtttccttcttaaacgcagtctcaagaatctgaaagtcatagtccatactgttaggtgttagcttctaaaacacagataaaaaatatataaatttctgttgtgcctttagaaaatgagataattcagaaccatgccaattgtgaagcatatatggggggaaatgttttttcttttaagtttaaaagacaaaatataacagaagtggttcaatacaaaagctattctgcagcaaatcacatagctgtagcaatccaacatagaactacagaagtatagataacatccacatcctaatcaaattaaacaagagagataagacaagtatcgaccaagagtattacaaatgacaatttcacatcacaccaccagagaacaagcgcttaaaaacctaggatgacaagtacaacaaaatatgtgaaggcatggtaagaaaaatgtaaggacaaccagttctagtgagagacaaactagtttcgcgagtgcacgcgcacacaaatacggagatcagtagtaggtcactgagcctcacgggcaagcgaattttcctacctacgcgtgtgccctagaaggtagaagcctagtccgattcatatgatggcggatggccatacctcggaggtgctggagccgaactggagcaggccgggctggccatcggaggacttgttcttgagctcctcgatcttgcggcgctccgcctcccgctgcttctccagccgccggatcttcacggcgtcctgagccgtgccgacgtacccgtccccgaaccccgacatctcgtcacccccgccgctcttcctcggtcagacgagggattccagagattccagagaaactcgcagccgacgcgcggccgccgcggaaggtggagacggcaaccggcggtgggattgctcgccgccgccgagagcggaaggaatagggatttggggagggggaaactgctcgctgccctcgcgcttacttgggctgggccttaccgacttacaatttgagggagtattagcttagttgggaagttgggccacgtttcatagaggcccactagacaagtgcggcccgatggatagtctgccctcgagctgccgttttcctattaattatttttttttaaaaaaaaggaaaatgatacatagaaagttcttacagacttttcataaacatgatatgtcattgatgttgcatgttactacatccgtcccaaaatatagtaacttttggttataaatctggacacacaattgtctagattcataggtaaaaatgcttacattttggagtatttatatcttgatactctattttataactactgactaaatgaaacgaacttttttttggctgaatcaattcttagtaagattttgagaaaacaaagttttagtacaactcagcaagtcagaaacaatgttactgaaagtcttagacacttgagatttttgttgcaagagttttgtaaaaaaaaagaagaagaagaaggtacagtacgtagtaatgctggaagaaaaacacttttttttataatggaagaaagacgaagaaattaaacaaacaaggtttttatatgaccaaaccaaacaagttttaaattgctataaattgttgaaaaccaaacaaatcatgatgttacacaagcatgattcgaccgagaataaatgaaacccaacataagtttgggactttaacacaaacaactccagaaacatagttcgacgacccatgcaagaattgcatgcacaacaacatcaatggagcaaagctccctaaggctcacagagccacacgccgagtcaggaaacgacatggctaaattattcgttgaaacggaaatgatgcagacgaaatcttcggcaccaaatggattgacgacgaacaatccagcttcttgatgattaagcttgcttcttcttcatcccacctccacgcttcttgctaccgccacctgagctccccggagcatctgcaacacgcacgatcgagacggcaaaaactgcgttaggattgcacatttgtacacggtgatcacgagcaaaaccaagcacgatcgattaattacctgccggcggcggtggctgctgggcgcgagaggcggcggcggtcttactcttgtccatcctgttcttgcgacgctccctggcctccagctccaccctgtcgcggccaccacctgccaccgcaaacatgggtccaccagttctcctgctgctgccgatcatctcccatggcatatcgtcgaccgtagcctcgatcgcgcggcgctgcacgaggtactcctcgaacgcccccgccggcgcggcgggcaccagtcgcgcccgcgctggcccagtcggtggacgaaccagcaccggccaggaaggcagcccggacggcagcgccggaggcgcggctggggcggcggcagcagcagcaggaggagtaggcgcgcgcggcgtagcagcagcaggtggagaagtgggcgctcgccgcgcacgaagatgaggagcaggcaagcgcagtgaaagaggagcggtgggcgcgcacggcatagcatacgacaagctcacgccaccatagctgaagctgtagcggccgatggtcgttggcatggtccacccacgaggtgcagcaggaggaggagtagccacgggcggcgcacgaagatgaggagcaggtgcgtggagtgcaagaggagcagtggacgcgcgcggcgcagcggacgacgagctcgcgccgctgtcgctgaagctgtagcgggcggtggtcggtgacacggtccacccgcgcggtgcagcaacaggaggagctggtgcggatgacgcacgaggatggggaacagatacacgcagtgcacgaagatgaggcgcaagcgcgcgcagtgcaagaggagcactgggcatgcgcggcacagtagatggcgagcttgcgctgtcgggcggcgtagcaacaggaggagcaatcatgggcggcgcagtagcaggaggagcagtcacgggcggcgtatgaactgaaggggcaggcgagggcagcgtagaaactggaggagcaggcgcgggtggcgtaggaacaggaggagcaggcatgtgccgcacacgaagatgaggtgctggtgagcgcagtgcaagagaagtagtgggcacatgtggcgtactagatgacgagctcactccatcatagtcgaaactgtaccgggcggtggtcagtgacacaataaacccaggcggcacatcagcaggaggagcaggcgcatgtggcgtaggaacaggaggggcgggcacgaacggtgtaggaacagtaggagcggacgcgcgtgacacatgaagatgaggtgcaagcgcgcgcagtgcaagagaagtagtgtgcatgcgtggcgtagcagacaacaagcttgctccatcgtagccgaagctggggcgggtggtggtcggtgagacagtaaacctgggtggcacatcagcaggaggaccaggtgcgggcggcgtaggaacaagacgggtaggcgtgggcggcataggaacaggagttgcaggcgcgggtggtgtaggagcaggaggagcaagcgtgcgcggcgcacgaagatgaggtgcaggcgcgcgtagtgcaagagaaatagtgcgcatgcgtggcgtagcaaacgacgagctcgctccatcatagccgaggctgtggcaggtggtggtcggtgacacagtaaacccgggcggcacatcagcaggaggagcaggagtggcaggcgtgggcggcgtaggaacatgaaaggtaggcgcgggtggcgtaggagcaggaggagcaagcgtgcacgatggcgcacgaagatgaggtgcaggcgcgcgtagtgaaagagaagtagagcgcacgcgtggcatagtagacgacgagctcgctccatcatagccgaagttgtggcagatggtggtcgatgacacagtaaacctgggtggcacatcggcaggaggagtaggcgcgggcggtgtaggaacaggaggagcaggcgcgggcggcataggaacatgagttgcaagcgcgggtggcgtaggaacagggggagcaagcccgcacggcgcacgaagatgaggtggcgcgcgcagtgcaagagaagcagtgggcgcacgcggcatagcagacgacgagctcgctccaccgtagctgaagctatagcgggcagtggtcggtgacactgtcaacccgaccagcgcaacagtagaaggagtaggcacgggcagtgcaggaacataaggagtagtctcgggcggtgcagaatgagcaatgggtgtgagcggcgcagcagtcgacgagctcgcaccaccatcgccgaagcggtcgttgtcggtggtcggtgatacggtccacccaccgtgtggcacaacaagatgaggagcaggcgcgggcggtgcaggaacaagaggagcaggtacagacggcacgacaagaagaagaagaggagtaggcccccgcgtgatagtaggagcagcgggcgcagtagaggatgagctcgcaccgccgtaaccatagccaaagcggtagcggccggtgcccgacgacacggtccacctgcacgggggcacaggccacacgaatgtggtggcgatgggcgtcatcgacggccccgcgggccggcgcgcggtgaaactaaggacgggcggtggcggtgcaggcacttgtgattcttcggaagtgaagctggtgtcaatgatgtggtagctctcgccgtcagggaggagtgacgggacgatgcggctccagggattgcggctgggcaggcgcctctaggccgggatggcgtgttgggtcggaggctgctgggctgccgccccgccaccaccgccgagaagccggtcctggctggcaaggcgaatgggccggatcgccatggcagcggcgatggcgtaggggatgatgaggtggcgaggtggaaggccttgacgggccgggctctcgttggcatctccttgctgggccgggttctcgttggcgtctcccatggtaggcaggtcaggtcggcggatttcaccaccttcctccgttcgaatcttgcagacaaaacctgtgtggggaaaaaaattgaaaaaatggcattggcgatggcaccacacaaaacatacatgaacctgcaaaaacctgtaataaatcgctagaatttcacagagatctgataatcacaagcttacaagaacgtctaaacctcctgtaaaccaccaagtcccatgtagatctgattagaaaaagcttacaacaaagtctagatctttagatggtggatttcaggatttcaaaagcaagaaacaagtttttttctctctctactctacggtattcaaagctatgtacttctaagaacagaaactagattagaatttgtgacaagcgagagggaacttacctctctccaatctacggtattcaaagctatgtacttttaagaacagaaaacatattagaatttgtgacaagcgagaaggaacttacctctctacaaatctacggtatgcaaagctatgtacttctaagaacagaaaccagattagaatttgtgagaaaaacaagagggaacttaccaggttgcaggaagcttatttcttcatgtatctgatttccttcaatctgtgtgtagtttttacagaatgggggcttagttttatagtcaaatttcagtgcttcaccctgtctttgtgaacgcgttctatacactgtctcttgtttctttctaaacataaccaattctttatctgtgtgaaatatgttgcaccggtacaaaaaactactccaagcaaaaggaaatgttttatagtatatcacaattgtatcctctaaaataggtgagatatattgagatatgaacacagatgtttcaactttagccgaatctcagtggtactgatatattgagacatgaacacagatgttttttgaaacccaaaaaaaaaggtatgaacacggaaagtgactgccaaccagtacagctgcatccaaccgcccactgctactactgatttggccataataacattactaccaaatatacaaatcttcctggacttatttggtggagcatttatttcagaacatatctggcatcagcaactaattcatatctaagtatggaggttctcatttatttttacagatatatgaggaggtatatatctgtaaaaatat

SEQ ID NO: 26626 - DNA, 1494 bp, Oryza sativa
gaggaagtttatgtcaaacaaccaccaggttttgaaaatcctgattttcccaaccatgtttttaaattgtctaaagctttgtatggtttaaaacaagctcctagggcatggtatgatagacttaagaactttttgcttgcgaaaggttttacaatgggtaatgttgataaaatgctttttgttcttaagcatggtgataatcaacttttcgttcagatatatgtggatgatatcatctttggttgttcgactcacgctttggttgtagattttgctgagactatgcgcagggaatttgagatgagcatgatgggtgagttatcgtactttttgggattgcaaattaagcaaacacctcaaggtacttttgtgcatcaaacgaagtatacgaaggatcttttgagacggttcaagatggagaattgcaagtcaatttcaataccaattggttctacagctgtgctggatcctgatgaagatggtgaagctgttgatcaaaaggaatatagaagtatgattggatctttattgtatctaactgcttctaggccagacatacaatttgttgtgtgtttgtgtgcacgctttcaagcttctcctcgtgcttcacatcgtcaagcggtcaagcgaataatgaggtatttgaatcatacacttgagtttggaatttggtattctacttcatcttctatatgcttaagtggatattccgatgctgattttggaggttgtagaattgataggaaaagtactagtggaacatgtcattttcttggtacatcattgattgcatggtcttctaggaaacaatctagtgttgctcaatcaactgctgaatctgaatatgttgctgctgctagttgttgttcacagattctttggcttttatcaactttgaaagattatggtcttacttttgagaaagtacctctattttgtgataatactagtgctatcaatattgctaagaatcctgttcaacactcacgcacaaaacacattgatattcgttttcactttttgaggaatcatgttgagaaaggagatattgagttgcagtttttggacacaaagttgtaaattgctgatattttcactaaacctttggattctaatcgctttgcttttcttcgtggtgaattgggcgtaattcatccttttggcatggtttgagggggagtttgtacctcatggttttatcaagcaataatatgacaatgaaaaaattgataaaagagagctttgtttatgcatatggtattttcttgtgcatgctagcaatactttgaaggtttatttgtctctagcatagcttgtatatattctagtcttttcatgagatttagattttgcttttaagagagatgaggcatgacacttaaattctatacttgaattaagaaaatatgcaatgttgatgctagcatatggtttgatttataaatgctatatatatatatatatatatatatatatatatatatatatatatat

SEQ ID NO: 26627 - DNA, 14546 bp, Oryza sativa
  unsure (1)..(14546): unsure at all n locations
aaaaaggctcaagaaaagaaaaggttaaaaaacttctcttggttattttgtgttaaaggttatttgagaaagagtgataaatgcaataggtctatgtgtttagtgtttattcttcaacctatgtgcttgttaagatgttgcattataaatcatatgaaatcatgaattttgattgttgattcaagcttaattgtaaaatctttggttcatggttatactttaatacatgcttgttttgttatagatgggtttatcttctttttattgcaacacatgacttgatatgctatatgtatgctaagctcttgaacattaataaacataattcctatgcttgatgaaatcattgtcaaaagggggagaagtaatgtgaaatttttggattttttggagtagcaaagtgaatttttgagaagagcatgttgttggttcaattgggaatttctttcttttaaaaagggggagaagttttcttttcgatttttgagcacgatgtgtacatttgtacgaagtgtgctttttaccaccaaatatcaaaacatttttatgagtttgccaatgtgttcatcaagggggagattgtaaaatcaaaggtgtttttgattattattctgtgatgaacaattgggcattggacattattggttttgtatttggaattaatcacgaagtggttttggagatgattggttttcacaggtgaaatctgcggcattaacattttatgtggaccggtcagaccgggctctggtagccggtcagaccggcgtgtatcgcgcggtcagaccggcgcgacccgcggtctgaccggccgacactgtgttggtttcggtttcgggttgtttatttggatatccgagtttattccatgattatgacttctagatggatactatacgtatgtaatactattgtttgctgctaatgagtcaagttggagatagcttggtctcggaatatggtttctttgtttgttccatgtgtaggtgactcgatgtctcgagaaagtatttgcggtgatggacagggagtcggcttggggataagacgacgtccttggtggtcagagatcatgcgggatacttaggctagagttgatgcacgtggttgatggagtttccatatggcatacgatggagttattgtgtgagtatgggatgcggagtcgaatttggaaggagtccaaatttggtacgattggttatgtaaagtttctttcttgtactagtgggtttcctaaggtgtttaggactcctagtatgagtttggttcgtggctttaggctgcctacctcatgtataaatagagggggagcgtgaggcttccctgtatcgctttagagagtaatagagttgagttttgagttagggtttcgagtttagtcgaaatttttgtaaggagtgctgttggtgcactttgtaaatacagagagaatcaataaagtcgtcatccactttaagagttcttcgatttgtgtttaccgggttttggcggtctaaccggcggcacaccggcggtcagaccggtggcatcacggcggtccgaccggcgggcacacggcggtcagaccggcggcgacaggagtcggcggtaggtgttttcggcggttcgaccgatcgatctacatcggtcagaccgacgttcatcaggcagtcagactggctcaactacttcagtcagactgcgatccatcgatttcgagggtaacttttatttccgctaaaagttttcggtttttgggtataccaaccattcacccccctctggttggcttagttcttgtgattcgatcctacacgtgcaagtctgaataagtaagttagatctgtataattttctgcctaattaatcttctcattggtcattacttaatgctttgaatctttggggggaaagtttgcctgcgcaagaaacgttgcatatctatatgtacaggcaacctaccctgcatcctcctgttgaagtcctgattcctgaatgataggtactgcacaacagtatgatgccattaagtacgacaaattggcgagcaatttgtgattaaaccattggttttatggaaagttgcaaaagaaaactggttgctgcttctccggttccggtaacagcctaacagggtcgcttcattaggtttgaagcgtcaaatgataagctttattattcttcgctttcactttctacatcgcaaacattgctggatagaatattgtgcacaattccaatcgaagtacagaaaatcacattaaatcgctcgtttgccataagaaaaacaaaacaaaaaggacggtaatcttacttcaccatttttttctcttttggtgacgtaaacacgcgccgtactcatgcgtgtgccgtaacatactcccttcgtcccagaaaaagcaaaccctgggtttgcgtgtccaactttgactgtccgtcttatatgaaatatttttataatttatatttttattgttgttagatgataaaacatgattaatattttatgcgtgacttgtctttttaattttttttaaaaaaaattcaaataagacgaacggtcaaacgttggacacggaaaccagggtttgtctttttttaggacggagggagtatgttggaagacacccactaacgttcagtcgtatacaatactactatgttggagtacgtaatcagtatttgaactcttgtagattataaatcgctcaactttaacaggttaaaagtaaccgagcaaatgttaggcatcaccactgctgtcgacggacctggtcatgcttgtgcctaggtgcaaaaggtgaaaatttagcttgcgggtgtttagatccaggagcgtaaagtttttgcttgtcatgtcgggtattatatagaatatcgtatagggtgtttgggcactaataaaaaactaattacagaatctgtcaataaaccacgaaacgaatttattaagtctaattaacccgtcattagcacatgtttactgtagcaccacattgtcaaatcatttaccaattggcttaaaaagattcgtctcataaattagtcgcaaactatgcaattagttttttttagcctatatttaatactccatgcaagtgttaaacgtttaatgtgataggatgtaaaattttagagtatgctcttattctttaatcttttatgaactgtggacattttgacatttttggttgcttacgccgacatttttctctgtgttttcccttttccgcacctgacccggtgtgagctgcacgttacgtttgctacgctgtaccccccccgggtctgtacgtacacggggcacgcgctcccgaagaaaacgccaactttgccaactctccgggccgtcaaaccggtcagacccaggagacgcgaaatcctgcgttgggcggccatgggtttttccgggcaaaaacaccggtcgatcggtctcgccgccgcgccgccgcccccgccccgcgtgcgcgtgaatgattagacgagtggcccgggaagcgagccatggtttcgcagggggaaaaaaacggtcagtttcgccgcgcggcgtgcatgattagccgcgaaccagccgactatcggccatgggtttttccgggtttcgctgtgcgcgtgcatgattagccgcgcgaaccaggcggcgggcgcgcggaggcggggaggaaacggccggcgcgggttgttctcatgcctggggtgccgacgtgcggcgtgaattcgaccgcgtttttgtacgcttcctcgcggagatttctgtgtcggatcgtgccgttttggcgacgtacactccactcgtgtcacacccctggcacagttggcacgggtcgtacaacactgccacgaacatttttcacagtgtgcgcgaaacagaaacagaggggaaaacctgcaagttaacgtgtttttatactacttggaaaattagaggatttttaggcgtcctcgaagtaaatcggacatggagtaattcggattcagatcagattgaggaccggccaaaagctaccgatccagcgttgtctgtctcgtaggactgttcaggcttcaacagagtttcttataaatatctaatctttgaaaatatacgagcagcaaagtttcataaagagagaaagcgagtgaacaccgtcttgagaaaacgaacaaaagcgagtgaacagcgagtgacagggacggggaggcaaggcaagtacggcaggacagaacaggaatacaggatattgcagagattacagccggggtaggcaccatcatttttctgaagaacgaaaccggcctttcggtgtctgaacagcccggatgaaaggatcatcaacgatgatgcaggctccagcagtcataaatcataggagtaccggagtaaacatggtccggatgaggtccagatagtaaggctgtgtttagatttaaagtttggatccaaacttcagtccttttccatcatattaacctatcatacacacacaatttttcagtcacatcatctctaattttaatcaaaatacaaactttgcgctgaaataaacacagcctaaaagtacttcaagtacttcactctacatggtgatggacaggcccacttgtaaattgcagtacgtaaatcagtgtacgaacttttggcaacttgagacgcttttcatgcacaccaaatcagtagcagtgtcacaccaaaaccaatactcaaatgtgaaaaatgcttcgaaattcactgcagtagtttttttttctcttttaaaaaaccggagtagtttttctagtgttccccaaatcagtaggagtactacctagtgaaaaacaaaacttactgttcctaactttaacctttaagactgtgtttagatctaaaatttggatccaaacttcagtacttttctatcacattaacctgtcatacacacataacttttcagtcacatcatctctaatttcaactaaaatctaaactttggatccaactaaacacagcttaagattcgccttgtattttaaataaacattttggtggctgcagtctgcaagagccgacgctcctggactcggaatcgcatcaaaccagagaatcctgcacatcggttgccgaccaccgcgacaaaacacatgcaaatcgcagtggaaaaaggataagaaaaccacatcaaaatgacaggcagaccattagaacccaatcagcgagagaattcgtcgtcgaaagctgctgattactgcaaaacccgcagcttagcgcttgacgcctactggatggatcgacgacgactactccaacttgtctccaaccattcagaagatgccgattgcgatacgtacggaagcacatggtggtcgcgttctccgtactcctatcctactactccctctgtcaaaaaaaaaaaaggcaaaccctgagtttccgtatctaactttgacggtccgttttatatgaattttttttataattcgtatttttattgttgttagatgataaaacatgattaatattttatacgtgacttgtctttttaattttttttataatatttttaaataagacggacggttaaacattggacacagagtcttttcgacggagggagaattcgcgttcggctatcagcatcaccagcgcgccagcagcttgcaggccttatcatatcagatcgcgacgcgtcatgataagccgcctgaaacttcctcccgttttgttcttgtccttaatttttactgtagcatggaggaaacaacggtgtttttttcttcttctgacagtacatgtgaactgtttgtgacagctgcaattttgttgtactgatgacaagatgctgccgtggaattcacgtgttagggccagagcaaggagtatgcattaatagtactgtttattagcgatcttttcttttctgattttacattttgaatttcgttggcacttttccctagctatggcttctaaacgatcgtttgctagtagtacaaaagttttcttggagcatataatttttttctatggtaaattttcagctttgtactgattcatttatttattataaagaccagattatacatcagtcaaataatttcagttctctcaaacaggctttgtagaaaatgtgtttgacattctgcatttcatactatacattccctagaacttcgcggcgcagcaacaatatttgaaacgctagattacttgtaccgtgctactcttcgagccaaatgtcgacgtatttgctggaccatggttggcgagacaaagtcctcgacaactaggaggttgtctcgttgatggagcatctttcgctcatcagcagggttatcttctctttaattattcatactagagatcaatacacttgaatagtgtaccttgtgggagatagatttttttgtccctcaagacaatatcccctcttttgtgtatgatgtgaaacttaacaacgaattatacgatctattccaagttaaacttgttatttttgtttttacttgtgtaaattgaatttaaatttacatgtttgtgaaataacatattacataatgatctatcttactaaattctttcaattttttataacattttaaacgacaaaaaaaaagtgagagaatatcctctccctgatgtactacaatccaaacaacacttcgctctcaatacatcttgagtcatgatgggaaaagcgaatgatcgcatcactttttggagttttggtgcacttttcgtatatctcagaatgtgttgcttcactccaaatcagtttgacgtgtttttttgggggtaaattaatatggttatagaagggataatcgtgatagcgttttcgatcaattcgtaggatttttgacatttgatttggcaagcaggcaaatcaaaatcgccattcaagataaggtgcatagtacaagtggtgaccaagaagaacaggtgggcttgtcatgcctatgcgtcgttcttatcctctaaaactcgagcttaaatttggtcaggcatggtttgaaacgaagctcgttatgtactccacgctctcttcgtgttaaaaaaaaaacttttatctatgaagctagagagactcttgtccaagtctatggcagattttggcagtttgtgaaatcttgtcatataccatgagcatttagtcgttgtttgagtaataacatcatctctagtttaaattgtgtagattcgtttacagcacgtgagtaaactcacgatcgaggtaatcgattcgagtttgttaagagaagctgagaacgctggtcaaatttgagcttgttaagagcacctgagaatcgactgcgtgtgaattttgagtttgtctacgggcaaatatatttgcgccttcgccgttagtttgcttatttaccttatcctcgctggccgctgcgacacggtttgacgacgtcacatcagcaccgtgctccacgtcggcctcgcgatttactgggtcccactttcagtgtctcgtctggccaccttcctcctctccgagactccgatcacacgtgaagcgagagggatgccgcggcgacggcggcgatggacgcagcggccaccggtgggaacgagagcccttgccgctgcttaattattcgggggatcatgtggtcggcgagcccttctgcattaacttggatctatagtagaacatattgtccatcgatcgtcatagctaattttagtttttttcccgaggagataaaaattaaggaattgctatatatcattcgtcagaaatttgggaatgaaatcttatatattttggaccattggatctgtgcctagattcgtgcatcgacttcttgtccaactttgacgaactccccttctcatgtgtcggtgacaccccaatcgagaaagagataaatcgataaagctgacggttggtttgaggtgggtggctcaccaaggaacacagtcagttatatttcacaattagatgatcggcatcctatttatacctgcaatatgtttttttatttattattattaagtaatttttagaaagccctatattttattatgattaaagttgtacaaaatcacaagtattatgacttgtgacacataaaccatgtattatggatttaaaagtttcacaaacttcacatttgtgcatgtttagtacaaatttacctgaattctaaaacatagagtgtatgcaatatttttaattaatcaagattttattaaaggtggtgttttagaaacatactagtaatcgtgcacgtgcaatgcacgtttccaacatataaaaacactcaaaatatgtcattttcctgcaatatatgtcatttataatctttgtccttcaacagacaccagaaagttatggcacctcacaaaagggaaaatgaaccttctgctgcagcctacataacacatttaagtggcaaacatgtaagcatatcagttaatgctaatgacctctgaagcaaaggacatacttatgggcacatatccttttacaattgaagtaaaatgaagcactgcaagattcaaagagctgctcactccacctagagagaatttgatctttatgcatacatagatggaaaaagaaataattgactaaacctggtgttctgaatgaatttcagactacaaacttgtatgtataacttgatgaatagaagctagcaacttccagaatttagcacagagaagaaaagactgtaatcaaatggattctggaattgaaatgctgccagagttaagtgaataatcagttggaactaacccaatattcagaccataggaggaaaatatcagatattcagagttattaatctagcaagaaagtgcagtggcagtgtgctgaagatcactatagaataaataatggttttaggctgtaccttactcagctcttctgaagatcacctttccctgaaatgattacagtatgcagttaaaacttaaaaccagtaattaattcttcacagggtacacaattttcggccatcaaatccattccatatgcgccaactaccattctgaattcctgatacttctattacacatgtttaattcttaaccttgctttagctttatccacttgaaaacttatactatcttgttctgctaccaaccacccggaggaagctctaccatgtattatatccaaaagactacaaaaaccaaaagaattgagtttattttatcgtcccacgcagaacgaaaaacttaatcacaacagagtttcatcgagcaccatgtacaggaatgaatgaacgaatatgaatgaagttgtcggctgaggaaaaaggtagtgttagaccttaattagaagcatcaatctcctgagatggcatggcggatggagaggaggcaaagccatgataaaggaagaggaacatccctgctttcatatggctggagcagcagatggtgagggtctgaggccgatgccatcccgccggagcttaccaccctcttcgtcagacctggtgcctgcaacaacagtgagctgcttctggctcccggcatcgacgtctcccacagctcgttcttcaaccgcgccgacgccccaggcgcccacggtgcccctgccggcttcctcgacactttcgacgtcgccatcaacggcgcgctccgcgccgctcctgccgcggcttcaccggctttcctcctgccgaacctcaacgatgacgcgactgcgactctccacgcccaagccgtcgccgttctgaaccacgaccgcagattcgggtggcgctgccatggaaggtggagaagaaccgggggtggagccgtcggcatcggcgactacagaggaaccgacagcgaggtggagcagaagtcagcgaggacggagggagtgggtggttaagccgtggtgcacttccgacgggggcgccgaggcaacgggtggttggtgcatgtgtcccagcctccggtggcagcagcggcctcaaccctcagatctggggcggcacagaggaagttacatgccagaagccggcggcgacaagaagcagcatggcggagatggaggctggtgataaaaagaacagcgaatggtggaggccgtggcaatgtgaaacaatgtggacagcaaaatctggagatggaatcaacaaatggaccattacctcgctagctcccttgaggcttcttccattgtcaagatccaaatcaacaacagcccccccaaccttccaattgagccattgaggagtgaaacgacggccgacatgcaacgaaacggagcggccaagatacactacgaactccaccacggccggctagcttctgatctggccactgccacgacgccacaccagcacacgctctcgtgaaaccctaggcccctctcccgcaggtgtggccttccccgacaccgagccttcacgcgacggcggaagagatgaccggcggcctgcggccactacttattaggggaggatgtgcgcactggtattcaatgcgcgaggaggcgcatcatccggtgtcattgctctgtgcgcgggaataacgcggcaagcggtggcggggatagcgctcgaggcggtgttactgcgaaaggggttctcgcgctcgcccggtgggatgaggaatcggtgatttcaccgctacacagagggtggggacatggggattgatttcacctgtaggattgctagtcacaacttctcctttttatattagtatagatagaccataaaacctgtgattatttgccacgcttcataatacatgtggttttgtgcaaatttaaccataaaatatggagtggagttttctgaaacttttttaaaaaaataaagaaaagaaaaagctactaatccaaaccgtaaagaagacggggaatacgagaaatatctccaaacatatacgctgaaaaacaagaaaccgacgcagacttggatcgatgcgatttcagcagccgtcgtcgttgattcggattcggggagtaaccgcgcaagagcagcgacgatgaggttcggtttccgtctccgatttcccttggggttccatccccttcaaatttaacgcgacccttcactccccgtcgcatcgcatcttggctgactcgtcccgaaaatcttgagcgaccgagttaccggcggcggagatggtggtggctgacaatggcaagtgggcgctggagaaggctcgggcgctgcaagatttggaggaggaattcaaccaacagattgcaaggattctcagctgctaccagctacctgaccacatcaggctggatctccatgagcagcaccgcaatgactacaaggtgcctgacgatctccggctcaagttcgtgaatgccgttttcgaggggaaatccgggatgcttgatcaagacgaggaactcagggttcaggctcggaaggaatccgagaagttttgggtggaggcggcgggggcggcgaagaaggcgcaagcactacaagacatggaagagagaaacaggcaattgttctttaagcattatcctggcgtgcaagacatgcctgaccacattagggagtactgcttcaggaaattcatggaagatgccagggatgaggtagaggtcagattcgggatacgtaatcacgaaatgcgactcaggatccgagcttgggaggaatcgcagcagtttctgatcaagacaatggccgatgggcgggcagccaagaaagtgcagaccttgcaagatgaggagaagagatatgttcagggtgttaagaaaacttttgacagcgaaaacatatctgagtacttccaacaggctttcttccagcaaggcctacttgataatatccggctgcttttcatagatgatatagaggaganattcaatatgccagtgacgaagagaaacctaagggttacatttcggaggattacacaaggtgaaaggcgcaggccttacaagatttggaggacaaattcaacccacagactgcaaggattctcaagcgttatgacctacccgagcacatcaggctggatctccaggagcaacactacaacaactacaaggtgcctgacaatctccggatcaagttcataaatgctgttttcaatggaaatccccggatacttgatcacaagagggagctcaaggtccaggctcgcaaagaagcagaaaagttttggatcgaggcggcggcgacagcgaagaaggcacaagcactacaagatttggaagagagatacaagcaacaatttattaagcctagttatgacagggaagacatatctgagcacatgcaggagtatttcctcagggaaagaaagataactgacaaggcctatctcgagtacaagaataatgtagaggataaattcgcgatacgtaaccacgaaatgcaattgaagtttctagcctgggagaaaacacagcagtttcggattaagatgatggctgatgagcgggcggcgaagaaggtgaaggccctgcaagatatggaggagagatatgttcaagattatatcaacaaggttgaaagactagatgtacctgactacatcaagcagggcgttatccaggaatacaaggtacctgacggtacccgactacgttacataaattatatcgaggagaaattcaggatgcttgatgaccaagaggaacgtaaggttcacatttgggagaatttcaaaaagttgaagatccctctcacaataaagtctcccatcactgtcgctatcatgttctcgattggcatcatgatcttgttctccggcttccttgtccccaagatgcccaaatcgttgaagatcatgtgttgggcgacttcaattgtcatctgctttgcggccgtgctcagctacgataatgaaagctcgaagaccactgccccaactgaaatgcatgatctggaaaatcctccaagtatttaatactgaataatgccatttaactggcatacagttccatccctgtgtaatctattgttagataggaaatagtgctatttaacagatcggttagtaataagaacttgttagtaataagaagtcatctgagaactcgttccatccctatgtggaaaaacaagttcttttttatttggaaggtaaacaagttctttgttctagtgctttaagtctagctgtttacagtcttgtgcttgaaattttagacttcagtgtatttctatatgctatgagcctgttaatgacatactatcagactgatgaaagatgttttgatagagcagaaaatttatctgaatatccaatcaccggatcatgaattctgatagtacatctttcttgttttctgtaattatctaagcacacccactattatacaatgctgcgaggttggatagtcagattagttttcttcactatcaaaacatagtttgatcagagaagggaagtttttcagaaaaccacaagtcaaacttgatgaggcacagtaagtccagacttatgagacttgtttacagtcaattgattatttgttatcttgattgatatacttcaatagtaactttggtaaagtataaagaaatggtacatttcctgggctactttatcaaccaactccgaatcttttctttagatcagttgtagtaaagaagagttaatgtattcatttcacaatctgcatcctttgttttgcagccacatagaagacatagcatgtggtgctggaagctttttgatgttttcaattgtttttgacaaatttaaatgctgggtttaaaaaattcagtttaccttccatcttcatggttcaaagaaattactaccccctccatttcatattataagtcgctttgatttttttttttaagtttgaccaagtttatagaataatatagtagcatttccaacacaaacaaacataatatcaaaatatattcaaggttagatttaatgaaactaattttgtgttctagatgtcgctaaatttttctttaaacttggtcgagcttaaaaaaaattaactaggaaaaaagtcaaagcgacatactccctccgtcccataaaaaacccaatccttatgtccagattcaaaccaagaattggattttttatgggacggagggggtataatatgaaacagagggagtacatgtttgcaatgaatcattatgataaaataataaacatttctgttacattcaattggttataactttttgttttttgtaatcctcagttggactggtgaagagactaaggaactccagtatgctggcactattgcaagagtgtgcaacaaagtgcttcctatttcaagtattacaacacattaactcttaatgctgctgtcaaacattttctctgtaacactcaaaattttcagcaaccatcttgatatcatcttcttgttttaggcagttaaagctgcttcagatgctgaatcaggaggagtgcacttaagtggtggttcagctatgacactagaaaataagcagcaattattttgtttcttcatccttcaggcatttaaaacctaatgttattgtgcattatgcatgtttattctcctgatcgagccactcttttgctgagaatggctgccattgaaatgattacccaacttgcattacagcgtttttctaaacgtgaaggtactaatatgatgtcttatcatctgtgagaaagcgtgtttaaattcgtgaaaatattttcaaataatgtg

SEQ ID NO: 26628 - DNA, 25042 bp, Oryza sativa
ggaatgtccacaggaggcaacccggttggccgttgtgtgattcgaaaagctaagttccaaaaacttcccaaaagaaagtccacgtgccgcatcagacatcactactctttgtgttgctggagggattccatctttaggtttgcacctgaggcacctgtgccacatccatatcttcccatcattctccccaggtaaccttacagaggcaagatttctaacactgattgtgagactgccttgtcgatgggtgtagcatcgaacatgagattctgcaggttccttgcaagattcacagcacgaaatctgccagcgaagaccatataaattaataaggtaataaaaggtttttttaaaaaaaaagaatagaaggaggaaaaatgctgcacctgattaaataaatcttcgcggaaatatctaccgagtggcttatcaaaattaccgtagaactttatgcgaaagagctgcgattgcttgcatacaacccctctctgaggacatgcgattgacaaggacactaaaatgctttgtggattatcagatgttgggaaatattcaatgtggttttcattatggtcacgtacagctaatcctgcatgttcttcatctgatgtattttgccaaccattatccaagtcactttcaactctatgaaaacgtggtcccattggtgagcttttggatgtctgaacaataatgtctgaaggtggtacacaacccttatcaagggaggatcttggagaacgaggatatataccattagtgacaccgatgtactctgcctgatttaagttaggtcccagaaaagatttatccgcagatagcgggttttcagaatcattaaggcaatttgcaggcatgttgcacccattatctgaagttttctgaccaacaatttgaaaatcgttaaaatcctgaagacagtaacttgaggaacagttcccaccatccacatgattctcaagtggaagagctgaaatatctgaagggatctttggtagtgttgcaccctcatctgcaagatatgaggtctcaagtgataggtgataggctgcaaatagtgcaaactgtagagcaagtttaaccctccttaactcttcgtgggatgtgcctcttagaaggatctagtaaaaaaacaaggtggtttgattatgtaagtcacaaaacaaagcatgaagccttacatgatcatggcaatttacaataggtaatcaatatgtaactttgatgatcattgagtcaacaacgaacagtatgatgcttaccgtgcagcccaaccgtcttggacaaccatcaaaaaacatcagtgtcttggcagacttcttgtttgcattctttggtgatgaagactctgaaactcgttcaatccagaatgtttggcactgtccaagccttaccgaagtaacattttcaatggatgaagcaatttgagcacctgtgcagcgtgatatcctttctagaagtgatctcttgacattcagaactaaagagatatcttttgcaagaagctgttgagcatatagtggcacgcttttttcaacgagcaaaacatgaggtcgttgggcctctatttttgcaactgcaatcttaaggtattccttttcctgtaaaatcataatttagagttcatcatttacatgttgagagcaatcagataatcaccttaactagaaaatgaatgatgtgtaacctgttcaagaatgctgtttatcgatgctagtttgttcgaagccttttggtgttccagtgctccccccaaaagaagcaatctagggttctcatgctttgacaccatgcgtttatgttttacattcttagaacaaactacacctttaatgaaagtactgcaaacagatgaataccatttagccccagcaataaaatggcaaagaaggtcatgcaattcttatatacatgttattcattaaggcatacctatcattgggattccctgatgctacacatttgactttgacatagtccgtgggatccatgctaccacctttacttgtatctggccttacaaaggtagccgcctgccatgctaatgaggatattatgtctgaccatacatccacaggatcaacgccatgaccttggagcagctgggacacaagagccctgaaatgcccatgcaaagcattccttaggaactctttatgggctatattgtgttttccttttattcccagcgaatcatcttcaccaccatgatcatggttaacacgtgtgaaggtattcgtatcaccaacatcattgccatcataatcatcatcatcgtattcaaaaaaaccattttcaaagtcatcaccctcgtcctgaggtggtggtggataccaaatgagtctgttactctcaaaatcaatcggtatcgaggtattgttctgctgttcatcaccgcaaacaggtgaatccacaaagctagaataatcgacatcttcagagccatggacagaattcaaagggtagacaggagagtggcagctcctcctggaggatggacttgtgtctcctagtcccaatcgtctcacgggactatctaccgggctcgaagtccccaatctgaaggtgtacatcctactaatacttgtgctcaccgaatctgtatccgaagtgtcctgagaaaactcactgtgcggagagaaataccgctccgagtcatcaccatcttcataaccaacactcctatacatccagcaaaccttattcagtgagaatacttttttcacgctatatcctcctggctatgcatcaaaaagctaaatttctcaccttgtcgagcatcggagaggaccaggtgacgagaggcgccgccacccggcgtacctcgacgaagacggcgtggggacgcgctccggcggggacaccgacggcccatccgtaccgtcaccacgctgctccatggcagcgcctcggcctccgttaataggccggaagccgaggtcgcagcgctcgccgcctccgccgccgccgcaatccgtcatcgcaaggtccgcagtccaagaatcgtacttctggacgacgggaactcccataaaagcagcaagaaccgcctaaaacgctaccggagtaagcccaaatcaagcacttcttgatctctctctctctctctctctatactctctataacccacaagaagaaaaaatcccacaccaaatcacagcaaaagccaaccaggcgaacgaaaaggctcacgaatcgtcagaggggaactaaaagggaccccagggagcgcctaatcctagcggttcttggcgtcggcgcagccgaggcattccgtcgaacacgtggggcgcagcaacgcagcatcgctcaatactccccaatccagcaccagctgcgcgactcgggaagcgtcggagaaggggaaatcggcggcggcggcgggtttccggcgggtagaggtggaggtgggggagggggagggggaggcaccacccatgggaggaagaaggaagctttttttgctggtgcgacaagaatgaggtagatatagagagaaaaggaaaggcgagcgggtaagacgattaaaaaaataaaattaagtttggtggggtagtagaatttttttttatggttttatccttccttttttaaaaatatatttctttccctttttttatttgtaatttaccttttcctttgctttaattggtcaaagccaatgggcaacggacttgtgttcctctcgctggaaaaatctgtgaaggcatttccttatttcatttgtcttttccatcatttcttgatatatatagaagtattaggtcgcgaatcaatttgtggatttgtgctgggtttgtttttttttctttctgttctgtatatacagattttgtatcatttgacatatcttgttccctattgagacttggctacatgtgtgtgtgttttgctttatcttgtactcttcgagtttgtgtctatggactgctgttgttcacaaataccacccatcctaatcatactgatagttttaattcaacataagaatttcattataatggagaacttttagataatgacactagttcatttttcaaatatcaatcttataagtagtactctttagaaaaaaaaggtagatggattcccttatctcaattgatttgtatattatgcaccgcaataatgcaattttgctgtggtcttatctcaaacattatgtccataataaagttttatcattactacaccatcattgctctagattacactgaattgatttagccgaacatgactaatttgtgtcgcatattagcaagcgtgccattcttccggcgcttcaactcgtgccattctcattatcgtcgtccttttgtctctaacccattttctatccacgtacctgtaaaatccctcggtagtctcattatccaaccatggtcatattgtaaaatcaaagttgaacaattagtattggatattattggttttgatatttgaaatttatttacgaagtggttttggagattattggaatttgcaggtgaataggaactgctgcttgtgatttgggtccggtcagaccggacaggtgctgccagtcagaccggccagcccgcggtctgaccggccaacactgtatcggtttcggtttcgggttgtttatttagatatccgtgattgtttcatatttatggcttctagatagatactatgcgtatgtaatactgttgtttgctactaatgagtcaagttggagatagcttggtctcggaatatagttttttttgtttaattcatgtgtaggtgacttgatgcctcaagagagtattgccggtgatagatcgggagtcggcttaggaataagacaatgtccatgacggtcagatatcatgcgggatacttagtctagagttcaatgcacgtggttgatgaagattttatatggcatacgatggaggtattgtgtgcgtataggatgcggagttgaatttggaaggagtccaaatttggtatgattggttatgcaaagtttgtttcttgtacgagaaggtttcctaggggattaggactttagtatgagtttggttcgtggctttaggctgtctacctcatatataaatagagagggagcgtgaggcttcccggtatcgcttttgagagcaattgagttgatagtttagttagggtttcgagtttagtcgagatttttgtaaggagtgctgttgttgcactttgtaaatacagagagaagcaataaagttgtcattgagagttcttcgatttgtgtttcatcggttttggcggtctaaccggcgacacaccggcggtcggactagcggcaaggcagcggtcagaccggcagcgaacctgcggtcagaccggcggcggcttcaggcgacggcagctgatctcggcggtccaaccgggcgatcaactccggtcagaccgacggctatcaagcggtcagaccgtgatccgtcgaatttcaaggtaacttttatttctgctaaaagtttgagtttttgggtataccaaccattcaccccctctctggttggcttagttctggtgtttcgatcctacacatatgaggataaggttatctagtttttttcatggcaaagtttcttacatgacacttaaagttcatggtatttattgtaggacaataaaaaaatatgtactccctctgtcctcaaatataatcatttttggaacttgacatagtcttcgagattctaccataagcaacaatatctataaaagtaagatattttaaataaaaagagttgcatattatgattgtttgtttaatgataaatctaataacatcaatttaataacatcaaattttacatgattgatcattttttttgcttttaatagtcaaagtaaaaaatatttgatttgacactatactaaaaatgcttatactactcctatgagataccactaaacatggtaattagctgttggacattaaacgtgttatatatttggttcagagagagaaacggtgtggaaagtaccaatttgcctctatgtccattgtcatgcctagaaatttagccaaaaattccagactatttcgtgtattaaatccctatccaggaatcggccagggtacacaaaacgacaaatttatatacaaacccaagcataaataaagcgtaaatacttacagaagaggcacttagtcctcatatcaaaagaaaacggcagcagcggaaaaagacgatcctagcggggcttcagctccactccacaggcaaaactcaactagggtctgaaccttgatcctctaacttcatcttcggctcaggagcactacacttctgaaaaggaggaataatagcaaccaacgtacttagcaagccacaccaatgatacatgtatgcaagggaatacaaggatggtttgtggctatttgcataaaggcagatgtaaaacatttattgttgaaaatagtaaaaacagttgattaattaaggcaagattatatctccactgaacaaagctaccccacgttgaacaagcccaaccaacccacctgaactacactagttcattaggtcaagttattaagggcgtaagattaatcacggtgattctgggcaatcacccataaccgcgggcacggctcttcgaatagatttattttggccagaggtgtacaactgtatctacaaaacacaatccatcggcatgtcaccgtgcctgaccagacacatcaccatgtcgagtgattgtgacaagactcttcgcataactccccctgaccaatcgatgccacacctcaggtttcaccccctctccccagcaggcagcgggcagcaggcagccccccctcatgcctaggtgaatccggaagcagcaaaggctgtcacagggcccatcctaattccatcacgctcacctttgccgcagtacgtcagttagagaaaagctatactacaagtcaacaattacccattaccgcttgtggtaagcgcagtaagtcttccagtgcatcccgcgaaccggtccttaattgccatgggtgcgactagcaaaaccatgcactcatagcccaccattcagtcgcattttagttggataattacgactaatgaaacatggccgggtgtcccgagcacgcagctcgtcatgatactaagtgtctaataatgtaattatcccattatgtgagctagtggtaattaagcatggctaagcatatataattctagctaggtcaacataagtaacacaagctagtcaaattatcccccaagtttgcaaggaatggatatcaagtaatatggcacaagcgaacagataggtaatcccgtaatcccatgtaagcaaaacatgcaattttatttacaaacggtaaagcatttataaagtaggctcaatattttcatggggaatgtgtgacttgtcttgcttcttcaattcaatcctctgaactcttttcctcgcaaccatgatcttccgaaacgacagaaactacgcgctggcacgcaaaacgaggaaaaactctaataaaaaccaagtaaacagtatacataaaaagtaaaccaacatgcagagctcaattttagatgaattttgcaagttgaatggcccaatttggagttcgtaggaattagttatgaattctagaagttttgagccatttatatgaacttctataattattactcgaattattgcgcaattagtacgatttatgacgtcagccgagggaaagaggcggcgtcgacaagcgggccccacccatcggtgactcaaggcagcgggcgcaccacgtggcgaccacgtggcggccacggtggacaagcgggcagagtggcgccgacgtggcgccacaaagacaccaacacgggccagcaccgggaggccacgtggacggcccagattcacctgaagtgaatcgggttgccatgggcgagcgaggtggcaaggctcaccggcatagcggccgggagatggtggcgcctggcccgatggtcgccgacgacgactaccggcacggcggcacgcgcgggaggcagccgagagaggggataagggaggggagacgaaggggtgctcaccgagcgcacaaggcaaggaggcggcgcgggtggacggccaacggcgaggagaggcggcgaccggggaagagcgtggcgcggcgaagccagcgatgcgggcggcgcgtcgcggcggcagccggggtgatggcaaacggcggccggaggcggtaaaaggggcggccggtagggtggtgtggcatggagggggtttcggcgacggattgagggcgcgaaggggaggccggagtgcgacgtcatgcggcgaagccggcggtggtggcggcacaacgcgacggtggctagagcggcgaggagcggtggttggaggcggtaaaaggcggcggtggctcgggtttgtggtggggaggtggttctgatggcggtttggggaaaagaggtaggggccggggtgcggcgtagagcggtgaagccgacggtgagaacggcgcggctcgcggtggctagggcggcggtagcgtgcggccggagggcttcggcgagcggcgaaggtgaggagcggcgtggggagagcgatggaaggcgcggcaagatcggggagttggggaaaaagagagagggaggtgtggtgagcatttttatagctcgagggggagaggagagggccggtgagcggcagatttggagggggagtggggcggtgtcgtggggtggtggcggctcggccggcgccgaatagcgcgggacgagtgggggataagagagtggaggtggaggggatgggcggcgtggtccaggctcgcacgggagatggcgcgaggaaggcggtgacgtgggaaggtggcggccatggcggtttcggccggaggtggaagagagagctgacaggtggggccgccgatcccacctatcggtgaagggagagagagagggaggcaaaacggacttgaggggaaagggggagctgagcgggctgtcgacccaagggaggagaggggaggccggcttgagagagagaggggcgcgcgggccgcgggagggaaagagggcttgggccagaagcgacccaaagacaaagaaggggatttatggttttttattattataattacttattgagctctgaaaattcacgggaaatttcagagaatattaaaaaatattcctagccatgatttttaaaggaaaattttaattctctcattatttcacttgattaaattgcattaatttttaatataatttctagaaatgatttatttaatgatttttaatcccgaacgaaaatcagggcgatacatccatcggcttatagggctattgggtctgactattcacactcccctgattcgatccttctcactcctctagtctgagtctgattcgaattagatctagtcaagttaaaaaaaatgaccccatgtgtaaacttatcttttccaaaaatttctctctatttacagagaatataataaaataatcattatgtatcccgtagctaactaccatattttccttattgtcctttaagtgccctgcagtaaataccgcaaattttgaatgtcctgtagtaaattttctctttctcgttatgaccataccggtctcattctcactcattttcccatgaatggaaaaaataacaaaaaaaaaccttattatatcagataatggggtcaacctagtctaaatgaatccagtttgacatcaaccggcacaaaatcaagggttaaaaccccaactggttgaaaatcatattatgtttgataagtggttggttttgcccaacatatatagtagtttccttgctaaaaattacttaaaaaacatgaatattagggaataacctaatatcaaagccttcgaacccaggtcgactagcacaccaccttgtgaagctaaccggaagactcatgggcatttctcttgctagaaattactaagtaatcgtgtacgtgtatgcacgcagtggcaaatctatactttccatatatagttagtacccactaacaattattagaagctaaatctcaacatgcaagcatgccacatcatcacccactagcaattactattctagcctatttaaaatcccatgcaagcatgccacatagtcactcactaataattactattctagtatattttaaattccatgcaagtattacacatcatctacaatattatacaatattataatatagagatcaacaagtatatgtcaaatcatctttctcacattattttctcaacatttcaactttcatcatttcgataatatttaacatatactcatctatgaatcccgcagcaaagcgtggggtatcacctagtataaactaaaaaccaggtcaagaaacacacctttcatgaattatcctcccgtcctgacaataacagcagcttaattgattgttaattatataggaacaataatatggtatcaataagttatggggataattccgaacagttactttttatagtagtaataataaagatgcattaaaccaatgattcgtacctccaacgtcctaaaatataagatatatacttcctcgtttcacaatgtaaaactttctagcattattcatatttatatagatgctaataaatctatatatataataatgtttagattcattagcatctatataaatgtgggcaatgttagaaagtcttacattgtgaaacagagggagtaattttgttcgatgggatacatcctagtactagcatgcgtactatcgaactaaaatcctttatattttgggacggatggagtattagataatgatcctacaatttagatcgaattatgtatgttttctttggtgcatctagcaaagaataaacttgtttgtttgttttatatagatgtagacatctatatgatactttaaaaaaagcaagtagctatgtttatgaagaaaaaaaagagagcgtatgggtaaaaggcccacctgtcaggcaaaaaaatatatgtaaaattaggagataacaataactagcttgataattatatgacaatgttcatattaaaatttctgttgtaacgagctgacaaatacttaccagtaaaatactagcctataagtcgcacgtttgcgcgactataacctatctattagatgtatttatatgttatttgtgttaatgggcctaaatatataataaaaattaaaaataaatacattttaaacacattttaaagtgtagctataaaattaacaggttctatatcttgatttgtgattaagaatattatctaaagaaataatttgtcacattttacaacattgactccttcagtttctaaatctaataatgtaaatacccacatcctttacacgttgagaagtatatatatagtttttatcgtaaatcttataatcacatgttaaattatcttttcaaaatttactatgtcctccacgcaacatgatttataattttaaggcataatgaataattgatagcattaggttaattagttattcatatatacactaatactcgttatttttgatacaatagaactactataaatatttattggtgattttttatgtggccaatatattttttttcattttaatacctttcttaccacatatctcattggtgttgcatgaacattgttggttatttatttatttttttctcttccgatccagcagtcctctttgttcaaatcgtgcatcgaacggttaatatttgtttgatgatgtagctcatcttgatggtattttggaattccttttcacttatgtgacggtaggaaaaaaatatgagcatttaattttgataaattatctgattacacacaacagactctatagggtacaaagcaggtgattatttacccccactgaaaaacttattcgctaattgcgtgtcaatggaaaacaaggcagatactatcgggaaatgggccggcatatcttttcattgacgtataccaaacattaaaagcatcccgaaagattggaccagtagcacatccgaaatgggccggcatatcttttcattcacaaagtcaccacgcattaagaggctttttctacgtgggtgggataacaacctcgagtaagatgttttgtgaaaatccaaattttcctagcagacacctaaccgcatgcgaaaataattatttttcacaggctagcacgttatgaggaccaactacaagatatttcggctaaaagacttccaaaagacaaaattccagaaatcctagctcgatccaatcctagtggcatagtagtcaccggtgaagccatcatcatcactaccgcagtccatcgtcgacactgcccatgcaaatgagtgccgccggatccgccgttgcagacattgccaatgccatccccaaccttcctggcagcagatctgccgttcatgaggcatgcgtccgatggattcaccgcctcccgggatgtcgcagtcgattcaccgccttccgtgcaaaggatgtgcccttcccgccatcttgccatcggaggaaagggagccgacacatagcttcaccgctagacctccttgccgatcaatccatggtcatcgctaccgccaggcggcccagaccttatctttgcttccgccagacccacctcaatacttatccaccgtcagtctatcgctttgtgagttgtgtgagaaaggatgtgaggatataaggagtgatttcatctgtgaaaattacgattttcatagtcgggcttttaagacggctgccaataaaaataatcatatttttacaagctaggaagcatatccgtaaatattaattttcatatacgggtattgagagaagactctatccattttcacatgcatgtctttatttaggtcacctataaaaatataggggttgtttggaaaaatagtttattaagtagtaacggacgtttcgccatcaacgagtacatcacctaccataaaaattagttataaatatgagtataccagtgtcaagtttagaaaagcagaccgcgccttaagaaacctaaccggcagccacaagctacaaatagtagtttcttaaaaagtaaagtataccgtcagtccttaaagttagagcgttgtgtcacttagatccacgatcttgtaaatttgatatttaggtccatgatcttgttctagtggatcagtacaggtccaaagtccgcttgaccgtattgacctaccagtcaaaactttgcacttagccccctccgcgcccgatcccaacctcactctaacccccacacttgcattgtggcgacgactctgagcgtggtgacggtgatcgtgggcactctatggtggccagagacaagatttggatggcgcgttaagccgtcagacgccagtcgatcagctgaaggcggtggcgctgtcagtagtgttgaggaagaagatggacctaaccttgcgggggaaggtgaagaggtgcctgtccatcctctttctatccccttccatttctctagttgaatctgtagtggtgaagcttggtgttttacgcaatttcaacgtttatctctgtagcagtttctaaggtttcacctagcagatgattagcggatcttgccatgctaaagctaggtatttaattagttggttggtcagttgatcttggtagtaactgacatgtaatctagggtttattatgttgcctgaaattgaatttgtgcactatagatcctacattgaagtatttctcaattgaatatacaggctgcttcacatctgcccgcctcctcttcactgatcaagccagacctctgatgatacttgacatacccctctttccaataccagaagttatatccagatccgtcattctacacataagttatatccagatccatcattctatacacatgcatcaatggcaaccactgttaggttggtcgaccagccgcatctccactgctgttaccaccgcaaccataaatcgaaagagtgaagaagaggggatatttggaggagaagtgggtcgaccggacatgaaaggggttaaatgcaaagttttggctatattggacaaccacgtagccaggtcaacggtcatacgggctttggacctacaatgattcactaaaacaaaatcattgatctaaatgttggatttacaaagatagtggatttaagtgacacgtaccatgccccaattttgaggaccggcattgtaccactactggagaaaccatctttggttgattgcaaaacccacaatggtcccggttgcttaaaaatccggactaaaaagtatttttagtcccagtttaaaaacacaataggactatgtgatctttaaaaatcaaaacgctctgtataattcctaatacttatcatcttcttccgtcctcacaaactcctctctcctctatctctttttcctctaaccttatctcttttctttctcactccttatctcccctatctatttctcagctgagcgagtgcacgaggaggactcacgagggggtgagcacacgaggaggacgccggccggccggcggcagagggtgggctggccgggcgcacgcggaggagaccgggcgcatgaggaggaggccgggcggcggccgggcacgcgaggaggaggtcgggcgaccggcggccaggcggcggccgggcgcacgaggaggtgcaccgcggagggttggtcggctaggctggggcggcgaccaggctagggattttaggatttgtgatgaatttttttgttgagaattcatgatgtattttactgtgatgtgaatatgtgatgttttttcagaatgtgtgatgtagccatctttgagaatttatgatgtatgatatgtgatttggagatgatttggggatttcacgatttggggatgattgatctgtgatatagagatgatttggagatttcacgatgatttaggaatggagtgaattcaatcttagaaacaattaaaaaaactaaaaaaccaatcgggacatgccctcttcctcttaagtcccggttggttaaccgggaacaaagatcttccatctttagtccctgttatttcacccaggactaaagatagctatctttagtattcctacagggggttacgaaccggggttaaaaaccctttctccagcaattgatggctactcctatcaatttttacttcacaagtatttgaatctaaagtttgaataaaaaacaatactggtagagttagtttactttgcagaaaacattgggcataactaaggacgctattttgatagatctaaacacaataaattaatagtatgtgataaacaatcaaaaatagatcaaaacgattataatacaatcatccgtcggaacatgcatcacgaaatataatgtacaacgcatgcaatttcacaattgaatgtgaatcaccttttcttttctaacattggacttttgaaatgaattacagaaaaactactcaacagtatcccgtacacgactattagctggcatcttatcctcttcttcttccttacctcttccccttccctctccccctctctctctgactaccaccctcatgagcacagagacgacggcggcggcttgctgtgcggggtggcgcatcgggcgtggagggcgctcggcccgctctccttcgctagtgccggggaaggcggtgccatgcggagctgctctcgccggctcaggaacgcgcgacggcgaagcggcgtgcgagctctcgtgccgccgcgctcgccgacgaggaccgcgagctcctccgtccctccgcccccacgcgacagtgctgcactgccgctgctcccctccatccatcctcctctccacaccggcggtgctgtgccgctgctcacatccattttttcgataccctgcaggtacccctcgcactccattcaactctggttgattcctccaccccccccctcctctacaccggcaatgcttcatcatcgcttgcatcccttcttcatgtgtgtttttctctttttttgcttgatgatttccttgctgattttttctccggcttatatggatagtatcaattcccctgtcccatcctcttgaatcccttcaattccacaggtaccacacaccatgcagctggtactatactggtaccaggtaccaggtatcaggtatcaggtatcgggtaccaggtatcaggtaccagcctatgctggctgctttggctgtagaggagcgatgccggggacgaggtatcacgcgcatgatatcgaggaggaatcggataggtatcgcacctttgaacgtggtaccaggtcccaggagggagcacacgtggaacctcacttatacaaaaaaaaaaaaaagagaaagggatgagtcacttaaaatatcccatagtaatcggatcccgttgtgtagctgccctcaatgaaataacatattacttacgagagaagatgtactggaataagttcaaataaaagtgcaagattaacttttctttatcatatttctaagtagtaacttattatacggagaaaaactaatgatattttctaagtagaaattaattgtggaagataggaaggagtgtagatcctctgcagtactactggtgtagtagcagtggctgacgtgtgggcctagtactgtaggcaatccctgttgaggaaggagtgctttcatggcctcgccaaggtatgacgagtgtctgaccttgaccatgtcctccaccattgcttaaattggcatcaccaaataaatcatggtgcccttagcactaaaaccggcaccaataatttaattattagcaacccgacaaacaagatgacttttaagatctttgtcgagtatctcgcaaatgatgtacttcctccgtttcacaatctaagactttctagcattgcccacattcatatagatgttaatgaatctaggcatatatatgtgtctagattaattaacatatatatgaatatagataatgctaaaaagtcttatactctgaaacggagggagttggaaaaatacctaagactcactattacatataaacaactttatatggaagaaccctaaaacttacttattacaccaaaattagccactttggtggaactgaagactctctcttattgtgtgtcttctctcgcaactcacaaagcagatcgtacaagacaaataatgccttgatgttcccttctcatctattcgcagacatagtaacatcagcaaaaaggtgccaatatgagtataaaaactgtcatgtacacttttaaccaaatcgtcaacatatatacggttcgacattattatatatacttacatgtacacctgaaagcaacttgttaatttgtttaatttggcgtcagatcgaacatgtttaagagtaatcaaggtcgtgtccatccgtagcgccgctctagggatatcattggacgatgtaggcctattttaacacattttataaatgccagagctcgatacaactagccagcgcaggattaaaaataatgttgtttttaggagtacattttgattctacactcaatacgcgccattctcacgttatcgtagtggttccgggtgtaatcttaacaagtagtattttataatttgaactttatttttaagccttaaaattgttttggtccaattttgaacttgcaactctaaaatggttcacttttcaacctttactattaaaaacagatagaaattgtgttaagcatggtcgatctaacgccaaatcaaacaagagcatttcttatggtggaaacatgtccatccagatttaagttctaaactttacacatatctcatatttacacttagtcattgtttcagtaatatacaatgtagcgccggtatggccgatctcttggaacgctgtggtgacttcgtatataggcgtttgcctttgagttgtgtgttaaaagaaaaaataacagaaattgccatcttcatcttaacccatccggttttggcttacgtggaattttcatatattgtgtgcatggcctccacacatgctgacatgcatgcataccaacaagtaataagtcagcaaattcagtcagagagaattgaaacagccggcatggcccgctcaacagttatgacagtcccttctttccattcatctctttctacaaatgcatgagttttccaaaaaaaaaaaagaaaaaaaagaagagacaaaccgaaacagtgagctcggatcgtgccccattacttaggattagggtatgaacagtagtttataattagttatattttttattatgtcatatatcacatttaataaataagccatctgtttagctatcttgaatatattcatatataactaataatgatataattctctaaacaacatatatagtgttgattgtgttataataacaattaatagctagcccataaaaacgttaactactagactaatctacttgcgtgtagaagagagaaacctctcttagcccaaaataaaatgaaattttgtcgtatagggatggaaagggaaaaaaatatgataaaaatattttggtgagaattaatggttggaaactttatatattgttcaaccatggtaagttgatagcctctataaaacaaagtatcatgctatatatgaatcgacaacaactcattttttcccctccgcactaaaaaaaattatgtcgaattttctcctagacacagacactattatttatgccgttttttacttagttcgaataagattgatggcttagatttttcggaagcatgtgaaatgatacaaaccattgacacataattaatcgaatattaattattataaatttaataaatgcatttatttgattttttaaaaggaacttctaattttttacgaaatgaactgtttagtttagtagttcgagaagtaagctcacgaaaaacgatggagcatcatagtcgagcagctgtttcgaacacaaccttaattttgtttatccacctacatgtaccaaattaagattaaggttgagaattgattttttttcattagaaggtttgtttaaaaatttatgaatttttcgtgtagcctccttacaaaacatacaaatttgtgtatctgttccaagatatctttcatgtattattcaaaaaaaatatttacgtgtcatatatgagagaggaataacttgtgcaaaagataatagaaaaaatattttatgtatagcatactccctcaatccaaaagtcacatatttctgtggtcaccaacaccaaagatcaagaaatcatatcatgcatacaaccaataagtattaagatgactgctcaggttctcgtcaataatttattctagccttatactctctccgtcccattttaagtgcagtcctagttttccgcgtccaactttaaccatccgtcttatttaaattttttttgaaaaaatttaaaaatataagtcaccagtaaagtaatattcatgttttatcattgcataacaacaaaaatactaattataaaaaaatttaaataacaccgtgtttagatcccaaatttttcttcaaacttccaactttttccataacatcaaactttcctactcacataaacttccaacttttccgtcgcatcgttccaatttcaaccaaacttccaatttttgcgtgaactaaacacagcctaagacggactatcaaaattaggcgcgaaaacttatatttacacttaaaatgggatagagggaataaaacaaaaagataatatttttattgaaatcttggatgcatgaaaattaattacaaatatgataatttctttgggaaaaactgaaaaatggaatatgcttaaaacttttgtacggagggagtataaaagatgatttacgataaaaaaaacaactaaaaagtattactccagatagggcgtacattttagcatatatacagatagtgtttccagcaaactccaaatgcactcctgtatatagtctggcttgttcctcgtgtctcgttctccattctccactccccacggctccacccgtccttcctccgagcgtcgctgggactctcactggaacacagggcccatgtagcgtgtcccagctgcacactgcacagcgtttttaggttgaacgttggatgaggtggcccccaggacagagaccggtgacgcctaaaggcgattgtttttcttcttttttatttcttttgaactgttattaaaggcgattgttggtggaagaaggccaccggattaggatagatagaccaacgcaacgaggagagacgtgcaggctggagagattgtgcatgccggagatgattggtccgtttcgagccgatcgcctatcgcgctcttgggcacagaggggccccgggccctcgaggaaggcgggagagacgggcagagacgcatgatggacggcgtcgccgccatgcgtgacgcatctgctgcactgcagtgacaccgtgaggtgagacagtgcgcggtacggtgaaacaaaaacgcgaaaccgacgggcagggagctcatatattctgcacgttgaaaattagaacctactatcatgcagtgaagattcacagataaacttcagcaattatggagccattgtttcgcttattcgtgaaataagtgaaatgtgtatttacaaaaaaaaagtaatttatatatataacttttatatacgtgttcttagtgatctacaatcaaaggctgaaaaataaacttcgatgaaaaaacctcgaaattagctccaaatttaaggttaaaaattcaaattctggcttataagtataagtataagcgaaaagatgatgccattttttctccttatatatgttggttttattgttgtctaagtatctgttttcttgtgagaattttatattaagtgattgtaacttcttcaaaacatatagcgaaatttttactccattatagaaagaaaaaagagtagcatgcggaaacgcgcaacgagccaatgcgaaaacatgcgtggtggacgcggcgtctccccgcgagaaggcaccggtgtcacggtttggtttcttcaggagaaacatgcgcggtataagatttttctgtacggggtttgttgaaagatgcgcggcaatgaattgtacgtcaagtactcgagtttttcttcagcgacttttcatgaataatgatcaactaaccgtagattaactagttgcttttattttatttatgcgtggaaaaaagctagtttcacgttaattaaggccggttttacactgtggttttggcttttgggtgatccggttaccaccacattaactagtataaaattgtttcgcctataaaaaacaattgtattataatcgtattaacaatttgccacaaatagcttatttgacattggtctggcagagtctaacctatcaaaataacaagttattaacgccccataccctctccgattttctctgttttctgaattttttcggctcctcgaagaggttaagcgtgttttgctattttgcaaaaagctcctcatgtttattaaaaatatcgcacataaccgactgacaccctgtcatgttttatccagaaaaccccttgtcttccagtgaaatacaatgtgaagaatatagctaacaacttgatgataatatcttagataagatgttgtgatgtatgggccggaatgaatcacatatgtcagtagttttgcaacttttgttatgtaggagtatatatactcccttcatcctaaaataaataaaactattacgagatgtaactcatcctactactactcaaattcagagtactaaaatatgccatattcccctactaattttatttattttggaacagaggaagtatgtgtcatcactttgtattgtatgtaatgtttttcatcatgtaggtcttttctttctgaacaggatagattataacaaatgatataaaagattacagaacatgtggttacaataactatacataacaatatatcgacctaaaacaaagaggctccacataatgtaatattttaaaaaacatgtaaccataatactgaccaactctgacatacgaaaaagcaaatgaacgaatatcgaccatcatatttgttcctccaacatagcagcaaaccagtgttgccgatcaatttagcgactcggacttaaaggctaaagccaaagccatttattcgatcatcggcaccttccaaaatctttgcataggacctcacaaaccaagttgccaataaaaaaaagaagcaaaatctcccaggcctcagtgttggcgcgatcaatgcacatctggcatgtcaagtggaagatttcgcgtcaacaatttccttctcttcctcttctccttcgcgagcagtgctgataacatgttcagattaaagcgagagcgagagagattgagcgaagaggattagattctcattgatcattggtacaaatatatatagggaatcggttatggacgctatggatggataccaccgcgttggttggaatggagtgccttgagagggcaaggagatgcgaggcactacacaactgcagtgtctaaccaccatcgggcacgagggtgtcaatcccatccaaggtattgatgagatcacccagagtttttataacataatagatctaatctccagagtttattaattaactcctaaaaactaacgagagaagggacgagaaaagtctcccatttccctcaactccggtggcagcaaggatgctcaaggtggagaaggtgggccaaattggagtggcaacaaaggtcctactaggtgtggctattacttgttgttattatatatggctatgcagaaattatatggtgtttaacaaaaggaaattttcatttcctttgcaggttatatgtctagttacatacaggttttgtacttgggctattttttagaagttgggttcacaaaatttggttgcaacggtatgtcagcactttgagtaagtggtcaagacacgttccccccccccccagaaaatagatggcgatttagcctaaggattggtttctcacaacttttcctatattctctaattgtaataaactttacggttaattggatccatgccataaaaaatatgttggtttcaaatttaccactagtattcgcgtatttgggccattataattttacacatgtttcagatatgccattacttaccccttggattcatttatgaaaaaaaaattgaaccaacctgcccctttccccttcttccttctttccctttctccttcctcctctcttccatggcgtgaaagacaggcgatagttcggcaacggcagcggtaagcatgactgacgatggacatggtcactatagccgccatctccttcctctccagcgctccttcggccaggatgtccgcgcctccctccacctcgtgccgctgctggtgtcctcctacgcagagctccacaccgacgacagcgttgccatggggccctcggtccccgccaccgatggcatcttcctccaactaccctgacgatgcggctcctccctcccctagtccctcgttacaaatacacaaagagtaatggtatatttcaaaactgacaaatttttaatggtatagatctaattaaccctaaactttatatgtatgtagggatgaaaacaaatcagaaacggaagaaacccacctctaccatttttgtttcctttttttttcagaactggaaaccccgaatacaaaaacatgatcgaatattatcaactacaaaaatgaagtgaataatgttatgaatatttatcaaaatataaaaaccacttaaactgaacttctaccttttttttctaaaacaatagataaaaaattccaaattttagcaaataacaataccactttatattataagaataacatcacaattcacataccacttcgttaaagtccaatttttcatcttttgaacaacaaatattgcctagagaaaatttcaagttcttttccgagaaattttgcggtaagtttatgacctattccactttctaacaaatagtgcctttattgtattcgttttcgtttgaggcaaaaaaaagtccgaatctgttttgttttctaaaagtttttgaaacaaaaccctaccgttacttcttgttttcaaaaacaggtccagaatctggaaactttctgaaccgttttcaaccctcatacgtgtgtgttggatcgggtgtattctagttatgcataaatcgggagggttctcaatatggttcttttttttatatataaaagactttcaaaatgatttgagttgaacaaaagttcttttatcttttaaaaactcatctcctcttttgactgggaaagcgttttgaattctcgagggggtgcccactcatttgttcaaacactatccaaatagttgttaataattctttaaaaaatttgttaacattcataacatgtacttagactactccagaaaaattaagtcaaaactcaaccccacacattgagaaatgaaatagacatattcagatgtgaatagtgtgaataatattactattcacgtcttaatcggtctttttcatttctcaatgtgtagatagaatttgaatatgatttttagtggagtggtagatgttagtatactctaagctggcaaaaacaaatttagaattttttcacaactatttgcattgaattggagagaaatatttacactaggaggtatcccctcaaggattagaatgttcttcctcttttgactacattatttgcgttggtaacagtttttattttccaattaaaaccagaatagaaaacatgtatagaaaaaaaagaatctatgtgcgcttaaaggaaaacatatgtttttccttttatgattaaacatttggacacaagaataatcgatcagcacatgaataataagtcatacaagatgggtccttttcgatttgtccaatcaattgcaagttgattctggaggaaaagaacattaaatagagtaaagaagacgtctccagtattatttccgcttttgctgaatgtatatattcaccaggataacaaaacaatggtagttaatgaaccggtcagttacaccggactaccggagacggttatatatcccggtaagtcgctgtgtatcaattatctggataatttaat

SEQ ID NO: 26629 - DNA, 1350 bp, Oryza sativa
cggagtgattgatgccattctgtcatgtgatcaagttcatgtccatactacatacgtcgtctggtcctttagagcaacatgacttcaggacgttgctatcaacggctattgatgataaactagtaataaaatttgtcgatgaaattacttgccgtgataaatgattccgttgtcgccaggttacagttattcaacgtaagaacttcatattcattctagaaaccaacactattcatcaccattttcctcatccccgaaaaactttgaccagtacctctgtttttgccacccccctccctccccggccacaaggtgtagaatcaagtgccatcgctgaccaatttgagctgctcccaattaaaatacaaactaaaataaaaaagtatagaaaaaatgaaattacctatggataatattatgtcaatggcattaaaatttgtgaattttggcatttggataatagtacctccgccttaaaatatatggatttttcggattaggcacgagtaataagaaagttggtggaattaaatagaaaaatattatgattggttgagaagaggaaaagttcgtgaaattaaacagaaaaatgttatgattgattagaagaaaagaatgtaagtagttcgaatggtgtaaggttgtgattggttgagaagagaatgtaggtagagaaattgttatatgttaggataaaatttgaaggatacaagttgttacgttaaggagagagtattatgtctatgtactatcaaaattcaattatgattttttttcaacttaagctgttttcgtcaattggacgggatcttgctacgaccacgatcggtttggtaaacgacctgccccaatccttcccacgcacctcctctcccttcccgcgatcagtcgtcgcctaccaaccaactacataatgctctaccgacacctcataaagctctctcctcccccaccctacgctaccgtctctcgtgcacgcacttcacgacgacttcgccagcaagggaattgtactccagagcaacagctcaaccgacgacgagagctcacaacattgcctttgcaaaaaaaacaactcgcgtatttcccattctttatacaattcctgttatagtgtggtaaaaaatttacacgtattgatctctaggctgcctggattgatcggcgtcagccctctccagggagctctcgatcctgcccgttgtgacaaaaataacatacacaaggcacaataggatcgactattctaacaaaaaaaaaacgaaaaaagaaagttaagaaaaaaaaaacgaacggcatgttcttctcccatcattccattttgcacttgaaccgtctggatgcgtctga

SEQ ID NO: 26630 - DNA, 3213 bp, Oryza sativa
acatgggcccacttgagttcttcgagaggtcacgtgcactgcgtgggagctgtggacaaacgtttcgctgggcctaaacatatgaagtttctcggatgcgtatcatgcactgtgattggcctaagctaggtgagaagtttatcttggcagcaagacgtagctgcgggcgaagcaaaccaattagcctatgataatgtgtgtgttgatgcaaatgtaaagtgcggttgattttttaagaggtaaacggtgccatatcaatccaacaaaactatactagccggtcagtagcttgtgtttttatatatctacttcaatttacagctgacatcataatatggagacatggtgggccagcgtcgacatttcgggttatttttccaagcaataaaaaacagagtaatggatatgacgggataagcaccagaaatggaggagaggcggcagaaaagagctgctaaagttttatgaatatgataaaagatggcagcgggacggggaagaagagcacactgctatgaaaatcatttttcatgcagccaaaacatatttttgcaagaggccaaactccatgcctgcaatcaaaggcatatgaaaatcattgatttttttaagaggacttccatccacattttcatatgcggacaccctaagagacttgcttgcaaaagcaaatttcgtatgcagaacccttaagtcactagcctgcgaaaaggtatttcgggccaaaaaaataaaaattgatttttataggattgaatcatcgatttaaattcacatcagaaacatatccaaaaagcactacgtcgacatgcatctttcaagcattttctcaacatgaataagcacgactcaatcaacaataacagatcagccataatggcaactcatcatcaacaatagtatatcaacaatagaaaatcttggatcaacaataataacatcacaatccaactcagcgcataacacgagacaacgaaggtaagtagtagaagtagatgctactgttggaaatggtcggctagtgcaaaactggcaatatttgtctctgttttctgttaggccatgcccaaagttcctatgtggcatgtggtgacagctcgtctcacctgaatatttgagctagcttggatggatttgtaccactgtacggatgtgtgaactctacatgaatgtgcataccttgcaggcgaggcaatgactttggtgctctaggcctggagagagaaggggaaggagagtaaagtgagcgcacttggagacttcgataagatcgagtcggtatagcacttcggcgagtagatggggtggtcaaacagcatatcagaccactgccaatgaaattgacacgacctcactggagaaatctgaagcaagctcctgtcccatcaaatcaatacagcctcgtcgggccgagctcttgtcccactacctcgatctggccgacatagcaagctctgttcataccatggggagaagtggagaggtagcggcgtgtgggaggatgtatgtgtcggcagcagtagtgaagcatcggaggaagacaagcgggcagcacgacatggcgcttgggagtaagagagtgggcatcgcaaggtggtgatggggacaatgtggaggtgtgaacaacgggaacaggataaggaagataagtttgtgaggataggacaagtgggccatggactaatatgttaattgttctctactttgaggggcttcgttgcatattatgtaattccaatatattttatgacctgaaagtaaaaaagaaacgaagggttgacatcgaaaatggatatgaaaggagcttgatttcacctagacgaagggtgaataggcgttcctgaaaatcactcgcagcgaattcatgtttaccgaaactttaggtccgaggcaccaaacttcaaacagagaaagttgacctgaacttcaggttcactttcgttgtttcaaacggagaaagttgacctgagctttagatacttggtatcggaagttccgacaccataagactgtttcttcgaggagaaattgctcggggctgaggtttcaacagagtaaaagtaaagtaacatgaacacaaggggaaaaaatgcacaactaaggaaggcacgagatttttcaccgaagttcagatttttcaaccctactctccgttgagaagctcctaagagccagatcgctttcaatcccttgcctctccaagctgttaaccaggggaaagctccgatcaccaagcaaacaccaaggatcagtgggtttcctcccaaccacaaaggttcaaggatggacaaccctcagcttccttgggtgaagcttgctctatcaagtaaacacctagaaattagcttggtattgcctaacttacctctttcctggcggtggtgatgcaaaccttacaaactttcctgggcaatccacacaaatttgaattctacggacgatgcctatctggctaggtagagaaccaccaagagtaataagcatgttgacgaagccccgacattgatccaagtgctcaagcaagaaacatagctcccccatctctcaaaagtcaaaatcccatcactcacaagatttttggctcaagaatcaaggtggtagaggctagaaaccctagagaggctatggagagaggtattgaaatgtattccagccaacccctcaaatagggggtggcccggtttaaatactcgcccatccccacaactggtcgttactcacagattcaaacaccggaagttcagtctggagactcggccaatagctaggatggggacttgaacttccgatccaaaggacctgaactttaggtcttggtactctgtcccgaactggaaactgcaactcgctttttcccttcatgagtatggtgcattgtgtctctctctaaatagatcaaggtcactctagagtacttggacacacaattcaagacaacgacacaagcccctcttaatagtgcggattttcctatgactgaaattcaaattaaaataaatttaaattgccttgagtcgaataccactttgttttgtgttgtagggatctccctcttcttgggtcaataatatatgggactaatatatgcacttatcttgataaacttgattagtccccaaatatatgttgtcatttatcaccaaaacccactaggggtccagatgcactttcaggatgttgggcccatttcatggtatgtgcgttgggagggtt

SEQ ID NO: 26631 - DNA, 1478 bp, Oryza sativa
ccaggtggtagtcgtaacccgaccacttaaagtggaagtagtgggagaaacgctacatcgttggccgaggaccaggcagtagtcgtgactcgaccacttaaagtggaagtagtgggagaaatgctacatcgctggtcgaggaccaggcagtagtcgtaactcgaccacttgaagtggaaatagtgggagatacgctacatcgctggtcgaggaccaggcagtagtcgtaactcgaccacttgaagtgaggcgagagagatcactacattttactggttcgagaaccaggagtaggagtctcttaatcacctataggggcgctaaagttggtttattacatgtgcatatcatgtggccagcatgactcacatactcaacttatagcatatccggatgtccgctcgcattcatgtcgggtgatcaagccgacggtgttcgtgaggagttatccgttaacaaccttttctcgagtagtccagcgatggctggcgcaatgagataggtcgtcggtcttctttggtaggttgggcgcgacgactctgcatttgtcgagatcgttctcgataatgcggtgtactcgaccatgacctactcgagtgcttaattgttcctgaaaaatattttctagaaggtaagatatatagcagataatatcgagtatgtactcaaaaaactgcatggatcttctagtattatcaggatataacgagcagatgtaaatatcaggcattatgtaaaccgtaaacaagcatgatttatacagaagataacagagcgagcccctagcgttagaccgtgggtggtttaacgtcggaaacatccgcggaatagatattgtataaaaaatatgctctaggtaaacataataaatcacggatttgacaatgttgtatggtctgaataggcacgataaattgcagataaaatattgcgtacctttgtagatacatgccggatgtatctacgaaattagtagatcagtttaaaaaacaaatctaccaattaccttgttgcgtactctttcgatatcatgcgatctgacatcttttggtacgccgcggagcttgaggcttggatgatctcgatagaccaaattgtcgatgacgatgatggttccgatcttgttaggttggatctccccctcagccgaaatcgtcgagtagtttgttgtctgagaatccatctcttaaacccatctcgtcgaaatcctgaagcaccaaaatccccctacctagcgcgccactagcgacgtttgatgtcgcaattctggtatttgcatagtatgaggatcgtcggtgctaggatatatgcaagactgaggtaaagagatggagacagagatttttatacaggttcgggcccctgaattatcaagtaataaccctacatcctgttggccgaaaccggtattactcttattcatgataatcacaccagtacaatatttggggtagcctatctaactgttgtcgacatgg

SEQ ID NO: 26632 - DNA, 11358 bp, Oryza sativa
aaaagaaaagataaaaaggaaaaaaggattttcccagggattcaatattcgcactttgcttattttaattggttaaaattatttccaaggctctgaaaattccactaaaaatcgtgttagcatattttgacatgtagaatccaagaaaaaaaaaattccacatgtagattccgattattatttgcatttattaattagggattcatctctagttaaattaaacaattacttcggacgatttattttatgaatttagagcaagggaggggaacttcagggcgtgacaagggctggatctgcagagagactgagggagagggagaggaggaatggaggaagagagacgaagtgacttatgggtggtagattaattgttcggtttttaattgcgactggcttttgtaggcggatctcataagactatgcttgtagaaatcgatttatgcaggcacaactttaggaggtctactgtcgacgtttgatgtcgcaattctggtatttgcatagtatggggatcgtcggtgctaggatatatgcaagacttaggtaaagagatggagacagggatttttatacaggttcgggcccctgaattgtcaggtaataaccctacatcctgttggccaaagccggtattgctcttattcatgataatcacaccagtacaatatttggggtagcctatctaactgttgtcgacatggcggtctaacgatctgactcgtagtcgacaacagggtagccttcctcctggaatccgtgcccggcgagatcagagatagcactttcgtctctcctgacagtatccggagacaccgtagggtactagccatgcttatccctgaagtcgatatccggcggcatgtcttggcacatgtaggcttcttctatgttgtggcttctatgtcgattgtgttgggtgttgatcctgttccctctcctcctaggggggcttgtatttatacccataggtgtcctcttgtccaagtagaactagggaaactaatatgatacaatccgaatagtccttgtcgtttcaatgtagaactctggttgtctttccttatccggaactcccttgaggttagtttccgtataagacatggtatatagtggatcctgccgagatttagttaactactattaaatatgtggtatcaataaccatgacagtctataaaaatcttttttttcagacgtaactggttcgccttcgaaaaaatatatatttctcaagcgagacaaccatcgtatcccacgtccacgtgtaggtggctatttggatacgagggatttaccgcttgcatatatctcttaattatcgtgtgtatgttgaagacacattcatgatgcatgtgtgagtgccagtatgatgtgcatgtaactaacaaaattggactgtgatgataacgctggctaatactaagtactctcttcgtccaaaaaaaacaaaccctgaatttccgtgccaacatttgactgtctgtcttatataaaacttttttataattagtattttcattgttgttagatgataaaacataattagtactttatacgtgacttatctttttaattttttttataattttttcaaataagacggacgatcaaacattggacactgaaaccagggtttgtctttttttttaggacggagggagtaggagtattttgaaacgaaatattattggcttcaatttttcaaaccgctccctctcgccatccatcgcctcccgtgatggacggagtgaatggctgcatggattaagccagccgtccgtccgaccggattagttagggggagagagctaagaaaaaaacattaccgaagctagtggggtccgggttgggtataccgctctttatttgtgtgtgtatgccgcgcgcctttgcgtagacgcgtgacgaattcgcgcacacgtattcgctgcggtgaaacaacggaaaatttgtgcgtggagattcatcgtgctccatctgcaaactggagcaaagcacacaatcagcttcggttccaatattatgcagtgtagacttgaatagttcaattccatcgaaagattctttctagacccagtttcttgagtatataacgacactactataatgttgcgtttcatcatcaaataaatgtgcgactttgagttagtagtagtagtaacattttctatgtacgttcctgtattggaatattgaagtcaagtcttcttcaatgggaattaatgttgtgtagtactgttcttcttttcattttggtactaggatcgaagccgaattactatgccaaacagagatgctaaaactacttatattcatgattaagcattaagtagagatgtttagtttgttcacaaagcaacaatatgtgtgcttcagtaatcagtatccatttgatttgactccctttatgggcgtttttttttcagactagactagaggagtgtatttagtcgtcgcatggcatgtgaaattggcgaagagaacggaatctgtggagggaaattgggactacttgagccattttagtatcatggttaggaataactaacatgaggctgtccataatcctgaagattatgtgcagtttatctttaatttattatgtccctaatccctaaccacaagatttctaccattaccaagtgtgtacttggacaccaactcgcatcattccggcgcaagaacaaccacatgcctttactgttcatgtcttagttttgtcttgaaagaaaacaaggacaggtcaaatctaatgctactagttcgtcaattgagaggcattgataaggatttatgatgtcacgggcaagttttcctgaatgctccagctaacctgaatgctgaattgctggcgacgatgatccgggcaaaatagtacaagagaatggtacaaaatttggagggatttcaggcaacctagcagcttgtcaactagccaaggaactgtatagtaaagtgttgctttctttaaaccttgtctcactgctagtattaggcacctgtcatttcgggatttgtatggttgcacggccgctctttacacaacacgcttgcctgtgcggctgtgctatctaacaagaagtcactgtcgagaaggatgcaaagatgcctagtataaattattggtgcaaacaattaaaatccttgcgagacactcaaaacatctgaaattcaatcgtttgattcttttttcaatcaaaaatggctggtgtgtttggacaagcacagccggtacctttttgactgaatgcatatattcagttcaactaaaactgcatcgcagtgggctctgaatcttgatcatgcacatgtgctgtttctttcagagattgcatgcaccaaaccatgcacatttctatccctaattttcctgctggtcttaaatctttaccatgtgagctgattacatctctgcgttgtctgaacacatacacacaggatggcctgaagaccagagcttctagaaatgggggcaatccatggggattgagaactgatcaacagttcaatgcataactatgcagggcatagacaggctcagcggtagatgattcaccaaccagtgtaaattgcttaaaaaactaggttgtctctcttcaatcaggagggaccgttgcagtgtcctttctgcgcaaagtgacatggaagatttgctgcatctcttgttcccttgcaacaacataaaaatggccttatacaaagaaattcttctgcctcttttgtttggtacagtcagtagtactgtagtaggccgcggtttggtggtgccttgcatcggtacaaaaatacaagggggtgtagtatgctctgattgacctttccatggacacatggtttactgatatgactgaaaataataataaaaaaaatgtccacttcttgagttctactctacatattagttacccctcttgctagaataggttggtattgacccttttgttgttgcatacgtgcatctcgtgaaaaaatctttgctgctaagagctatggccatcagaagtgtgtcatgtcacctgacatttaatttggtgaagagaccaattatgggtgtgtttacttccaaagttttttttccaaactttcaactttccatcgcattaaacctttcaaacacacaacttttcaatcacatcgtctccaatttcaaccaaattctaaactttggaccaatctaaacacaacctataccgtcctgatgatgagaaaggtctaaccagctgaattttcagttcttcagcgaagaaaaggaagatgataaacgaaaggaatagaaagatgaatttaagcaagacctggtagtagtaattgacaccaaaagcgctcgtgcttaatgaggtctttcactgatcaacgaaccctaatcaaagtcgtcggcagccgcgcgaccgggctggtggtctcgccggagatcagcgcgcgtgcacgcacgcatgcggtgcagcctgcgggtgaattcgacacgcacgacgaacatttggttacagtggcagagccgcggaacttggagtggcacagcccgcacaaatctaactacgttgagtgatcgctacaaaaattctgttttcaaccactaaaacaacaccaaaattctattacgcccttgtttggtcgatgacttatcaatacataagtgttaaaatataaagtgaactgttcgtttttcgcatcagcttaactttttttggtcaaactgatcaatacatacaacttaataacaattgaagtatgtaaaaagaagaaaaatgtgaagtacctttaagatggtttcctaccatctttttcacgttgttatacgatcatgggttgcttttacgctattttctactaccggcggttattctctaatctggtccattaccgatcggaagtaggagaaatcaattagcaaaagaaacagccactaagccgatatcaaatcacagacggttgatttcacggagggttgcacaaaaagatggcggctcatgattggggcattctgaaaggcacaggttgattggtcggccatcatttacccaatccatacgccgaaacttcctcttatctctgtagcctaaagcaattggaaagtggtaagttgcaagggagattgatggatagttgattggtgatgggagcattagacagccacagcagaatatataccaaagattactaattaaagtgcctggattagtggaagtaacagtgctgtaataatagtggtagaaatgcagtcgtcaggtggtggtcataggcttcgatccagttttcaatctcgagcacttgtgctttttaatttcttctctgagagaaacaacgcaccttctttgcacctgcaaagtgcaaacgctgcaatttctctcccttcggctattctttgaccacaccaactcattcctctcgtcctctcgagctgtaattttcacttccaaaacggtgctgaaattgtgttatctgcagaaaaaaagactgaattttgcaacagcgagagcacttcactggaaatgtgcaccaattctgagcttccttgtcaccaggtcagatcagtatttcagatcattttgacgtacacatacgcatcaggcggcattgacgattcggatgaatgcaacagctaaaacgtttttggtggcttgcgagcgcgtcggcatcactcgccaccgatggggagaaatcgcggacggcatgatgcatgttgacgtccgttttcttcccctcagaacgctgtacaatttgacccatgaagacacttctgacgagcttcttgttctctgcaagtgtcacggtttcgtcagggaacgaaatttgagtcgtcaataattaatgggtgtgaacacatgatctaagcagtcaaatgtcagaagagtttgtttcgttcgtcaatggataacaaacacgagcggatttggtccatagattatcatccccaccatattccttacctaaaacagtgttctgttaggtagttagttaattatcatcctgtgttaattagcacttgtattagcaaagcactggcccgccctatcagtttcagataggatttagtgaatcttgtaaagagactgtcaattagcacaaagatagcattccagtgcaagctaaagtgggcagatcatttttttaatcgagtccaaatgagtatagtggggttcagaatattaggtcagtaggagcaatgtgacaataaaagattaaaatcagcagtgaaagtctccagatcttccaaaagaaaactggcacgctggtaaaggggcttgacgctttcaaaaagagccagaattggaccccatcaggtaaatgtcaaattagcgtgtcatgcaaaaagtcatggcatatgagtgagtagacaatcaaaatatcagagtgtaaaaaactagataaactggataaaaatggcacgtttttcaaactgctaaacggtgtgtttcgtataaaaactttcgttataacatttttcaagtttataataattaaaactcaattaattatacgttatttaccacatcgttttacataaaacacttaatctttatctttatcttcatttttattttcaagagattcaacactaagtgatatggataacagaaatacaatattcaattaatcatgagctgataactgatgccatttgatgtacaagtctaaataatagaatatatgttcagtatttacaggcttgtagcacagaaatgacatgaaaattttacgcagatagtccaagcttatcattgtacgtgccattattatgtaggattaaagccttatcagttatcagcttactgggctggcagaaggaagaagtatcttctgtctgggctcggcccattctagtctttctgaatttggatactgataaatgatgagaaaaagtacactttacgtccctcaactttgggtttaatttcgttcacatccctcaaccgtaaaaccggatataaaatcatccctcaattatcaaaaccagtacatcgagtcacgtatttgaaggacagttttttctacgttgcgcttatgtggcattaccattagtattttcttaaaaaaaactagtaggaccatgtgctagtcacaaaagaaaaacaaaaatagtgggcccacatgtcagcccatctttcttccctccccatctctcttgctcctccctcaaaccaatcgctgccagccggcgctgacgaggaacaacagctggctcaacggctcagaggagttgagttgccggagcatcatgagctcgtggaacgcagtcgatgcagctgtagggtcgtcttcctgaccgagctcagccattgtgccatccacgacatggacgacgatgcgcaggtagcaagggagcacgacgcgacacgcagtgccgctagggtccaagaggaagcggagtcaccagactcgatgtggaatctcgccgcctctccagagcttcgccgcctcgcccgccgccccaaactccgacaccaagccgttcagtcaacaccaacaacgacaatgtcatgctggtgttgctcccaatgcagtagggctggcggatggctaatgttgagcccgtccccatcgtaggcacgcaaccatagtcaagggccactcgcacgacgatgtgggatagatggatggtagtgatgagtttggtggtggcgtggtgtgtggcaggttaattacgtcaccgccggggagaggatgaggtcctgtgctctgtcgtctctccaggtgaggcttcgaagaggacccgacctccccgtcgcttcccaacggcgtcgtagccaccccctccaccttctcgtccttgttctcagtggctcgccaatacgcacacactcgacgactcctttgcctgcttcgcctgtgagctggcttggtcgcagtggttgggctcttgcgctccgcgacgcttcctggggacgacgtgtttggcgacagggatgaggaggcggggattttggtgtgtgtcgatgatgaggcaagggagagaggagaaatggagggaagaggggaaatagagggggtgctggtatgggtcacatggttttttctgttttaagtgctacgtaggcgtcacgtcagctaaaattgttgtctaaaccaccttaggattttatttgtattggttttaaaagttaagagacacagcatttctggtattgttttttaggacgaattttagactcggcgacaaattaagagacataaaatgaacttattacatacatgatgggtcagtgcctcagtgtacgattgagggatgcgcaacaaggcccaatactagcattgccagcgtcattcttgcaaaattacagctgcagatcagaatatcagatcgtatatactacagtacatacactgtcgtctatatataagaatgtggacagccgatagcgtcataccggtagcattccgtgcatactcctacacatgttaaaaactaacaggtctatgactgcattgtttgtatctcagtggcatgggaaaataatttcatccctcgagaggatatcccatcgtttcgtgtataaaaaaaataataaatatagttacgaatgtacgataactattttcagtttaatttgttatttttgttataatctgtagaagttaaatttagtctttgcatatatttcgtattaacctatgttgtaaaaaaaatttatttttttaataactatttaaatgacatgtaaacaatgagagaatgttccctcaaatgataaaaatccacgcccaatgacataaaaagataaatccttcaactctgcaacgtcttaagtagcggtgccattcctgcaccgctgcacgcatatccatttttgttgtaggcgtacgacagcaccaaccggagtgtctgacagagctgccccccgtgaccactcaaatttctagtatatatgctaccgaaattaatcgccattataaggttataactgctcaagattcatgcaccgacctgttccattatccctctctttcctgatccacaatattttggctttttttttctctactaacagtagaattgatctagaaatttctcgtctgtaatattttgaggttagtaaatttcgatagtgttagaatatatttggtttggaatcttatcaaatgttggtagtatttttaaaagcaaaacttctctagaataaccaaattttggagggggcgcacattgattaaggtatatttgatttgttgttttaccaaatataggtattgttgaaagtgggcaataaagtaaacatatccttcatattttcatctaaagaactgaaaaggctagggagtagtcgctattgtctctttaaaacatgtgttggaggtccactcgcatatgtgtgtagatacatcgtatatgtttatttttcttttgaaagaaccacggtaggggaagcccccaccgttaagattttatattaataaaggagaaaaaattacaataaatttaaccactgtaacaatgtatctctctcagaatttttgactctatgaactcaaagggagagatcattcctaaagagaactctccaagagggaacagagggaacaatgttttcaaaaattaaactattcatctgcttccaaatgttccaagcagtataaagtaccttctcaacaaaatgggtagagttatatgaatttctggccgtgaccaacatttcaccaaagcttaaagaaagattccaaaccacaccaaattgcgcccaacattcagtgctaaaaggacactggaaaaataagtggagagttgtttcccttgatcctgttgaacaaagtacacagagcaaggaagcattttgaggggagcaatgccttctgtctaacatgtcataagtatttaaccgatcaatcaagagtagccaaccaaacaccttgactttcatagtacaactgctcttccaaatccatttaatataaacaggcacatggacatgagaaaaattcatggcataaattttctgtgagaaaaagataccgttgccccaaacatatgtccatcgatcactctcatcattaagatgctccaaggtatctgcagctgacattgccaaatattcctgaaaagcttgctctgaaagtggcaaggcaaagagctgaggtagatcagaagtagagaacatcagaactgagagatttgaattcctggcaaaagaatatattctgggataaaccaaggccctgactttattgttccacaaatattcccaaaacaaacaagattttccatcttgcacagtacaggccgagatgcctctaaaaatatccacaaattgcaaaacatccctccaccaaaaagatcctttaggagtaacagcatgaggaggttctgcaatgtagtaagtattccaaattaaactgacccagggaataggatatctattatagaacttatgcagattcttcaagagaagggcattattttacaatgtaaggtctattacacccaaaccacctctatctttcggctgacaaactctttcccagagaaccaaagacttcttattagaattaatatcagatcccctccacaggcaatgtctcctagctctatcaatactttctataactgtctttggaagtgaaagagagcacatgtagtaagtgggaagggaggaaagaactacattcacaatggtcaatctgtccccataagataacaaagcaatggttgctgagagtcttctctctactctatcaactagaggagcaaaatctataactcttggtcttgtggttccaagaggaagacccagataagtaaaaggtaacttaccaatagagcaaccaaacaattttgagagatgatcaaccttttccaaatctacatccagaggaatcatgcatgacttactatagttaatcttaaggccagttgaagaggcaaaagtgttcaaaattgccttgagacagaaaagctctttttgggaaacagtcaaaaaaagtagagtatcatctgattaaaaatatttgatatgtttattttttgaggaaattgcagtggaggagacctccacggtatatattaaaatagagaaaagttatttacaagcatcaaaagaaagaaaacaacagtgttacaaaaggtcaatccataattgaactagagggcgatgaatctccttgagcctagataaatgtagactcaaatcaagcttgaagttccttttccaggtaagaaccccaggctgaattccattaaaaaataggctatttctctccttccaactattccaagcagccaacatcataagctccatgaagcagggattagagataaaaacactctgtgattggatcatataatgaaattcctgggaagtattccatctccaacccaacacattccaacactgctgactgaaactgcaagtaaataaaaatatg

SEQ ID NO: 26633 - DNA, 6215 bp, Oryza sativa
  unsure (1)..(6215): unsure at all n locations
agggtgttcgacttcgtaagtttgatttggacatggatgttagatggaatgcaacttatctaatgcttaagcatctcttcccacataaggagcttttttcattgtttattgaaactcattatcctagggaaaatgatagactattgcttactgatttgcattggacaattgctgaaactgtgcttttattccttgaacaattttatgattcaaccgttattttgtctggtgtttattatccaacatctccattaattatgcatcacattcttgagattgctggacatcttaacacttatgagaatgatattaactttagaaatgttgttgttcccatgaaaagtaagttcttggcatactggtctgagattccatttctgtattcatttgcttttatcttggatcctagggctaagatcagaggttttagcaatgttctacaaattatgtcacaaattttgacctctgattactctacttatttaactgaggttagggctgcattgtctgacattttttctaagtatgaaagtaagtttggtgctgtgagattgcaaagaacaaccccaggcaatactgctggtaagaaaaagatagcatggggaaagatttttggtgccagtgatgcacttggacatggtgctggtgccagtccagcttctggacttggtgctggtctattttccaggagaacttctgctactgctttgattcaagctgtttcttctaatgctaactcgaatgcctctgagttgtctgcctatcttgatagtgacactgtcaaccaattcgacgatgacttcaatatcctaaactggtggcatgagcacaaacacacatatcctattctgtccatattagctagagatgtcttgactgtttctgtttctactatatcgtcgaagtctgcttttagcttaactggcaggatcatcgaggagcgacgacgacgtctaggtcttgacatggtgcaagctttggcattgatcaaggactgggagcaggcagacaagaagttgcagcacactgctgagaatgtagagcttataaaatcatttgagaatttgtttcttgatgatgtaaccagaggcaatgccactggaactggatgattgtactggacttggactttaatatgatagttagatgaaagctgtgggctgcactcttttttcctttctagagttttctcacgaggtgtgagtttttacctagaaaggtttttaatgaggcagccattgcactacacagctactattatttttgaaagtgtttgtgacttgatcacttaagtttgaattgtgatttgtgaactgttagacttagtatttgaaaatgtttcgtggatttgtgacttgagttgtgaattgtgagacttagtagttgagttagtgaattgaattgtgatattgcacatactataacttgtgaattgtgatattgtaatctaagacttgtgatattgtgatctgttaacttgtgaattggatggttttgtgctgttttttgtgatggacattgcattttttatatgtatgtgcaaaactgaagtgaacaagtggcagttagtgtttggcgtgtctgggctggcccgggcacgatgggctcatcgtgccgtcgggccagcacggtccggcacgactgctatcgggccttgcctgggcctgaggtacagcccgtgggcaggcatggcacgacacgaagtgccaggcatgccgtgctggcccgatcgcctcgggccgtgcctaggccgggccgtgccgggtgggtcatatggccatctttacacctcgtagtgtcatagtttgctcaatagtttatcagccattaaaaaacttaattttagaattaattttaagatttatttattgtagcttattttttacatttactttataaacaataaacaataaaaaacatataaaaatgttacacacaaattagtttttttcacttcgtttacttttccaggcgtaaggcaaacgatagtacgacataaaaatgccagtagaagttttggttattttttcttaaaaaaagacatactagtaatttttgttattgactttgcatcacgtgagcaccgcatcgagcttgtcttcttctccggatcgccacgtcagctttccgcttatcgcgctaaagctttccgatcttgccgcagcttcaactgccacgtggggtcaccgcctcgggcccgcattgccagtgacacgaggtagatgcataaaagtccaacacagtcgcatccacacgcggggccacggccgtgcgccacttctcttcctcgctcactcttccccccctctcgcttccttcccttctgctctgcttcctccgcctctgcttcgtgtcgccgtcgccgccgcagcagccgccgccggcgagcaccgggtgcggatactgggagcgatggcgtccgggaaggtcgtgtccttcgtcggcgccgacgagctgggcgtgtccctcgccgcctccttcgtccggtccggggccatcgtccgctgcttcgtcgctcccggggttcgatttctcttccttgtttttttttttcttcgcaggaggttgacgagagacgggctcacgtgagggaacgtgtgcgcgcgtgcgtgcgtgcgtgcgtttgcagggtgatggatcggcgacggcgctcgcggagctgggcggcgtccggtgcgcgagccccgcggaagccgcgcgaggtgagcgtctcgactggagctcctgtactggactgctggaccggtcccgatgcgagtagacagatggcctcctcgtgatttgtagcagttgtttgcgtgccagttggtgttcgtggtgtttgttggattgcctcgtgcttgctcacgaggcgtttgttggaatgccgtgctcccgtggagcaagcacgcccccacatgtctgcagcctctatctgatcgattgctatatcttgatacctgcagacgctgagctagtcattgtgctcagtgacacggatggggttgatgagctgttcttcggacctgaggggatagtgaaaggtatgccatgtgcacgtactcaattttcccagttactaaatttgatgcttcatacaacgtctcattgagcatttgtgcaggactgtgctcgggtgctgttgtattgattcgatcaacaatgctgcctagtcatctggagaagttgaatcagaagcttgcaggtaggcattgttgattttaggataaattaatagaagagttttcttggaaaaaaacttgtatgatgtatactgggtaatggttactttattctgttccagcaaagggaatactgatctttgtgatggacaattacgacaatagccacaatactagttaatctatagcctgacttatcctgcagatgagaagaagaatgcccttcttgatggatacatttttagtggtttatctgatgaattaaagcaaaagattgttgtaagtgatgggacaagatgagaatatgaattgcgcgtgctcgtgtcctttattctgttgtcacccatttccttttaaataccaggttgttgcatctgggagacatgatgttacagaaagaaccgggcaattcttctctggtaattccaaatatgtgttaccattttgccaacattttcttcttggcctatgtcttttgatgttgtgatggtgcaatgatgctgattctaggctacatggtgatattttaggtcttgatacagcagtttactttgttgaaggtgaatttggcagtagcaggttgctgtcttctctcatagtaaagattatcttacattatagaatattgagcattattctccttttccaatttatgtaccatagcccattaactgaaatgttactgatcacagttttaactgcaacccacttatttttacagcaaaattaagctggttaatgatttgctggagagcattcattttatagcatctattgaagcaatgtttcttggtgttcgggctgggattcatccatcaattatctatgacataatatcgaatgctgccggaagctcaaggttataagagtaattcagttcttttttattctatctaaatcttccatacttttatgcatttatttaaatcaagatcttaacttattatgctacagaatattcgtggagatcgtaccaaagcttttgagagaggattctttgcttattgattatctagagtcatccaagacaaacgcagtaagctcctttatgtcaggactacttgcatcatcataaaatatagtatccttcattccttaaatactcacactgaaacagctcctgagactttttttccctgtcagacaatcaattcaccttggtgaaatatttttcattcaacatacacatgttcattctctcataatttcactacaacccttctttctttttctacaaccaatgggaggagaggtactggagaggagattagatatatgagatggtgccaggggcaaatatataaatgtgataaagaacaagggaggggggtatgggggcaagggatgaattccatctgactggtccttaaaatagcttgagaagttgtaatgttctaactataattgttgccttccccatggcaaacagtttactctagtcttttactcttgtggatttaatttttaggtatttatatttttgtatatgttgccaggatactctctttcagatattattaattacttaagtgttgctctgatgttgtgaaatgtaaaaggactatggctactgcaaggctgaacgcttctgcttctgaattattatttttttcactcttaaacattatagggctatgtgatggatatggctaaagcagtaatattccctttgccacttgtagctgtttcttatcaacaattaatacatggtatgctgttaaactcctttgcatcagccatttgatggcaaaatgctagttcaaagtcatttatgcttttaataaaaagacttgaatccctacattctttgcttatgtttttttcattcatatgcatttctctgttcttaatttcaggttgttcatcagcaaatggagatgcattagtctcaccgttgaaggtgtgaactgtcgggttattttaattctgattatagatgcttcagtttcgcaaatatattataaaacttcatttgcaggtttgggaacagtcatttggagtaaacatcatagatgctgccagtcaacaaatctacgatgcaagcaaattagctgaccagcttgttatggcatgtaaaacagcaaaaactatcggctttattggtcttggagctatgggctttggaatggcatctcatttgctaaaatcaggtttctccgttattgcttatgatgtaaggagattacttaccatagatatgccagtagatatgagtacatatccaatgtattactggcggaaagttgccagggtagcagaaaaagagtgctgtgcgccatagagcagggcacttgcagtgcagtgtggaggagtgtcgagagtgtgcacagtattgtgtggatgagtgtacgcagagtgccagagtaggagtgtgtcagcaccatatgcagagtaaagagaatagggcctgccaagattgcacgtgtggctacaaaaaaaacacacctatncaacgggagctattcagctcacatagacagttgaagttcacgtgcatggtgcacgtgacaccagtgatctgaatgacaggcagatagtttgtgaacgcctttattcctagagatgagaaaatagaacagcctacatgccattttcaccattttatacatttattcagtaacggacataatgttgcaaactttatttcataaaatttgctcttttttttggttttacatacaataatattttttgtattccatttaggtatacaagccaacactggccaggtttactgatttaggtggattgactaaagattctcctgaggaagtatcaaaaggtaccttgcaaccttctgctacagagtaaagttctcacaaccataagataaaatttgatcaactatagaattatagtcagctaaaatgtgttgcgcaatcaaagtccacatggaaaaaatatatgtatggatatactagctgaatgcctgtgctttgctagggataaaatatatttttcatgaagtgtgctacccatggtttgatatgggaaatattcaccttattttaattttatatgttgctatccatttaggtttgattttttaatatt

SEQ ID NO: 26634 - DNA, 5559 bp, Oryza sativa
ggaggttgtgtttatcggtactactagacgcgataccctgcgctttgctacgagatatctgaataaatgcatgttaattatacgtaaaaaaatggtagatatatgtttaaataatatgaaaatgatgtagagataatgatttgacattacttgcatatttttcagttttaaagttataacaaaattataaatgatatgtcatatttgcatgatatttaaaatactctagataattataattgctagtggtgatgatgtggcacacttccatgttgagttttaggagttagtggatatcaacttaatagtaagataagattaattaatcatgaacttattttgagaataactttaccatgttagaaagtagtatgagtatattttgttcgattacacgaaagacccaaatacatgtgaaccccaaataaacatgtacacctataaatgacaacccctcccctctcccccaacccgaaccaaggttgagtgattttctcaaacctagctttggctggatttgtataattcgctctcatcggttaacctaatattgattataagttgtatggtttattactaataaaaatagtttatgtttcaaacttttatatgtgttcatagcgatggaaaaaccaacattgaaaaataaactacaatgaaagccccttaaaatcaacttcaaaattagttttaaattttattagttgtagggtaaataatttaaatttatataagttcccctttcatcttatactctatgcaatttcaataggtatgcgatattagcccccaggcctaattgccatattcctgtctcagtattgtctataacatactatggaggtcaaagagatacggaaaacactagtggtgtgatggtggagtcgtgggtgcatgactccacccatatggactcaaatcctaatgtccacaaatattacacacatgtaggtgtgttttcaatagaaatttattgagattagggttgtgccgctggttttcatctttaaagcatgtgttgcgtgtgcttcagtcatgtaatgaaaaaaaaaagtcgaagagataggccaggggcaccataccatatgcttctcctcatgctatatcgtttattgccatgccacgttggatatgccaaacaagatatattttagagtaatcttctaaaatttgtatatactttcacgcttgacattattgtcgtcccacgttggatgttaaaaggatttattttacaatagtcttctgaaacctgtatgtagcacatgacataatgataagcattgtgggtgtatttgtttcctcgtatttcttgtcacatttcaagatagtccgcttttttttccgtggcagatgctatatatatatttctttttatgtttgcaataagattataactctttctcttgtatctctatcataaaaatatagctatttctattgttacaaatatgtacatttttaagatgtggtgtacatatatttctagttgctccctcagtttcatattataattcgtcttaagtttttccgtagtcaaatttctttagatttgagtgaatttataggaaaaaattagcaacatctataacaataattagtttcattaaatataacataaatatatttgaatattatgtttgttttgtatttaaaatatcgctatatttctatataaacttgattaaacattagaaaaattaactagaagaaacgtcaaaaacaacgtatctttactacttaaaaaatttaaaatgtttccttcttccgtaaaaaaaatagcgaaaaaaataacaaaaaagagcaaaatttaaaacgtttccttcgtccgtaaaaaaaagcgaaaaaaataaaaaaaagcccgactcctggatccgattcccccttaaaaacgcgtcaaaacaacaaaaaaaagcgaaaaaaagtccaactccctagatccgattctcccttaaaaacggagtccgactcccctaagtagatccgattccccccttaaaaacaaaaaaaagctgagcaaaaatagcaacgtgcaatccttcgtgccaatatgagtcgatcccaggcacctgtcctctcggtttcaatctatacggtgatatcccatacatcttggtgaaaaaatctgtgtgccggatcggagatccgtttgcaaaaacggaacctatagaaagagagcattccattttctttgtatgattttaatttttgggtttgcgcttttgtatttgagtctctattttttttatttatatttgagtcaccgtaatcttgcaataaggtacttgaggttgcttttgttaaaaaaaatcaaaagaaaggagagaaccaaggcagaaaggtgcataaaaagaaaaagaaaagccgcacaagaaaagaaaaataaataaaataataaaaacaacaacaaaaaagtccgtttcccctaagtggcgaaaagaaaccatagatccgaacagaaaaaaatccgattcctatagaaggcaaaaaaaaaacaaaaacaaaagtggtgaaaaaaaaaagctagatccgattcctttaaaaacggaaaaaaatttctaagttcactttaggtcccttcagttgaactttttttgtttcattcattttgatatagagaaatgaatattgcttttgtcttatcacacctgattctgaaaaaaaacaaataaaatgtcattgcattaaccacataaatattgtgaatttttttcttaaagagctcatatcatataaactaaaccttaatcatataatatttttatatttgttataaatttttgcaacgcacgggcattttttctatgtcaaaaaaatattttaatttacagaattagtttgctctatttaagctttttaaaaattcctaaaatttgagaataacttttcttacttcatattaagttatttttagctaatggaattaattatatatttttatcttttgaccaaaggtcactgcaatttcatttcattattattattatgattacgattatcatttttgcgcaaccgtatgtatgattaaaattaccttcacctattacaacgcacaggtattattgctagtaatataaaatggagagagtatttccgtttgtggactgattcgaaaaaaaatattgatgaaaggttgaaaaataggaagcctatgcgtggaaaggcagagagagagaggccgggaaggcgccgtgcgttgcgaggactgtcaggcgccgggtcacctcgatccgacgtagatttggccaagttggtccctatcgcggctcgcctttcggcggcgacggcgagcaacgggcccgccaccgcaagcgggccagggcacagagacgtgcacgccgcggagcttgggctgggctacctggctggctggctggccggcgcgacgaaccatcctcgcgcgtgcgtgcgattgcgaacaaggggctagctagctaggtagagtagtcctctttggtcactgttccgtgcgaccatgcggccggccgtgcagttgattgagggccccccgtcaatgtaactgcaacccgattagcttagtgttaagagtaaattttataaaacttcaccagttatggttttatgaaatttagtctaggattaacgatgtgacattataacaacagttaagtttttttaacatgtatttttttcccataaatttcgtaacttacactgtatcttaccaataaattttaaagcttaaatccatttattttgtattctcgatagacgataactaggacaaaaatggttgtttatatattttaatctgagaaaaaatacgagtccaaattaacgtataagcaaaaaatgtaaaaaaataaaagtagaaaaagatataagggagataaaaaaacagagagctagccatcgcgtaatgaaaaaaaaagtgattgaaaataagcaaaagttatcaattatataaactcctcaaagttaatttacatttaaaaaaaaatctccaaacttcctaaattcacaatcacaagttcataagcacttcaatcgccacctctcttggcaatcgccttctcgagccaccgctattctcactatcattgctcctgagccatgaatgtagctagctaccacggtcgttgccatcgctaagtcgtacccttatcgttaagttctatcgcatgtagtgtttttgttggtccaccattgtcacctgattcagcgctcatgaggagcaccaccacctagattcagagctcccaaagctcacttcagcctcagctgcttccatgacgggtgtcgtatagatggccgcgtagagacatcggatgatatgggtggcacagaggaagagggggagggcagtgcgtggggagggataggaagaaataaaatggagggagacatagaaacgcaggtggtgagctgaaggagaggggaatagagaatggtggattgggtgcagaggccacttgacttaacttttttctcacttgtttgattcggctggcattggctgcctcggtcacttaagctgaccatgtgtccgtgtctcaaaccctatttttagatatgtccgttttaggtaacgtacgtcgaaatcgattttcagacagctcatggccacaggccttcccatttactacataagcagttttttataggccacctgtgcagcaaaataaagctatctttgaaaatagaccttttttcattattactccttcacaattttaacttttttatagtcaaacttatttaaatttaactaaatttattgtaaatcatagaaaattttcaacataaaacaaatatatatctcatattagattgaatgaaactaatttggtttggtgttatatagatatgttcactaaatttctctataaactcggttaattttctttaaaaaaattaccagaaaaaggttcaaaacgtgttataatataaatggagggagtagtgaactagtgatgaacagtggaaattagtgcgttcgagacacgtcgtccgttcttgtggtggttcagtgacactcatccaaaattgtggactcctagctttcgatctgctggaccatttagtcctccgatcacctagtccttcaaccatcttggccatacctatgcccagtttgcccactattaataattctcgctcccacaacttctcacagaatctaacgatagcctgagccccatgcacaaatgacaccgacaccattgacctcagctgtttagacactatgcccactataggtacaaaagcctagctagtactgtcactgctgccatgaggaggaagacattctaaaacattatgagcctcttcttttgcttttacaatctttgtcaacctctcactagtggcggctcatatagttaaggtttaggatttgatgttagcgtccttgacatgataatgagatggagacaatgccattaagaggagtaggaggtagtaacaaacatcaaattaaaagagcatcaagggtgagagcccaaagagtcaaagtcacaactcgcaaaacaagtgtggttggtgatggtgtattggtgtatatcgctttactcgttagatttagtagtgtcagatttt

SEQ ID NO: 26635 - DNA, 15263 bp, Oryza sativa
agattttatataacttttttaaaacatattataaccagtggcgctcaccttctcacaatatgcatacactcatcctatctaactagttgaactatactcactccatggattttgtataatttgatggaaaacagtctgataagcgaaattttctgagaaatcaatggatggaaggatgcatagacatgtgcactcgatctaaacttcacatgcataaaaattttttattattaatttgtgtggatttgcttggcaaaaatcacttttcacatagtagtgcatactgcataatgtagttccattacagagagcaacagatcgttagttagtcctttgctccttgataccaaaaccctcgttctgatatagactaaacggagagtactaattcttgattggaattcctataacctaattataggcctgtaaaaataatgccaaaacctaagtaggttctgaaattaccaaaatttggtaaaatacaatctattatattcagtctttgttttgtttgctattaaagaaaactatttttggcaaaaaaaaagagaaaaagaaaaccaaattttggcaatgtgatattatgcatgggcattagcattactaaagctgggctaaggcccaatggaatagacagggaaaggtgagcaagggccaggcttgacctcctcccccatggtttgagattttttcaatacagattattgtacagcttgtaagcaattttttaaacagaactaacattatcagctctcctaataaataatttataggattcctggctccaaccactgattagggcctaccaaattataataagcaattcaaatcccaatcgaacactattgctgtttcaccaaagctttggtagcaacctaaaccagccattcctaattccttgtcgatgaaaacaacacaaagtgaacttgaaaaaccttgccgttgcacgggctgtgcattgactacttttttcatatggcgaccaagccaaaaaaccaaacaaaattaacccaaactggcacagctccaccgtcctgccgaagaaggggcaggcatgcgtgcgtggagaaagctacgcacgcatggggctgcgctgtactgagccaaattttatggttaagttgtcaacttgttgtttgtacccatatcgcctaacctcccatgacgacgttgattcctcgcttcgatcctactccctccgtcccaaaaataaaaaaacaaaccctggtttccgtgtacaacgtttgaccgttcatcttatttaaaaaaaatattaaaaaaattaaaaagataagtcacgcataaagtattaatcatgttttatcatctaacaacgcataaagtattaatcatgttttatcatctaacaacaaggaaaatactaattataaaaaaatttcatataaaacggacagtcaaacgttgataaaaaaactcaggatttgtctttttttttttgaacggagggagtacatgtaaagtgagccgtcacacgtcatgtgtccgtccacggatccatgctactccctcagttgtttaatacttctagataacatcgtttaatttttttaataagacggatagttaaacatatgcgtcgtatattgttaaaagaataggagggagtacattctggaagtacgagagccctgtcacagctgattggatcggttcagatttggatgacaaggcaccgtgtgatagttttggtacagttcttttggttaatttcatcggccgtcaattctgtgcccacgctttttagtagaccaagcttggaaaacagaggcaggtggccattttcctgctggttttgtggttggtggaattttgcaatacatttttagtcacgtttcttatcatttatataaaaggcatagccaagtgtctaaccactctattcagtttctattttaagtcattctccagatggtcccaaatatcatcactcttcttgtggataaaggttgaagagtaaattattctaacttggacaaataaaaacgattgtcattgttttgcctacaactaataatatatgtatttagcaacttaaaaataaatgttaaaaaataaaccacgattaaaaaaggagtatcttgcatcaactggtaggtgcgggcgatctaatgcaagaacttaaaaaattagcatatatgtgcaataatttggttatgcgtatatattggttaaaatatcaatattccacactatactttttatgccaaataaaaaagaagccactcagtccatctccacaaggatctgcatatatttcttataatttcttagttataataataaaataatttatcgatttgaaactgaaaaatatatgattatcaaaagtaacataattttcgagcgattcgactaatcaacatattcttgggcgacaataatggcaaaacacaaaattgaacccatgagtcaacgatctagcagttaaccttataataccaggattaatcaaaggtatgtatcagagtgtttttgactaaaatacacatgattgccaagttcatgtaccaatttactcattttcaagttcttacactagatcatatccacctatcaagttcttgtatcatgggtgttatttactcaaaataaaaggaaaacatcaagctcagctctaaaattccagatttgatggtaccatgttattcccgcgctagaaaagacgggtagccaagtacaccaactagccgattggtgcaaagcaattaggaaatctgcccgtacatcttccggagttgggcgagcagaagggaacgaggccaccaaatggcccgcaagcccaccggccgaagctcgggctgcatgcaaagcgtgccgggcacagcgcatggtgacagctcacgctggctgtaggtcgtagtgcaccctgacgcgcggccagcgcgatggcccctcaggacccaaacgcaccgagagagaacgcctcggaccgtgatcccaggtcaggcgggactacccgctgagtttaagcatataaataagcgaaggagaagaaatttactaggattcccctaataaccgaattgtagtctggattagagtcctcagcgaaggaccgagcccaactcccatggaaaggggcacctgggagggtgagagccccattcggcatggacccgatcgccccatgaggcgccgtcaacgagattggttgtttgggaatgcagcccaaatcgggcggtaaactccgtccaaggctaaatacagcgagagattgatagcaaacaagcaccacgagggaaagatgaaaatgacattgaaaagagagtcaaaaagtgcttgaaatcgccgggagagaagcagatgagggccgatgatgcgccctggccgtatgcagaacggcttcggctggtctacgaattggctcagggcgtggactgttgttgactgcgccggcggccaaagcctgggggcctcgcgcctccgatagccatcgtcggcgcagccggtcaccgcgcccctcggggcactgcgttgcaacggcctgcaggctccccatccaacctgttttgaaacacggaccacggagtctgacatgcgtgcgagtcgacgggttttgaaacctggaatacgcaaggaatctgacaagtggcaggccctcgcgggccatacctttggccgccctgatcttctgtgaagggttcgaattggagtacgcatgtcgggacccgaaagatggtgaattatgcttgagcggggcgaagtcagaggaaaatctaatggaggctcgaagcgatactgacgtacaaatcgtttgtctgacttgggtatagggatgagaccaatcgaaccatctagtagctggttccctccgaagtttccctcaggatagctagaaagaccaatatccaatgtccattatttctctcctaattcatggagaaatctttctctggtttagactaggaaaacccctaccatcatatgcaggaatttgagcagctttgctcgtcacggtggaaattgtttctgttctctctttatgagagagagagagaaacaatggacattggatattggtctttctagctatcccgagggaaactttggagggaatcacctactagatggttcgattagtctttcggccctatacccaagtcagacaaatgatttgcacgtcagtatcgcttcgagcctccaccagagtttcctttggcttcgcctcgctcaggcttagttaaccatcgttcgggtctcgacaggcgtgctccaactcaaaccctttacagaagattagggtcggccggcggtgcggcccgcgagggcctctcactcgtcagcttccttgcgcatcccaggttccagaacccatcgactcgtaggcatgtcagactccttggtccgtgtctcaagacgggtcggatggttttggtagtagcacctcgatcatcataagaatcggtcttcaggcctctgctgcaaagcactaccgtattatcacatgtctaataggtaaggcttagtttgtacctcagtctaatgggtaatatccacgaattaaatttgaaaatatatattttttcaatattttgcgtttatatacatgcatgaaaaatatttgcacaaatataccacctccgtataacggggatgcgggaccgaggaggtgctgctcttttattccgtgggaccggcagtcgcgcagtacgcccgtgcggcaccgcctcacatggactcgctggagggcggtcccgcaccacggcgctgcgcgacaagcacagtcccgcgcatcagtgccgcgcaactgccctccaccacgctaaacagtgcagctcggttgtgtctggattaattatagacctaacggaggccaaaattaacaatatgactaaccagctagcttgtactttctcgaggaattaggttggaaatgatcgatggatggagctgaggagatcaggatggaataattaataagctaagcaagtgcttatgtattgtgaggtttgactggatcaactgcgtgcgtgcgtgcgtgcatgcttgacaggtgatgcttgcatccgcgacacacgcacgcgcgggacgggacgggaagcacggtcccgcgccatggcgccgcgcgaccggctccgtcccgcttggtgccgccctccgccacgctgccgctctcctaagctgcgggagcgagacggtgccgcacacccgtcctgcgcgatcgccggtcccgtggaataccaagcgcggcaccgtttcgatcccgcgttcccgtcgtgcggaaaaaaatatttgtgcaaatatttcctatgcagtatataaacgaaaaatattaaaaaaaattgtatatttttaaatttaattctactatccacgacctcatgggatgtggttccatggccacggcggagttgctcggcgaaatgttgttcggcccggacaatcagggggccttgtgtttactcggcccaggaggtggtgattggtatagatggccatgtgggccgcccggcacggcacggcccaggcctggccgtgcctgggccgaggcttgtcgggccggcacggcccgaccgacgcaccgggccgtgccgtgccagcccacgtgccgcactcacagcccaggcacggcccaacacgcctcgggccgtgccgggccggcccgaaggcacgatgggccatcgtgcttttcctcagaataagtctaaattttctccctcctattaggctgtgacattgtatagctaaaaaaaagtctattttacctccctcttctttgtgatgtggtatataaatagctaaaataagtctatttaaggtccctattctttagacattgacatttatatgtctatttttagtccctatactttgtgtaccgggtctggcctgccagcccatcgtgccgggccggcccgaccgtgccgggccagcccagcgtgctggtggggaggcccaggcacggcccgacggtcgggccgggccagcacgggcccgacccaagtcgggccgtgccgtgcttgggccgggccaaaaaggcgtgccgtgggccgggccttcgggcctcgggccttatgaccaactatagtgattgggagatgaggcgcacgcggcggcatcacgtaggaaaaagtacaccgaaggtacctcaacttgtcattgagttataaaatcgtccccaaccgtaaaaccagatattcaacgtcccttaactaattaaaaccggtcacaatatatccttcggtgattttaacactggttttatcctacgtagcggctgaatcaatgtgacccacgtgtcaggatgccacgtcagtctccctccctctctctctctcactcttctcttctcttctcttccgttctctttctctgggcaagccggccggcggctggggagaaggccgccggggcgaggcgggagaggcggccggcgccgcaacggcggccggcggcggcgtcgacgccggcgatcaccaccacgtctaaggttgtgttccaggacggctcagctccatggcgcagttcgtggcgccggctagcacggtgagggacgcgcgttgtcggcgtcggcgtccacctgcttcgtctgctgctccgacgagctccgcttcgacgcgccggcgcgcgcgatggcggtgcacgacgcgctccggctgggccagctctacttcgtgctgcccgtctcagcgctccaccggccgttctccgaccaggacatggccgcgctcaccgtcaaggccatcgcggcgctcggggcctctgccactgccgccgccgccggcggcaacagcagcagtatcagcgtgtcgtcgcggggcaagaacgcgagtcccgccagcaaacagcggcagcagacgacggctcgagtggcgccgatacgacgaggatcaacggaggtagcattgctcgccaacgcgcaggattgcagatgcagaggtcgagcgccatctcggaaggcgatgagtgatccaacttattaaattgctatatacaagtttgatcaaagattagttgctaaatgctaattagttaattagatgctcccacatttgtagatagaggagtccatacttgtatagtatgttcagacaatttttatactgattctttgcagcatgccatatcgtctttttttttagatgaaattgttcatatctccgttgatcctcgtcgtatcggcgccactcgagcagtcgtctgctgccgctgcttgccggcgggactcgcgttcttgccccgcgacgacacgctgctgctgccaccgccgccggcggcggtggcggaggccccgagtgccgcgatggccttgacggcgggcgcggccttgtcctgggctcctggccggagagcggccggtggagcgctgagacgggcagcacgaagtagagctggcccggccggagcgcgtcgtgagccgccatcgcgcgcgccgacgcgtcgaagtggagctcgtcggagcagcagacgaagcaggtggacgctgacgccgacgacccgcgtccctcaccgtgctagccggcgccgcgaacatggagccgtcctagaacacaactttagccgtggtggtgatcgccggcgtcgacgccgccactggccgccgtcacggcgccgccctcctcctctcccgcctcgccccggcggccttctccccagccgccggcgggcttgccgaagaagaaaagagaagggtgagagagagaaggaagggagagagacgtagcatcctggcatatggggtccacgtgggtcctacgttgactcagacgccatgtaggataaaaccggtgtcaaaaccaccgaatgacctattgtgaccggttttgtaagttgaaggatgtcatatatctggttttgtggttggggacgattgtataactcgatgacaagttgagggacctacggtgtacttattcccatcacgtatggttgctgctccagttagggcggcccagttaaacgtttcatccgtgagcggtgaggaagatgatcaggcccggcacatatgttccttttcaacgaatttttttgggagtacctatacatctttcgaaagatttttataatcgtatcacacagatttttaatctttagattaaaatccgatagatataataaaaagcaaaaagcaattaagaaacaccataatggacactaaattaccatatcctcaataaaaagaccaaatccaatacaaaatttaaaatttacatgcgaagattcaaaaattacagtgtaacttacaaaagttacagtgtaaatttcataaattacactgtaacttacaagaaaatgcactgtaaatttgagtaagaaaatcgagtgagagataagaaaaaatctttcgagtgagatatagcaaaatcgaatcgaaaaattaaaaattgagtccgacacattaaagaagcgggccaggttggatgagatttgatctagactgatcaatttgcacgaatcttgcaacaaaagatctaacggcaggaaaatcgactgagacataaaaaagaatcacacgacagagaaatagcaaaatcgatttttttttatttatgtttatcttttaaaagatttaaaaaataattaccgttttaatgttttgtaaaaatatattcctcccaccctatgggcatataaatcgccgtacggtagagcgtgctatgtgacgtgatacaagatgggaggacgcgttgtgtcaattcacgccctctcgtagggcgacttattttgatgacattgaccatagtttgataatgcatagagcgtatcatgacaattttgcaagcacccccctcccgatgataaaccaccctcaccggaaggggacaacctacgaaattaccatggcacgccctctcacggggtacatcacatagattgttctaccatagagagatttttatgccttgtcctacaatagggcaagagaagtatatttctattgttataaaaattgaagttgtttttgccggttccgtgtatgagtcggtttttaagttcgttcgcttttggaaatacagatttatatttgagtcgggttttaagtttattcgcttttgaaaatattgtataagaaatcttttttaaaaaaaaaactcgcatgctaacttgatatgattttttaaaaaaatatatatccaagcgaattctcacagtaaacaataataagattaaaatagccttcacccgttgcaatgcacaggtattttttctagtttatgtaaaactttgaaatgtgaatttttttttgaaatatttgaaaaacaaatataagaaatcccttttcaacagcaggggtagttttcgaagaggactacacaattattggtaggcctcaggctgacctaaactttattaatggtatcacatcccaaggaaactatacaggatattgtaatttttctctcgatgtgtgccgaaattgggtttggtcgcatggcgtcattcaatatttgttaagaataagaacaaaaaatccatcaagcaagtaacaaattacaaagccgttttgtcttaccaaatatctacagaacggagccgaacaagagcaacacgagatgatcgattttgttggcactttttctaacactatgcacaaaagtaatgtatctttatacgtagagctactcgtagtactttctcctctaagcatcagctaaactacagcaacagatcatggcgagagcatcacagtttcagcatatacattacacagcagtataacatgtctaccctatctgaaaacatcgtgaaaaacggaaaagaaaaaaaaaactccatgtcgatcgtgtgaaacgagacaggaaaccggcggcggcttcgtcttcgtcttcgtcccaacgaaaacgaccgaagcaaatcgggctcagcagctccagtcttctctggctctggctctggctgaaaccaacatgcttcttccaatatatttatatatatatattgattgattgattcattacacttcatattttcagaaaattctgtcatgctattatctcgtctggcatcgccacgaacctcgttcgcttctgaaacaccacaagaaaagaaaaaagattagttcagaaaccgtcagcaaaagcgacgaatgataaactgataataatcctctttagaccaattgtcattgttaatcggtatacgcatggtcagggagacaacgacaggtcaggattttgagcgtggggagaaattaagcaagaaagcaagtaacaggctaatatcaaagtgcaactgtaatgcattattgtgaaaatgatgaaggaaggaaaaggctaaacgtttcgctcatttcgatcgacctctctttaattatctcgagaaggaaaaagacttggcagagttagataaggatcactgatggtgatgaggttaattgcaaagaaagactagaattatcatatgacggttgcctgcagctgctaataactgagctatagtttaatggttgtggctgtctatttgacttttagctcctaacgaataaatcaaattggcgattttaccacatcactgacggcgactgaaaattttgccggagatatactgatggttatgaaataagaaacttggcatggtttaatccctcaaactttgccagtatgggttttaagccaagacagcgaactggccatagcccatatgacataataattccatgtttcttctgcttctcaatttctcatacctttcactttttctgaaggaatcaatttaagaacattttgctttgtaccaatctcactgtacatggagttatcatttccatgtttgcaagcacagatgaacacaggactagtattaattagtcatttcccgcgaatgcaaagaaaggtatgagaaaaaaaaaacagagaaggaaaatgtagtgccacgtataaaggaaaaaaaataaaacgtcacatttcgatcaagagtattaaagtagatatctgttgacagcagtggaaagcgtacagagaactctttctgaaacttcatcaggaccaaaaacatttttccgctggagatctacgactggactacggataattgtacgctgaattagcagccagaaaaccgagaaaagtcccctgattatccacagatattcaagtgcgagcatgacaagcaactgtattctttactgccactcatcgctcacatcaatccggtcaaaatcttgaaaagttctactactactactgctgcagtacgtactgctccgtgatttgtgatatgggctgtgtttagttcacatcaattgaaagtttagttgaaattgaaacgatgtgatgaaaaagttagaaatttatgtgtataaaagttttgatgtgatggaaagttaaaagttcgaagaaatattttggaactaaacacggcgatgatcgcgtcgtcccgtgcgccacgacaacaaccagcaaaccaacgctggattgggcggtaattgaaattgctaaagcgtgtcagcatcgacataaaacgcctcaagctttgctgatttcacgcgacgagagcaagcagcatcgtctcttttactctcctttttcttttctttttttcactttttctaactggctgtgctcctacagatctacaggcaaagtatgtacgtgctcatggagaaagagacagctttggattgattactactacagcttttgaaagtgtccgttccaaaagtaataacagtattaattaatcaacacactgtgtggatgtactgtgctatcttcttgggtgtactaagcacaaaaaataattgggttaagatgaactgactctgttgagattttgctgaaatagttattttaaccaccccaaatcaaatgcatctcgttgcgtgttgcgtcgtgctcggatgtgcgagtacaaagagaaaatagccatttgttgtctttgtcagagcatgacatgggacccttctaatgacactttctctctgttggatgggccccatcgttaatacgttagcctaacatcatgcttgacacactagtgattagtgaaccatgcagctccagatcgatgctcttcaggacgcgtaatcgtctagtacaagttcttcaaaatcgcgattatccaattcccaattgttgtttttttctcttttcaatttgagcaatgcatacacagcatcattttataacatttgatccaaatcccacagagagttgggttttcgatgattataaactgtttttttgcataaacatctacctgcaaatttatgtagccaacctgaaaattttggtttgctaatttttgacacaattttgcgtgggaggaggttgaggtaaaggtgttgctactcgaaattatgataatttagtaagacattttttgtttgtttgtgagaacgaaatatttttcttgactgaaaaattagattatgaaaaaaatcttagttcacactactattagggcgcaaagaaaaaaaatgccatgaaccataatattatattttctataactaccatcacacttcaattaatcgttctcgtatttacgcgtgcgcttcaccaaaaaagaaaaagttaagatcaagtaaaattttttttattgttcatggatttgtttcccccttttctggataagggttaaaacaggcgctaccgtgcatgagtgtgtatgcgtttttttgtaaccacaaaaaaaataaaacacaataataatcctgaaattaggtaatggagtactccctctgtttcgaaatgtttgacaccgttgactttttagcacatgtttgaccgttcgtcttatttaaaatttttttgtgaaatatgtaaaattatatacctacataaaaatatatttaacaatgaatcaaatgataggaaaagaattaataattacttaaattttttaaataagacaaatagtcaaacatgtacttaaaaaaagtcaacggcgtaaaatatttcgaaagggaggagtattattatatttttcaaataataatcttggagagaagcaatgcattacctccttccgggcggccttgacgtctcgcgacgagtactccggcgtgcgcggcagcgtcggccacctctccggcgtcctcagcagccctgacctctctggcgtcggcatcatgaacccggtgccccactccggcgtcgccgcgaacctcgggctcacctccggcgtccgcgcgaagccaccggcgacgccccagtccggcgtggggatgaaccgcgggctccgctcgggcgtccgcagtatccccctctcgggcgtcgcggcgccgctcgcgccgccgttggcgttggccgcggcgcacagctgcatgatcttggcggccgcctcggcggagtcccggctctcgcccatgagcttctccacctgcgccttggggaggcgcatcctgaggcggacggggccgccgcccggctcggaggcggtggacatcggggacggcggcgcggtgccgaccgccgccgaggccgggagggagaggtcggaggtggaccggcgggtgagcatcagcgactcgagccgctcccgcgcgccgacgtgtagcgcccctgaccacgcccgccgcggcggcgccgtggggcggggcagcgcgacgaggaagtagagccgcccggggcggagcggcgcgtcgtgcgcgagcgggcgcgcgcggacgccgagcagcttgacctcctcggactcgagcagctggaaccccgggtggtcgcgcagcaccgtgccggcgaacgccgggggcttcacccggaacgccgtgccgtccagctgcatcaccttggcgcccttgcgccgcccgccgatgctgttgcccattgccgcgccgcgcctcgcctgatgctccttcctccggcggctgggctgagctgcgtcgcgcttggatttttgcctccgaattggcgaattctcttctctcgcgcgtggccttgggtgtggggcaaagtttggctcgctttgtagtttgcggcgattgcgggtgggcgtgagaatttaaaaggggagggaaaagaaaaaaaggaggggaggtgtgcgggagtcaaagggggggtggtgtgagtattgggcttgagatggaccgaagggagaattctttcttattctttgtataaggtgtggtttgattttcttcctttgcaagggggtttgtaaacaatactctattgcccaccacgcggttaaaaatcattttaactttataattttttaactgcaaccatgatgacacgtttttgactgtcaagttgttaggaggtcaatgggtgatacatgtggtcgtgtttaacatggctctgtgttttcttactttaattttactaaccaaaaaccctgccatattatgaataaccctattattttgtttacttattattgtaagtaaaagtctaagttttaatacttaactttagagctgattttttcatttttttttcattgtaatttattttataatatttatttttaaatcattaagaacacgtatataaaagttttactcgtaaattgcctttaaattgttaataagcgattcacataagcataatcaaaacaataagaccggaagtattttgtttttgggttctgtaccaaccattataacaaggcaacaaagcagtgaaaaaggagtaaattttggtaaaacattgatatttttatataaaaacataaattgagcaaatttgttgcacgactacaaatttaacatatctaaatcaaagcgagcaaatcacaacatatatgtttaattagtgtcacttttatcacaaaattcaggttttagaggctactacaatctaaggaaaatcagaataatccactagctcgatggttaactaaatttatttagggaaaaaggactattaaatcacacggggcatattacaatcgtttttgatcaaccacgaaatagagttggactcaaacctggtctagaagcctgagtaacagtcccttctagctttggttgctcattcatgtctaatcaaattttgttcgcgttggatcttcgtaatgaaaatcgtcctttaacctttcttaaagaagtcgactaaatcttttgttgttacaaccaaaattttctacaatcaccgcatcgttcaggcctgcttgtttgagcatttttttggttgtgactcataccatgcatgtaacatagttttgaggtcagattcttgtacttcgatcttctcttagcggtaaagtcaaagaacaaaaaagaactgaattaattctaaaattcaaaattggttatggccaacctaagagcacccgcaatggtaaagtaaggtgctatctataaaacatgtacatctcagcaatagactagattaatagtaaaccgcctcaatagtatg

SEQ ID NO: 26636 - DNA, 6363 bp, Oryza sativa
tggattagacagctatagatacccatgtagacataccattgaagtagtttactattaatctagtctattgctgagatgtacatgttttatagagagcaccttactttactattgcgggtgctctaaacatgcatttaatccacaatgtaaacacataaatgtatgtgtgaaagagaagcgggtagatgaaatatttagtttagcacaatattgtcatgatgtaatttttaaaattagcacaatttttttgatataaaatttaaaacatgtagttttgggataaaattaacagtagctccatagtttgcatatactaacttaacttaaataagtagttgtgtgatgatgttctcaaaatatgtttagttttatgaaatttagtgtgattacattatgttgaccatttctctaaaaaatgtgaccatttttcacagaagttaatatgatttttacatacttattaaccaagatttgcccattttaattaagaacctgtagccggttctcaatcttgatgttaattaatttattttttacgctttctattgtcagccactcagccttaatcttttgtattgttaatacgtagtagaactatatatataaagatcttgctttgaagattattctattgttattcaacttataaccatagacgtaaaatacgtttcatacaggctgtggagtggcgtaacaaacctcattcactcgaagaatttggtgtgaaaaggaccgttcaaggagtacctcgatattcacaagatcacagcatttactagctagagcaatagcaactagcaagccgtcacgagtaccctctcgtctcgtaggcgtaaaaccccgtctacctcgcgatttcgtgacagaatttacctctcgatcgtactctaagcttctttgaaaactcccaaaaatcaaaaccgcacatgtacgtgccatctgcaaaatttcgaatgacgttcaagcaaggcgcagcacacacgcccgacctgccacggcggcgccaggcgtgtactaatcttaatctcatatgtctgcacccgttttttccccctattcttttagcgcccgtcacggcacggatcgattgattggagaaacgtgcagcgccgagggcgaggggtgcgtggtcagtggcgtcccgttgatgcaggcatgcagggtgcacgcgaggccgtcaatctggccggccagcgcgtttcgaccgccgtcctcatctgcaggaactaagggtgtgttttccatgaaaaaagttaaaagtttgaagaagctgagagtttaaaaaagaaagttggaagtttatgtgtgtaggaaagcttttatgtgttatgatgtgatggaaagttggaaataagggagaaactaaacacggcctaaaagtaagacgtttttcatactaataaatgacgtgttttttataaaaattttctataacaaaattgcttaaaaaaacatattgatctattttttaaaattttggtctaatacttaattaatctcgctttaattgcttgcttcgttttctatgttaggagataagaggttgggaaatttttctcccaaatacagcttaggctatgttctttcacatatgttcccaactcccctcactcgttttccgcagatacgctttttaaactgctaaatggtacgcgttttgtaaaaagtttatataggaaagttgttttaaaaaaatcatattaatctatcttaaaagttttttttagctaatatctaattaatcatgtgataatatatcgctccgttttccttgtggagcccaacccctccaaaagaatacagtcatcgtgattgattattgtatcatgaggatttggctatcaaattttaaagcctcattacacatttcgtaccagggcggcagggcctctaattcttagctgcaaccctgatctactgtttgctcggccgcgcgttggcatgtctaacgcgttttcggtctgatgctgcctcggcacatgcccttcgccgttcccgtttaacatcagtgactagtggatcgcactgttcatagcaaaacattgtaccaaaggttatttatgttattgttgtagcaccagatctcgataacaaaaatagatagataagattatgtctaatgttttaagtgtagtcacagttgtaattgcacctcatctgaatccgtgatcagtatatgtaaccagattaatgtcttcaaaataaactagcatggtggtccgctcagattgcacgggtagcttcattatattttctctcatataatagcatatatgttttcttattatattattaaaatatattacaatgataatataattttaaattttacaataactttacgaaactactaatgtgtaatattcatattgtattttatatacgtgttagttattaattatttttaatatcaaattttagttatttgtaaattatatacattcttatatggactctagactcatcttttaatatttatttttttaatgctgaatttttattatttctaattgtatttctacgtggactctaaactcatctttcaatactctttaatttttaatttcaaattttagttacttctaaattgtattcctatattgactttaaactcttttttttcatgtttttcttaattttttattttagttatttgtaaattgtatttttatacggactctaaacactacttttcattttattatatttattccgaattttagttagttttaaattcctatatggactctatactctacttctaatattccttatttttaattccgaatttcaattattttctaattgtatttctatatggactctatactctacttttaatatttcttatttttaattccgaattttagttatttcctaattgtatttctatatggactctatactctacttctaatattccttattttttaattccgaatttcaactatttctaaattgtatttctatatggactctagtctcctcttctaatatttcttattttttaattctgaatttcaactatttctaaattgtatttctatatggactctagtctcctcttctaatattccttacttttttaattttgaattttaactatttctaaattgtatttctatggattctgccttttctttttctccgattaatgtgacaatttctagacaataagaacgaacgtggaggctcctttttctattcctttaataatataatagattaagaaatacctaattcggactgcaaatattaattttgcgcttacggtaaagagggtacggcttccagataaaagccttgtactgtagtagtacgtcgcaactgatttgatgctcgtgggtcgtggcagttttttcgacagctaatgacattatttgcttgaaccactctacgtacttatccgtatattctcaaaatacatatattctacttacgagtagcataatagtatatcgtacagccctagagtcggttagccacaggtagccaacacacacagtgttatgtgctaattttagcgaagaaactactactactacctgtaaattatatatctgggatccacactgggcagaccaaaccaaaaaatgtgacacaattcgtcagagactcatgacctaacaggtgcaaacgtggaccgaaactgtgttccttcttctgtcttcacctgcatgacaaagctggcacacccttctgaccttcctgcagcaactccaagggcaatggtaagctgacggctgctgatatgtgcaggagctcatgtgcgtgatccgttctctgctacggtcgttgggcatatcgtttcgctcacctgcagggaatctttaaccatataatgcacgcgatcgaacccgttttaatttagttctcgctggcttcgcgatgatgatggtgacgatgctatgatcgatcgaccccgtcgtcgttttcgccggtcgcgcatgccgtggcgtttcccccggatagcatcggtcgcccggccgctcgctccggttgtcgtcgtcgtcgtcgtcatctcctcatatacggactcgatctgcgtgcgtttgccgataaaaccacctgctcgtggtgtgtatgcgcaggagcggagctagagcgaaatggagggtggtgccacttgtttaatttaccctactttagatcgagtttaagctcatacgggtgtctaagtttatattaaggcggatgtatacatagtgaaaatagataagatatagctaaaaaaaatttgaccggatttttaggcacccctaatatataccagctccgcccctgtgtatgcgaacgcggatgtgttgatcccgtgtgccgtcgcgttgctctcgatcgatctcgtccacggtcaagctcgattgggggcagtggtgtcatggcatcacgtgtacgtacggtttttcagtcgcggcacggagctgaagccgtcgggagcgttgcgtgcgtcggccggtcagcagccggatatatatggtgcatggcggcgacggtggcgaccgcctaaccaatcagccgcgcctattagcttatacgaccgggctcgtatacatggtcaggttcgttccaaatatataactacgggttcgatcagctggctatcaaattttaccagataatcaactgacgataaaacaacaaacttgagtttgaacttacaacgttctggctgtttgaacttatcgccggttctttcgagccttatttatggctcggtcgttgttactggaggccgcgacatgcgcgcgaaggatctcgaagtcgcacgaggcgcgaatggtgccgatcatcgtagcgtggcgcgccgcagagcacgcaaaccgcgtgagtcatatgtacgtgtgcgctgccgtgtcccgcgcgcgcgacgatttcgccgcattccgcaccgtgcgcgccgccgatcgatccagcgcgcgagaggcgtcgacgttgcgtgtccctgcgccgcgcgatcgcgaggtacgaagcagtaacaaaaactacagtaacaaccaaaagctagcaaagcttgtgacaaggtttcggagtaaacgttccaaagacaccgaccggcaccgccggccggacgatgtaccggacagatggctggcgagcccgcgagcggttgttagagtcaaaacctacgacttgaacacatgaacagaaacaggatttggttaagtctgaaacccaatccaaaacctcgtcgttttcctttttctttctttctgtttttttttccagtttttcaaacgctgaacggcatttcgcgaaacacgattggcagtttggcaccactcctccgcgcggagagtcaaatataacaattaacaaaccggtcgctctgacagctacagagatacggtacagggacaacgcattgacaatttgggctggagcccaagatcataattccatcttattaatatgcgttcagttctataatgagaagagagaaaaaaaggttagtactggtcgcatcaccacgtactatgtacgggccggggactacggagagagtagcatcatcgtgatcatcatcaggtcgtcacctacggaatcaatggcatctccatctctcgggcacctttctgttgggttcgccgtcgtcgtaccggccgtccgtccacataactacccctgacgtgtgccgatatatgctcgatccgtcgatcgatcagcgtgccgtcgcgtgtcgcgtgaatgaacgatatacccacgtgatgtaagggcgtaaccgtcgatagattcgttcttgcgctcgacgccctctagctaaaaattaagccaggagtatacagtcgtttctcgctgagattaaaggcttgtcacacgtgtaaccaggttggcgcacacgtggcgtcatgactcatgactacacatggctcgggttatttggtcgtgtgtgacggtgacagtgttataggtgttgcacgaaggaagatgggagagaacgtgatagaaaaccacgtaacgtacgcatatatatacgtacgcacgggacaagacaagacctaccgctacttaaaaaaaaaagatttttgcaaacaaccaaaacaaattttcccaggcaaccgcccacccagtatatagtataaaggcctaaaaaatacatgatttttctagattggcctcctagctccatcttcacaagcgctacaaccacatgcttgcaaaaatattcttagtaaaaaaaaattcccccgccacccccaatcccccggttcaaacccctcgctaccataagccaattacaaatcacaaattcttcgtccattcagaaaatccaatcactaacatgcaaacatccatacatcatattcaaatacatagcaccgacttgcagtcaaacatcgatcaaacatggaaacaacaaacaaa

SEQ ID NO: 26637 - DNA, 521 bp, Oryza sativa
cattgtacttaagcatagactgagacaaattactagcagttctaggtttgcatgacttgagatgcctaagcaaatgaccagtgccaccagatgaatgagcagacaaagtttttttttgcggtgattgcatttagcagaaacgcgaacctgcgcgccattaggtgattcaaagagttcttcgaagtcatcccataccttggatgatcttggccgcttgttggtagcactggagtcagtgccggacggcgcgcctgtgccaccatcactgtcactgccactagtaccgtccacgtccggctccgtctccagctgcaacccatcgaagtgaggaggtgacgaagtgattccgaacacctgcacgcgtacctcctccaagtcatccttgtcatcaccccgcatccccatcaacctcaactcgtggttgcaagaggatggatcgtccatcgccggcactccggctcctcaacggcggctaccgctcagcgacctgcaagacacacagaatgagatgagagagcagt

SEQ ID NO: 26638 - DNA, 3929 bp, Oryza sativa
atgctttgattgcgaggatgttctatacatcaggtcagaatatagcatgttttttttcagttctaacattatcaattttgttttgtttatgacgtgcaactaattatatgtgtgcatttggtttgcaggtattcctttcaatgttgcaagaaatccatatttcaggaaggcttttcagtttgcttgcaacaaccaacttggtggttatacccctccaaatttcaacaaattaagaacaacacttcttgttcaagagaggacaaatgttgagcgcttgctgaatgctctcaagtcaacatggtctactaaaggtgtgagtattgtatctgatggatggtctgatgctcaaaggcgaccaatcttgaattttcttgcagtgacagaagatggaccaatgtttttaaaagcaatcaatactgaaggagaaatcaagaggaaggaatatattgctgagaaaatgtttgccatcattgaagaggttggcccaaataatgtcgtgcaagttattactgataatgcatctaattgtagggctgctggattgatggttgaacaaaagtacagccacattttctggacaccatgtgttgtccatactttgaacttagccttgaagagtatatgtgctgccaaaaactctagtggggatgcttttctagaattccaatggattagtgaagtggctacagatgcatctgccataaagaatttcattatgaatcactcaatgaggctctccatgttcaatgattttagtaagctgaaatttcttgccattgctgatactagatttgcatctactattgtgatgcttaagaggtttcgtgctatcaaagagaacttaatcttgatggtggctagtgaaaaatggaatacctatagggaggacaatcaagttcaagcacaacatgtcaaggagaagattttaaatgatttatggtgggataaagtgaaatatatcattgatttctgtgagcctatctactctatgattcgtgctgctgacactgacaaaccatgcctccatttgatctatgagatgtgggattccatgatagataaggtgaaaaaaatcatctatcgtcatgaagggaaagaactagatgagcaatgttcttttttctttcatgtgaatgagatcttacacttccggtgggcaaaaagtactacccccttgcattgcttagcacattcactaaacccaaagtaatgatgttctacctcttttcaatttttatgtgcataatttataattgttgctagcagctcaataatcttttttacaacatgtaggtactactatgagacttggttggaggaggctccaaaccaccaagcccctcatatggatgaggagatttcagatatgagaaataagtgttttagaagatatttctctggggatgaattgagaaagatcaaacaacaatttgcagatttctcattgtttggcagtgggtttaattcctttgactcaattgaggatagagcccatatgaatgcaaagcaatggtggggaatctatggtaactctgcacctgagcttaaaaagttggcactaaaattacttggacagccaacatcatcttcttgtgccgaaagaaactggagcacttatggtttcatccatagttcaatgagaaacaagtttagttccttctcttacttatttagtttcctgtatgttagtaatgcatgaaattaacacaattgcattttttttagtcttaggcctgcacgtgctgaggatttggtgtttgtgcaccaaaatatgcgtcttctttctaggagatctgaagaatactacagtggcccatcaataatgtgggatgttgcaggagatagatatgagttgtttgatggtggtgctgattttcttcaacaagctgaactgacacttgatgagcctgaccttgagagactactggaagatcttggtgcattggacatacaaggcgataacgggccttcatccacttcggttccaatggatgaaatcaacaatcaatttatctagtcttgcaatctagttattgagttgaatttgaagtcatggacaagttaattaattctaattagtttagcgctgtggtgatgctctactgttgatttatctactatgtgaacaattttatctaccatctatttgaagaacacatgtgttgtgattcctattttttaagtccatatttcacacttagtttttttgtatttttaaattgtatatatgtatatattcgcgtatccccgtatccatgtttttaggaagacggtgtatcccggtatcaccgtatcgcgtatccgtatccgtatcagcgtatcggggtaacgcagtagaagagtcggcggcttcttccagaatccacagacttctcgtctgcaagcagtcatagttcaaatttaaacttcaacaaacttaaattttaaagttcttttggttttttaatcatagttgattttttacgttaactttaataccagttaaatatagaaatataaaaaatttactgcaaacttttttcttcgtttatgggtgtgtttagttgaggaaaaggaaatttttgggtgtcacattaaacgtttgaccggatgtcggaaggggtttttagacacgaatgaaaaaactaatttcagaactcgtctggaaaccgcgagacgaatcttttgagactaattaagccgccattagcacatgtgggttactatagcacttatggctaatcataaactaattaggcttaaaagattcgtcccgcgatttcctccataactgtgcaattagtttttctttttatctatatttaatgctttatacatgtgtccaaagattcgatgtgatgttttttgggaaaaaattttggggaactaaacaggccctatttctcaacgataactctatctcaaacgattggggtatggtgacaaaatttgaagagaaagaaaaaaaataatttaaaaagacacttctaatattcgaaattgtttgtgacttggaatatggccaaaatttgtcagcgttgggagatttattatacaattgattaggtctataaaatgtcccatatctctctcaaaattcaaaatccatccatttgctccatcgttatattatttgacaaaattaaccatctccattcttttacctcccatcaactttcataactactctcaatcttaaaccagaaggacaagaattactctcatcatagtgattactacagttttattgtgccaacccttgtaaaccttcacaaattttttttttagagttgtcactcacacgttcatcaactatcaactagcaagcgcaggatagcccgccacaatcacctaaaaagactagagcccaaaaatactatatttcttcgtcccggaaaacttgtcgttttatggttgagtgaacaaattaactacaagtaaaaattaccatattacccttatttaatcattgcatttgtcacttcagataatcacttctagtagaccatctatcgcattgtacacacatagatagcactagtagtggcacggttgtatagggaaatagtatgccaaataaatcgatggaatagactaggctcagctcgttggtcaagatgctgtcaagatgctagaacgataaattttgtgggacattttttgaatagcggaatgacaggctttccgggacggaggaagtattccacttactaaataccaatatacctaaatctgagaaaaatataaacccatactagtcgaataaaaactacattttaaccctacattttatctgtttatcttactttttcatcacatcaaaactttcctacacacatgaactttcaacttttccgtcacatcgttccaatttcaaccaaacttctattttttgtgtgaactaaacacaccctagttcgaagatagaacacacaagctcatgggtgtgt

SEQ ID NO: 26639 - DNA, 19762 bp, Oryza sativa
caacccatatcatcagtacttgagtcggtctcactgcttataaaaaaacatgcaaatcttccccgacctctcattcaagagttgcctttatgcaataatgttggctgccataatcaattttagttttttttttgtctcctctcttaagagctatcactcatttcatataggttgctttattgtttctgattgcgttttataccacttctcttatactatactcagatatgaaatagggaagatggataaatttgataggtttcgtgatagcgatgtcagtaatttgacgagttttgtgataatgatatatatgtagaatgatgtgttttttttactaagacaattcattagtactccatccaatgtaagtcattctagcattttccacgttcataatgatgataatgaaactatatagatatatatgtctagatttattaacatcaatatgaatatggcaaatgctagaatgacttacattgtgaaccggaggaagtagttgattaattaaatgccaaattcatagtaagccatatgatagaagattgaaaatttgtgaaaaagggaagcaatttcgcctcgtttttggatgcccacaatcttaaccaagaacttcaactcgtgcgcccccaaaaaacccccacctttctcttatcccctctatccgccgctcgccggccatctccctcccccaccaccaccaccaccgccgcctcctctccggcgagatgctgacctgcggccgcttcctctcctcctccgccgccgcctccaccccctccctctcccccttccggaacctaaccctctccctcctccgccgtccccatttccgcctcctctcctcctccgccaccgcctccgccgccgccgccgccgtcgagcccgacaccaagggtaaatatcctgaaccttcaaactcgagggaacacctcgcggtttgacagcgagagccgttctgagctgtgggtgtatgggtggtcgcaggtggcgcgggtggcggcgccgcgaagccgcagtggaaggcggcgatagacttcaagtggatccgggagaacacggacgccgtcgccgccaacatccgcgaccgcaactccgccgccaacctcgacctcgtcctccagctctacgacgagtacctcgccttgcagaaggtacaggagcctgttaattaattgtcatttgctactgctgctgtttgtagtttctgagatgctgctcttgcgtgactgcctgcaatacaagttggatggataagatttaagcttgcgctgtaaaattataatgcaaagctcgtgattcgcaagacttttaaactgttggataagacttttatggagcttgtcattgactcattgctgctgctgctgtttgtagtttctgattctgctcttgcgtgactgcctgcaatagaagttggatgaattaagattaagcttgcactgtgaaattatattgctttagtttgtgatttccaagagttcaataactgttcgagatgattgatagaaaaatttgcaactttcgtgtgaacttagacatgaactggttcttaactggcctattcatatggttaattcattggcatgtgttatgttactttctgactattagtgagttgtgcctattgcaaccttgtaattttgggggtagcaaaatattaggaagaaccaaaaattgaaactagaaactactctttttggccagtagtcatggctattaattggttatttcgttgattatattggatcactgattgattctgctttactgatcttgtgaactcaaaattactcatggcttcatggacttatccttgcctggacgacacttttgtttatggcgtaaatatgatactgtgttactgcgatttaacctattttggcatcaatgtctcattgttctaccgaagacacgtgtgtatctgcttgtgtgtatgcttgcagtgattgaacatagttggttatttaattctggactgagatatggtggcaacaattcctaattatgacagatggcaggaagttgaacggctccgagctgaaagaaatgcagttgctaataagatgaaagggaaattagaaccatctgtgcgtcaagcccttgttgaagaaggtagaatgtttatgaatttattttctaaaaaaaatgaaacagcgataccaacatagtaatttttttttataaaaaaattggattgttgcaggcaagaacctgaaagaagggcttattgccctagaagaggaccttgttcagctgactgataagcttcaactagaagcacaaagcattcctaacaccacacatccagatgctcctgtagggggtgaggaaagttctgtcgtcagaaaagaggtagtgggatttctgtgtatctaactctgtcttttcagtttgtccaactgctaattttcttttacttgaataatgcaggttggtagtcagagaaacttcaatttcaccattagagatcaccttcagctgggaaaagaacttgatttgtttgattttgatgcagctgctgaggtataactgccacaaatcaatgttaaacataactttgcagtaagttgttcaatagcacagttatatttgaactggacagaagccattacctgaacactaactcaaagatgatctacaattgtagctcctatatgagcagttgtacttcttttcacttgttcattttaccaaggttgtatactgtcattttcaggttagtggctcgaagttctactacttaaagaatgaagctgttctgttggagatggcccttgttaattgggccatcactgaggtctcaaagaaaggtttcacaccactaataactccggagattgtaaggtcatctgttgttgagaaatgtggcttccagccaagggcccaaaatactcaggtatattgatccaagatacctttacatcctggttaatagatgaattcagcttttagagctggttgtgttaggaggatcttatgcccataatttcaagaaaaaggtgagtaactttctctaggatatgcttttgtgctgtatgatgtggcatgttaaagtcgtagttggctcctaatttatgaattctctcctaattacacaggatcagatcagctattttgtcatctttattttcattacatgatttggaaatttcatcgatctttcatcgtgtgaaagtaaacatttatttcactagttaaccttctattgtgtttctgtaggtttattcgatcgataacagtgatcagtgcctcataggaactgcagagattcctgttggcggcatccatatggactctatactccctgattctgatttgcctcgaaaatatgtagcctattcacattgttttcgcacagaagctggtgccgcaggtgctgccactaggtatgcatattttcttgttctgttaagattatgcattggaaattgctctccactgatttatgtaatttgatcacagtatgttgattacatattgtatagatgtgtgaagatttgttcattggttattcaaaactttgagatactccctcttttttttatttgatgttggttagttcatttttgaactaacgaacattatgtaaaagagaatggagggcgtagtttacaattcttgtatgaagttgctaagttttggtcactgcatcctgaacaggggcctctaccgtgtacatcagtttagcaaggttgagatgtttgtattttgccggccagaggagagcgacaagtgccatgaagaacttatcactattgaagaggaactttatgcatcacttggacttcatttcaagtattccctgatcttctgaatttgcatgtcattataatttagaggcaacaatatcatgctctttcttgcagaactttggatatggcgactggggatctgggagcaccggcctacagaaagtttgacattgaggcatggatgccaggcctagataggtacggtgaggtaagaaacattactcaagccctctgcttttgaacttatattcaatttgaagcaattgccctaacttttcctaatcgaaacgaacagatctcgagcgcgtcaaactgcacagactatcagagcaggcggctgggcatccggtttcgcccatcacctgcagatcctccaccggcgaacgccaagaaaggaaagggcagctcaggcccaacacagtttgtccacacgctcaacgcgacagcggttgctgttcctcgcttgatcatatgcatcctggagaactttcagcaagaagatggaacggttgtgatcccagagccactgaggcccttcatgggcggacttgaagtgctctccccgaaaaccaaatgatcagcttgaaggtcaccacgtttacttcgaatcttgttttttttatagatttacagtctttttttcccccgaggatattggcaagtgaatgtgcagaatttcaaagaaatctgtggtcgattccaaatgttccatgcgaaattcgtggctgttagttggccaccgattgtcgattgttgttttggcaacatatccaggttaactatttcctccttgtcaaaatatagcaaacttggaatggatatatagtccaatgattatggacaaggggctagccagattctttggactagtatgctttccatcagttttaatagtttgctatattttgggatggagggagtagttgaacaaactcagtattacacttgtagttaactggtaactccacatatgcccattgtattggatatcccttgcgaaatatttcctccgtcccaaagtatatggtttttaggtggatgagacatcttaatactatgaatctgaacagatttagtactaggatgtatttcattcacccaaaatatgttatactttgggatggtgggagtatttgtccacgggagaactataccggagtagtttgtgctagaacaatagtactagtgctttgtcagtttaatatctgttcgtttacggctgtgtttagttcagcacaaagtttggattttggttgaaattggagatgatgtgattgaaaagttgtgtgtgtatgataggttgatgtgatgaaaaaggactaaagatctagacacagtctacatgatgcgaggcatgcggctagagcagccagcattttgaaatcatcaaccatgctggcagttttgctagcgattgattgggccacgtggtgtgccaaaatttgagataattatgcaaattacggtggtaaaaaaaaaatcttttccaacgcgctcgccttctcggcccttcgaggctgtcgagagcccttctctcatccatcgtctttgttaaagtatggaattctcacccagggctgcggaactcacgactctattagaaagtagaataaccaacttttacacgaattttcaagtggatgagatcggtcgagtggtctcagttggagatgctgcgaggccatggaaacttaaaataacaaaataaaaaataaaaaaataacaattagtagtagttaagttccagatttcacactgcaaacttaaaagaatacaaatggatcgataggaatttcatggtaaacagagaaaaagaacaacaaaaacaaaatctaattttaaatgaataaaataagaagcacaaagagaaacttagaaaatattgaaaaaaaaacaaaattgtacgtttaaatactaagctatatattatcatcacttaatctaaagctgatcgtctccgcgtcagctgattggttaataattcacccgtcaaattcgtacacttatcccttactgtgctgtggagcaagctcagcaagctatcagagcattttactttgcaaaattataatggcatggttccaatttacccttttagttttgaagaccatagtggtaacggtgcataggtgagtacaaacactctctctcactgcttaaaaaataattttcgcatactagggtcatttatttttctagacgaatataacatttggtaccatttccctgcatgcaaaatcagggacgggggacgatatggtcgtccgcttgcgaagatccatcttcacaggcggacgacataaggtgacatcatgcatcttcccaggtggagccttaagacatccgcttgggaaaatgtaggattatctcaggcggacatcttaagagctccgcctatacagtatatttatcacgatcatgcgtcgagtcccccgctatatctttgatcggttccccatgtgtacgtttacatcgcttgcacacacattgtcacttatactactcccgtacaatttcagctacaatttgttgatttctttgtgttgcaatcctggatctctattgattttatatgaatagattagattttgttgacaggttaaagttattaatttatcggttactctgttgtgtgaatttcgatagatactcctcagttctaactgaacttcagcctagagcatcagactaaccaaaggcagacatcattaaggcctcgtttggcacagctctagctctcaactccagcttacctagagctggagctgtgccaaacggtatagaatctctattttttagagcggagttgggtgagctgctccacaaatttgtactacgggggtggagctgggtttttactgctccacagctccactccaccccaaaagatccactaccttttaattttttagcctaattacaccaaaatgccactcaacaacccctcataccctctctctcttcctgttctctctcctccccatcctcctcataacagccggcgttggcggcggccggcggctcgatggtgtcggaaggcatgcagtcagcggcggcggcgacgcacgggcggcggctgtaggcgcgtaggcaacggctgtgcgtgggcggcggcggcagcagcggccgggcgcgggaggcggggcggcgcgtgtgcggcggcggcatttcgtcgaacacttgggttgaccgccggctgtggggtcgggggcgagcgacggcggcgcgcggtctaagcgccggcggcagcggcggtagggcgataccaaccaagtgttcaacgaaatgccaaccaggaatatggtggcgtggagctcctataggagctagctctcactggagttggaggttggagccttactaaatggggcctgagttctgactctgatcttcagcttagatagtcagactagccaaatattttttttcatttttttactccagttagttcatttatgggatgaggaaatgttggcatgtttgtgtaagatctcactgaccccaaaatgtgcctggttttctgtttcttttttcttttttaaaaaaactatgcgcctaccaatcttccagttcccaacctgaaagaagcaggctagctctagaagaggaccctgttcaactgaccataggcttcaattcaactagaagcacaaaagtatttattcataataccacgtatcctttaatttatcaaagattacaagtaatagattaacacatatcttccacacggaaaacggagctgattaattaagtattatctataaaaaaacttaaaaaatgtattaatatgattttttaaagcaactttcgtgtataaactttttgcaaaacccgtaccatttagcaatttgaaaagcttgtacgaggaaaacgaaggagatgagcgaagtgatgggaaagaacacagccttgcgtaattcgtgtcgaattcgtgtcaagttttggcctactaccacttgtcgcttgctgttttcggcagtgcataatccaagttaaaactatccgattcgaacccccgccttggatgattccgattccgattgcgagtctggaacaacacgaacccgcctcaaactcggtcgatctttcttctcctcttcttcttttcgacgaaacaaatcctccaaaatcttcacgcgaggcgcaggttgagagatccacccatggccagcggcgacgaggagggctcgggctcgcgctcgcccagcaaggcggctccggctccagctccggcgaaaaagaagaagacgaagacgacgacgacgacctcggcgatggccccgctgccactagcggaggtgaagtggatcctcgcgcagaagcgagagccctacaccaacccggacgacatcgagggcttcaagatcagcagcaaccccaacaacgacaacgacgacgggttcccggaggaactcaaggcgagctgcagggactccatccgcagatcgaacatcctccgcaaggtcgcggacgaccgcttcttcgagtaccagagcgaggtcagggccgccatggagtccagcggccgcttcttggtcgacgccggcttcttcgagcgcagggcgaggggtcgcgccaagcttaacgaggcatgggcgaagttgcgcgatggcctcccgctctccgactctgacagcgatgcggatgaggaggatgacgaagacatggcattgctggctgcgatgggtttagaattcgattgagaagagaaatcgatttaattgttattattattattaccaacaaggaaggtagtccgcatattcgcgcgggcttgtacagtagattgcgttgcttaaataattgtttaatctatttgatagatttataccgtataatatttaattcatccctataagcagcagatatctatagtcttcttcatcatctaagataatgtagacttagtctatttagaaaacatatataataaattaaatgtaaattaaaaaaaggtgtttttggaaaaaaataaatgtttaggggctaactttttttttatcaaatctgtttattttctactaacacttgtgttttatttggcataaacctagcccattttacattgatgcaatttgtcacttacagataagacagagcatatttctgacttagaaattactccctctattccaatttgatcatcacttaagcaaaggatgctgagaccaaaaacaacaaaacctccatggttctaaaattattttcatcaatcaaggtgttgattgcattacgctgtaaatatttcgtggagttacaccaagataatttttttaggttacaccaatagaaattaattttggctagttgcatgcatgagcttattcaacgatgcccatttactctttacacaaaagtcatttgttatatgatgattatttaagggagatataaaaaccttggatgagatcaaactggcatggaggaacgatggtgggagtagtaaatatcaagttgtacatgtaggggttgtttggttgcatgccacaagttgccacgccaaaagttagtcattgccacagttttttagctattgtttggttcatgacacaactgtggctagccacatattttctctatatggccccacatgtcatacactagtattttttgctaactttggctaagttgtggctagcaccacacattttgtggcagccacaccttgcctaatatggggtttggcaaagttagcaagcaaccagatatcctagttatgacctgaacaattaatgtatctggagtcatcttagcatggagttataatttttagatttttttctaatgataaaataattcataaatttaaaattcaaaaagtatgtgctctacttggagttacaattttaatttttcatgattttatagtttgggaagtacaacatataaaaataaaattgtactcatctgtaactctcaattgtaatattttattaacttgagaacttattttaaaattaaccattagtaagttattatgatttggtgtcacttaaatatatgcaaacttcaaaattagtaataataagaaagtgtcacaatttattacttatatacaagtagtgcaaatttgttaggttactgaatgaccacgatgtcgatcgtttcataccattaacatggaaagaaacaatttggaagttcatgatgtcgtttcatatcagaaacatgaaaagaaacaaaacttggatgttggaacggaaattttctttgaaaaaaacagcaacaatagtttgcaaatttcagtttggatcaaatcttaattgataaaatagtgccggagtggtagaagttgggggacgcgagagtctggtcgacatcaacggactcatggttatggctgcccttgtagccgatcatctagggcaactgggcaggccgatcgccggtgaaagagattgacgtacctagtcaacgtttcatggtgcgtgcagaaccctactgcctggaggagtgcgttggtttgtgattaactcatgccccatcgcgcgtaagaattgtggagtgtgttaattttttttatagatttaaagtgattagcaggcaaggaggatcacaaatggattaacttttttttttctcacaaatctaatctaacagtgtaaaataacgggttcaccggtttaagtgaaatccaaggggctagatgttttgcttttttcttagaatttctaagaatttatctaatttattagagcgccacttggcgtcttaggagcgtttataggacgcttaatggacttttagtatataatagatagatagatagataatagatgccatcgagtatatattatgtttgtcagtgttctatctatctattatatttatatatggctatcctagaacatgaacatgatgggaagtgaaattaccaatgttttattaactctgctatatatgactgttgtttagttgatgcccatctgtgttatcagtccaacaaggaagctctgcaacatttttcttgcgcttcagttaatcttgtttcttgtttaggtgtatttcttcacaaaattgtttgtcctgtatagagttattgcctatgaattagactggagtatgtccaaccaatctttagagaaccttgttgtatgcatgctatagaattctggataaatctaagaccctctcctgcactaattcaaacacttttgctggtttgttctcgtgatctcgtcagtcacactagttcatggagtggactactgatgtttgatcatggtatgttggatggttggtagtagattattttcctcttgaatcagtcagtccttactaatttgatactacttcaatggcatataccgcatatgtgttggtagcatgtcaaagttattaatttatcggttactctgttgtgtgaatctcgatacatattcctcagttctgactgaccctgtttagatgggactaagacttttaactccctatcacatcggatgttggacactagttataaatattaaacgtagactattaataaaacccatccataatcttggactaattcgcgagacgaatctattgagcctaattaattcatgattagcttatgtgatgctacagtaaacattctctaattataattaattagccttaaaaattttgtctcgcaaattagctttcatttatgtaattagttttgtaagtagtctatatttaacactctaaattagtgtctaaatacagagactaaagttaagtctctggatccaaacactaccttaagcctagagtatcagactaaccgaaggcagaattattgagttctgacttcagttagttgatttatgggatgaggtatgttggtatgtttgtgtaagatctcattgacccccaaaatgtgcctggttttatgtttcttttttctttaaaaaaaactatgcgcccaccaatcttccagttaccaacctgaaagaagcaggctagctctagaagaggaccctgttcaactgactataggcttcaattcaactagaagcacaaaagtatttattcataataccacatatcctttattaacgattacaagtaatatgaatataagataagtaaaagacattaaacttggacccctatgcgggtctccgcgtggactggaaatgaaggatcaccccgcccccgcgaaaatcgacggggacatatctccttccatttattttcttatggagaaccaattcaaaccattcccgtctcgtaacaggtgaattcaccgcgcggaaacagaaaacgggccccttgcccatctctactcttatgaagttgctaagtttttttgtcactacacgctgaatagatgtttttgtgcttttccagcctgaggagagcgactagtgccatgaagaactagttcatcactgttcaagtggaactttatgcatcagttggatttcatttcaatatttcctgatcttctggattgacatgcaagtcatgccacaactcaaaataataaacaagattaacgcaagcatacaagatgattatatatcagtaatcttattatattcaagactaatgatgcgctcgatgcactcaataggaaaacaagattgatggaaagcaaacaagatcattaacttttggaccaatcaaaattaatactaacaaatgatgagatcttaagacatattactagtgcatgtaaaagaaacaatcatcaatcttatactacctccttacctaatataaggatgttcactattttattataacgtttgaccactcgtcttattcaaaaaatttgtgcaaatataaaaaataaaaagttgtggttaaagtactttggataataataaagtaagtcacaaatataataaataataattataaaatagttttaataagataaatggctaaacagtgctagtaaaatgtcaaaatttcttatattaagggacggagggagtagtatatgtctcaatttggtatttgatttcatcagagacccatgaacgaatccaggtaatacgggaacaaattatcccaatccatttcttggtggtcgccgtcgtagtcgtagtcgtcgtcttcctcgtactccacgctcgcaccaacatcaacaagaaatccacggtgattctcccatgcccagaacctcctctcctcgacgaagtcctcgtcggccatgacgcggccgcatgaatccatggccctcccagcggtcgcgccttctcgtcggcttcgtcgtcgtcctcctcccggtgtcctccactcctcccaggcgaggatccgcgccacctccgccagcgacagcaccaccttcttcttcgccgtcgactacgtcttcttcgtcatcaccgccgacgtcggatcctccgtctcgccgccggcttccttgtggcaggtgactgacaccgccggcgatcgcctccgacgagccctcctcggtggaaccggcgaggacgcgagactacgaagatatataggcaggttagtttgtttttttgacatttctcagttttttttggtaaggtgggtatgggtgcaagtttgactgatttgttaccctgtgttaagctttttgtgaaaaggaagtttataaaatgccaaattaagttgaaaattccgtttggataatcgttctgttaaattttggttgaagataatatctaagagttttggttagagggctcctgaagttctttttgctcctgctattttggatgatgagtttatcttttgtttctttcttgttggctgtgtgcactctttaggtgcagaagctggaggtgttctcagaataattgtatcacctgatagtgctgagattaataaagcttccattatataagaaaacttctaactctctccatcctaaattgatcattatatataatttgcagttttgcagtgcacgcctctcctctcctctcatccccaccccgtcgagccgccgttgtactgagcgctacctcttcgccaacgccaccgcacatcggctcgccagccgccacaacaatgcggtgctcgatcatgatgaaggcagcggttaatttgctctgggccgttagccggagctcgcagtggcgccagggtttaatcattcggtttggacgtttctgtcggagggtgctgatataccgaaatttccgtaattttaaataaattttagtcaaatttaaataaaatattgtcaaatttacaacaaagataaaatttcggtcaaaaaataatactatcatataggtaggggggagtggttgtccgatatggccgtcatttccgaacgttctcaggtacgttctgggtctcatcggtgatatataaccgccgtgctgttcatctgcctccgcgtattccagaacgtttgctgctaccacactccggggcaaccggttcgcaattagttatgtttgctcacattagctgttcgaggaaatgcctcagtgatgcttagtaggcagtgcttatttttttgtcagtgttcgcacgtcagtacgtatattcacaatttatattaaaatcacggtttcagctctgtatcctgtgcgggcaagcagctacgagggccctatttggttccataggctaattattagccaccaccttttaaccctgaattatctctcaaggatccaaacaggtgggctaatttgaggctaaagtgaattagcctccctcaaaacattagcctctctaaggggtgctaatggggctaattttgtgtggggaccatcaaaaagtagctctctctccctctctctctcctctctttctactctctctctctccacattttagccttgaattagcctatggatccaaacataccaccctaggctaatgtttagcctaccaattcatgactaaacattagctctcaaaattagtcctgggctaatcttccaaacagggccaaggttttgtacgcacatcaacgcatggcgaatgcggttcctgttatcttgcattctgattcttgcctttaagctcataatgcactttaggctgcgttcgttaggagtagttcccaactcctcctcgtttttcacgcgcacgcttttcaaactgctaaacggtgcgtttttttataaaaagtttatatacgaaagttgctttaaaaatcatattaatctatctttgaaaaaaaattagctaaagcttaattaatcatgctattaattaccttccatctcctactacgtggggctaattttcataaagaagcttgcaaaaaggattttttttcttttgttggcaagagtgctaataatgaacatgagaagcattccagcgtggctaaaacaatagactagagggaagttcacttaaaaaacgtagaaatctctatttctgttatttagtgtctgttactctgtgtctttgtgttattgtgaaggattttgtagctgaaatgctttctgtacgtagcaacagagcaaggagatgctatataaatcggttgacagtaactgaagtaacaattgcatcattgcttattccgcaccagaggccccttcacaatttctacgcatttgactcttcacatatactcccttcgtccctaaaaaaccaacccagtactggatgtgacacatcctaatattatgaatctggacatacatctttctaaattcattggagtagaatgtgtcacatccaattctaaatttgttttttatgggacggagagagtatttacttctttctgcacttgcttgtagcgacccttgtattccacttccgaggtagaataccggtctatggctcattccttagtaagaactaacttaccaagaaatgtgcacaccagagtaacataactgaaacaattgtagcgaaacccattaaataaaaaccatagaaagtagcttttatcaacaaaataactaaatttacctcaacaacaatttccagtaatgatctttatcttgacttgatactgaccatgctttacttcgtatacaactcccaaatttttctccttgctgttcatcttccaagagaactttttcgacgcctaaagagttagctcaaacatctacaaaggataatatatatgggatgagtacgaatggtactcaacaagtccaactatagcaatccaataaatatatgcccataatgcacctgcataatacatatatctccaaatcccataatccaacaaggaaatttttatgcatgttcataaacacagtgtagtaaaagctcatattaagtaattataaaatctactgcatataaggcaccacagggattagaacctccgataggttcctttcctgccgcgttcgcagtttctacccgaaacagggagtgacatatcacaattcatacactctatagaggtgtgttgctgtacccatagacgccttaaaacttttaacgcccgcgctacaccgccaccacaccagggcctaagtgtagacccccgattttggaaatcggaaatcttctgtgtttatccgtaccaatccctggatcagtagttggtacacacatacatagttggatcacaacatatcacgaatgaatttagactaaaagagttaaatacttacattagggccaggtaggccaacaactatcagagaacaacagcggaagacaaaataatataagggcccggttaacatgccacaggcagtcgactggggaacgagacctagaacaagaccgcactccgatcatcttgtgggatacgcaagcgtaccgacaagagcttctcttcaacactctcctaaaagatatataaatagcaagggtgagtaccaaccgtactcagcaagccaccacaataacaatgcatatgatagagggtatttcaaggaatggcttcaggtccttttgcataaagctaattttacaattcttttcacaagcctaaaacctagcatagactgatcaaattttagtaccagtgttcactttaaacaacgacggttctgtctaccatccattgtgataccaaggatagcttcccgccattgaatcgtcatggttttctgaggatgtccaccttccctcctctcgggatgtggctccatcagcataaaattcatcatccaatatcccattccctacaagttaagaatttagagtctagccaagtgtaatacatgtcccggtgctcaataaccgcgagcacggctattcgaatagatttggtttactcacactgcagtggatgtacactttacccgcactccgcgactgcccaacacatgagcctcgtcccaacacatgagacgcgtcacggcaaagcttttcgataacctcgcattggcagtacccgctccatgaacttaaatcctcatgcactctaggcgtccatgtttctagcagtgagaggagttctagcgctcccgggaaagagaagtctcacacgcatattaaattatggttcaagttaagttctctctctcacacactcatggcagtcctaccaatggcgacaccgatgtagggcacgcctctcggccctacctcaacggctgtcccattgtagcgcacctgcctcactcaggggtgaaccatctatacagggatactgcctccgctcggctatctaatccgctaggtctatactcattcgagaaatacggttgtacgggggtcgtttcatgcttaacttcatggctcggtccttaattgaccggggacggtactagccttttccagataccacccaaatcatccgtccgccccagtcgaaaacagttgtttaattttatttctcctttcacaaatcatgtcatcaacatcatggcaatgtggcgctcatgtctccacatgccgcatctcaattaccttcccaaaggtaattgcccaagcatatagcatttgataaatatgagtatgcatgattctagaatagcatttctaagcaattgtcataattgactagggactcatacgtaatcatggttacaaggattttaagggtaaacaataatcaaggcatggcataatcacaagtaggatgttcatcattgcatgcaattttatttgtaaataaaacaatttcgcaattaggatcaacatgttcaaggaatagtgatgacttgccttgctcaggatagtccttattcttgatataattcttgatcaaccttcacctcctggaagttgctgacgttgccttacgactaaccgatacataaattctataatacgcaagaaaaaccaatattcaaataacaaccaaatatgcacaacaaaatatactattcatgtctgctaatggattccaatcatgctaggggctaaggtttcttaacctttctattgtcaacgtggcctatttaggagttaaccaacatagcatttatgggatacatatatatttggctaatcggtggtttagtctatcaaatggcttatggaaggattatggctaagcatgcatctatctaaataggacggttatatactagaggttctgttgttagatggatttaggatcaatcaaataattacagtgaatcatttgtattatttattttattgatggaagctttactttagttatgaacatattttacttgccattataaattataaaagggctaataattatccatgctctatatgttaaattcggaaagtttataatattatagttacagattatctcttaatgaacaatctggagttacaattgaactatgaacatatgaggtcaagatttataattagtacttatcaactattcatgtttgttatatactccccagtttgatatatgaaaaagataaattaattgtgtaactataatgggatgtacaatatatgtgtgcaacaacgtataaggttttggtcgtctactgtacatgagcttatttagaaagtgtactacccaatgttccaagtgattcctgaatatattgtagtttaattatacattagctagtttctatgagtgatattgtatatgtgatgcgacaagtttaagcactggttctattgggttactaataagtggtaatcaatttaggcatatatatgctattctatatggtattgcatcgattaatttacttagtgattccttcacatctagctctattattattctcctaaacaggttaaagattcatctatgtgtgtttatattgtagttacataatcataaggctacacttgatttaaatatcctataagccatggccatcgaatattaaataagtactagtattttcctatacatccattcatttgatacatcacataaaattagtttgtgtggttgttacagtggcaagacatgctagagacaaatattattacatctactctactgtacaatactaattttatttattaacatatttttaagttgactattatgcatcatcttgatattaattatttaatatttataaatatattttatcaaatagtgaattatatatcattggaaagcttatgattttagatgaatttaggttcaagtttcactcaaatcggagctaaaatgaataagttatgctagtgtaaagattcaaatttgaataaatccgagaaattgtaaaaaggcactgttcctaattcatttatttatactacaaccttatccacaagctatagtgattgacaggtggggcccactctaccctctcttctccttcctctctctcttttcttttcctttctctctctcttctttttctcttttctcttttcttttcttccttttccttctctctctcttctttttctcttttctcttttcttttcttccttttccttctctctctccctcccggcttctcccttcctctctctctcggctcaggctacccggggcggcgacggcggcggaacgagggaaggggcggcggcttaccgatggcggcggcggcgacggcggcgcaaggcgaggcgacgctcggcacggcacacggcgcggtgcggcggcaccgagggcggcgacgcggcggcgcgtggagagggggaagagggagaggagggggaagatggagtgaggagaggggaaaaggaggggaggtggtgagggtggtgtggaaagcaatggacggccggggagggggggg

SEQ ID NO: 26640 - DNA, 18070 bp, Oryza sativa
gggagcgacggcgacagcgcgcgcggaggggaggggctcgagacgagcggtgacacaacgacgttgcgcggcgacgcgatgcaacggcgacaagacgcgacgcgcggggctcgagagcgacgcgacggcgtggcgacacgacggcgcggcggcgcggggctacgcgcggcgggcgagcggcgcatggtgacggcgcgcggcgcgatagcggcgatgggacgggcgcgcggcggcttggggcgcgaggccgacggtgacaggcgagcggcgcagcagcgacggggcggcgggcgcgacgacaagtgatgggaaagagggaagagaagggagggggtgacgcgacggcggcgcggggctcggggcggcgcggggctcggcgcgcggtgagggcgacgggcgacgcggcgacgggacggcgtggcgcggcacggggctcggcgcgcggcgatggcgacagggcggcgcggggctcgagacgacggcaacacgacggacgcggcgcgcggcgtggggtgcgtggcagcggcggcgcgcggcgcgaggcagagacggcgacggcgcgcggcgcggcagcggcaacgcgacgcgacggcaggcggcagagagagggagaaagaggagggctgggttaggggaccatgtcgagcacctagagtgcaatgaacagtgccattttctatttaacccgattttagtttatcccttgtataatctcattctataaatcctaatttttacataaatgaggtttacccaatatatgttttaatttagatgaaagtttaccaaattttaatattacccatattttattcttatatatatttttctattgtattatttaaatgaggtctaattctaaaattagcccagataattttggaggctttgagggttctaaaatatcctagtgtggcccttattattacaatagcacattgaacttatagcaatatattttaacctgttgaatctatttattctataaatagtatattaagactcggtacaacattaatctaattttaaacactcacatattcttgtttatatataaggattaatttatttatatgaccattattttatatgagtgattttcctgtcatgagtaactcggcgacatgttgcaagtatcaatctatatattctggtggattacttatttataaacacgatcactatagtggtgatcatcatttcatgtgttcttatatttcatgtgagattcgattcaaatgaattagatttaatcttactatttctttagctaattgtgacatcaagctatcaatcatggttcgaatatttaatacctgatttgtaatttgtaatagaaattaatatttgacttaactatcttgtgcataattatttgtaggattaacaatattatattctcgtaaatttatctattacttaaattttagatccttactttactttctttgtaatcatttacggtttggcgagcaatagcaatcataacaaccagcatgatgcaaatgttttaaaaaaaattcaaaattttagtgatttttattgtcttgaattttcaggatgttacactaagcacacttcatggtgtatgccggcaaggctaaggtcacaagcttttcatcaatcccatctggcaattacctttgcgggtgattcccgcaacaacggcgaatcatcggatcccgcaacaacggcgatccacatcatctaatcggattccgcaacaacagcaaccctcatcgctagcccacgctcacaggattcgcggaagtccttaagcccgtaggataaagccattaagaaagaactactaagccagcctgtcccattccaggtcatatggtcgacacgatcgctacggcgcttgaatgccatataacagttgttgtttaaccttatgatgataaatatatgcaactgaatccccaccacatggcaagttcagaatacatctatagtatgatcgactgctccaccagtcaatccaatccatcagcatatttattttcattatagaaagtataatttaatgcaaagtgatacatatagattgcaattacaaaaatataacaagagatggtcaaagatgctggacttgcctgagatacccgaaatcgaagaacaaataaatcaatgaagaactccaagaattccaagataaatacccaactgtaaaaatatggcgaattagaactaaaaccaagaatgtagatattagtatgctgcacatgatatgcctaaccttaatattatagttgatctacaatgactataggttatcgacactcacctcaagactcgactagatgacccctatgtatgtatttttaagtagaatatggttaaatatatttgtatattttgatttggtaaagatctatgatttatataacagaatttagttttggactaaaatatctgctgttaaaacaaacatcactacacttttatttttaagagagtataattattttaattgaaagaagtttttactttacttgagagagatttatattcaataatcttaaaattcaataataccataaacagcccacatgaccaagcccaaaagaaaagcccacctagaccccgttcttcctcttctctccatttctcgttcttctcctctgccgcacgctctctcccagcgccgtcgctcacaccgccgctccccctcacgccagccgctgctccctgcctccggcagccgccccgcagctgctgcctgcctgaatcggttccgtggctcctcatgagtctatccccaaattaaccctagccatcaacccctctccaatcgatgctgctgctggctactgctctcaacgactgagattggaatttccccagccccagcgcccctgattcgagcatggctcagaccagccgtgtctccccaagctcctcttctctaatcccttctctcttttcttctgtgatgtgatctaattggtgttctcttgtgtggtaacctactgtgaatttttatgcttgtgaactagtcctaatgaccaacgtgatgatgctatactcaggattatcctgctgtctgtagggttccagattgattgatttgctatagatggatgatgactatatgctatggatgaatgaatgaatgcttacataatatatcctatgaaaatgcagtactgaaattaaaagcacactaacatgattttgtccttataaatgtgcttgcatatagaataaccgaatttctgaaattagtggcatattagcaggattaaatccctaaattaggtttattgaatgatgcagcaacttacatgttctataatttgataattatggcaagatctgtactatatatagttgaattataacctatgaaatctaacattgaatataaagagatggtgactgatttcttaaataatttactgctattgactatatgtcctgactcttgcctctgtataatttacttgattcgacttattcctgcagggagaaattagacttattgatgacctaactatactatggtttttattcagatattatacgctattgtttcctgagaattttataaactatgatagcatacacttaaactcaagatatatttgtgcacactaaaagatgtcattcttttctctaaatatgttctactcttccaactgacctacaattgatacctattattctgctaatggatcctatatcctctatttagtttctaaactaagaatagatcattgcctacccatttatgctctgtctatttaacttgaaatactagcacaatattgatcttaccttaagctcttgaggttaaatagaacagtgattatttctaactatgcatgtagtcaaaattcatcctatgatagctttactgaacattgatttatagaactatatacagatataatccttagctcaattgcacttgtagatcattagaaataaatcttgctgttaaatatgtactgagatggctggtctgtacttgaattttccttctaagactccactgaatttaggatgatattatcctgtccaactactcataaaaactttgcctagcttattgaactaaggatgcacattcagtaatataccccaacacctagtactagtatatccacagatcaacatggctgccatctactgagttcatttttcaggtttaatggatataactaagggcatgcacacaactcctaaacatactattgaagatgttcctgtagtgcgagattatcctgatgtttttcccgcagaattgccacggatgccacctgagcgtgatgtagagttccgtattgatcttgttcttggtacacaacctatctccagagccccgtaccagttagctcgtcctttccaagaagagttgaagaaacaattagatgatctattatccaagaagttaatccgacggagtgtgtcgccatggggcgcacctgttatttttactgagaagaaggatggaagttggcgtatgtgtgtggactatcgggccttaaatgctgcgacaatcaagaacaagtacccattgcctcgtattgaggatttgtttgatcagttaaagggagcgaaggtgttttctaaaattgacttgcaatctggttataaccaaattcgagtgcgagaagaggatattgagaagaccgcattttccacgaggtatgggcattatgagtatagagtaatgtcttttgggctgaccaatgctccggcctattttatagaggcgatgaatagcatgttgcatagctttctagataattttgtggtggtgtttattgatgatattctgatttactccaaagatgtagaggagcatgagcgtcatctgaggatggtactagggaccctacgagaaaacaagttctaatgtaaactgaagaagtgtgagttctggcttcctgaagtggctttcctagggcatgtaattaatcagcaaggtatctcggttgatccaagcaaagtttcaagtgttgtcggatgggaaaggccgactaatgttaaggatgtgaggagttttttgggtatggcggggtactaccgacgctttgtgaaggatttctcgattatcgctaaacctatgacgatgctcacacataaggatgtgaagtttcagtggacggaccaatgcgagcgtagtttccaacaattgaagcagaggctggtaactgctccggtgcttactttgccccaacctggcaaatgtttcactgtctattccgatgcttcatgagtaggccttggttgtgttcttatgcaagacggcaatgttatagcttatgcgtctaggcagttaaagaagcatgagcagaattaccccactcatgatcttgagcttgcaacagtggtctttgctctcaaaatatgaaggcactacctgtatggagaatcttgtgatattttcactgatcataagagtctgaagtacatcttcactcagaaggatttgaactttaggcagaggaggtggctagaattaataaaagattatgatctcaacattcagtataccctgggtaaggcgaatgtcgttgcagatgctctaagccgtaaggttgttcctctaaatgtgagttgtttgataactgattttgaacggatggatatctcctattgttatgttggagtggcgagtaccgagtcacgagtcattcttgagtccgccataccccaacgagtgctagaggcccaacaacacgatcggttgctgcaacaagttaagaaacgtgtaaaggaaggaaaaactggagatttcactttggattcctcgggagctgtgcgattccatgggcgtttatgtgttccacagaaagctgaagtcaaggaagagattttgcgagaagcacactgaacaccatatactgtgcatcctggggagaacaagatgtatcatgatctgaagaagatctattggtggaagaggatgaaagtggatgtggccaagtacgtggcatcatgtggggtatgtcagcgagtaaaggctgaacataagagttctgctggaaagttacaatcattggaagttcctgtatggccttgggatgatattgctatggatttcgtggttgggctacctcgaactccacgagggaaggacgccatctaggtggttgtagatcgtctgagtaaggtggcacatttcattcctatccgcaccacttattctgcgagtgacttggcaccgatctatacacgcgaggtagtgaggttacatggtgtgcctcgctcgattgtttctgatagggatgctaagttttcttctaagttttgggaatctgtgcaagaggcatttgatactcaattgaaattcagtacggcttttcaccctcagactgatggtcaatctgagcggatgtcacgccctgaagtacccctccctcgctctaaattcataaaataaatcgtccgaagaaattgtttaatttaacctagagagaaaccctaatttaataaatgcaaataataatcggaatcggcatgtggaatttttcttgggttctacatgtcaaaatacgctaacaggatttttagtggaattttcagagccttggaaataattttaatcaattaaaataagcaaagtgcaatattaaatccctgggaaaatcctttttcctttttatcttttcttttccctcctttttcctttttcttgggccgtcggcccagtccattcacctcccgcgccggccttccctcggctgggccggcccaagccggttcctccctccctcctctccccgggtcaccgacaggtggggcccacctgtcggccccttcttcctcctccagccgacggcaccgccgccgccaaaaccgccaccgacgccgccgcttgctccgcatccgcgccccactccgcgccccgcgcccacgtcgccacccaccatccccactcctcccactcgcgcgtgcaccccgcaacggagggatttgaattcgaatctctctctctctctctctccatcccccacgtcggcgagaaatccggccgcctcccggcctcgtccgcccctcccgagcccatataaaccatccccgcgttctcctcctcctttttcctttttccatcggccgctcccgagctctccaccgcgcccgcaccgtgcgcctacctgccgccgccatctccaccgctccggccgcctctagcagccgctagagccgtcgccgcactgcgccgtcgacgccgccgggttcgcaagcttgtgcgccaccccgtccgccgtttccccggtcaatctcgccgccggagcttgcttctcctcgcgctccggtgagcttccacccattgccgccgccttcgatcggttatgtcgtgcgccatggaccacctccctctctctaacccctcccaaccttctctctaggtcctcccggagcccgtcgccgtcgtcctcccgtctctcatcgttgctgttcgccgtcgctcctccctcgcgccggccgagcccctcggtgagaatcggtctccctctcttcctctctctccctttgccgcgccgcccgccgcgtagcgccaccgctagggtcgctcgcgccgccgcttcggccgccgccgccgtctttgcgccgtccgccgccgcctcccgtcgccggttgccgtcgctggcaaccgtgcgcgcgcgccgccgccctcgccttaaccggccggccggcttgaagccgagccgagccaccagccgcgcccctcccgccttgtgccgctgccagtggggcccgcttgccagccgcccctctctctccttgagtcactgacccgcgggtcccgcgtatcggcgccacccctccttgtgctgacgtcagccctgggatgaattattgcgcaataaattgattaagggtttttcttttatagtaataaacacatataatcttctaaaaatcataactaattcatccgagctccgattaagtccattcaagtctcagtaaattcataaaaatgtgtagaatccattaaaaatggttttgcttcctgtttcagtagtcttatagcatgttttgcttgtgtgatttgtttgtcgcgtagatttcggccgtttcgtcgattcgtggtttctcgaagacgttgctgtggttccatcagtgcgagagcaaggcaagtcatgcaatacaattgatcatattgtacccaatttacaaatatcccgaatttctattaaatattgcattgttttacaatatcatgtgggatgggtcctattactcggccatattttgcttaccttatgccattgataacttgggtattaaaatgactagatgttggtttaggagatgcttagccatgcttagttcaactagtgcacaaaaggggaccacattaaagcatagacttgattattggcaatagctttggattagtgccaccgcaatggtgttggctagttaaaatacactacatggtgggctgtgggtgcatggttttgctagacgtgcccatggcgattaaggaccggttcgcgggatgccctggaagaatttatcgtacttaccacaagccagcgtgggcaacggctgggcttgtagtgtagcttttctctagccgacgtacccaggcgagggtgggcgtgatggagttgggtcggccggggtgtccggttgatcggctgccggattcaccgcggcacgaaaggggggctgcccgttgcctgctggggacgggggcgaaccctaaggtgtggtgcgatcggttagagggggttatacgaagggtcctgtcacggcctctttccggtatgtcgtggtggcatgtcggcgcacgggaacgtgtcgtggggctgtgtcttgtgggtacagttgtacacctctgatcagagtaaaactattcgaatagccgtgcccgcggttatgggcggtcgaccagattcaccgtgattagtttcaccctagtgtaatcttttggaactggttagttcaggtggtggtttgggcctgttgcaacgtggtgtaacgttggacagtgattggttaatatggattaattactacaactgttttactgctttcaactgctgctttgaaatgccggctttatgcaaaagaacctttagcctcccttggatatatcttgcatcatacctcctcttccggtatgacttgctgagtacagtgggtagtactcagtcttgctctcttttcccccacaccagagttgaagtccttcccagttgaagatgactcgaagaggttggtttcgtcgctgccgtcaaggattgcctgtggaatggagtcgcccgctgcaggagtcaagtcttcaggcttagctcgcttttatctttttccgctgcatttgtaatcttttatatttttgtaagacgtggatctgtatgtcaacaattgtcgtttgtgtaccctggctggtcctggacaggggtttaatgcacattcagcttagaaattctggttcgtgaatttctgggcgtgacagcggaccattcaaactctagaggatatgttgagatcatgtataatttcatggaaaggcagttgggaggatcatttgccgctcgtagaatttgcttacaacaatagttaccatgctagcattcgaatggcaccatatgaggcactgtatgggagaaaatgtcgatccccattgtgttgggattccataggggagagagctattttaggacccgattgggttcaacagaccacagaacggatagcagagatacggtgtagacccccgtttttataacaggaatcgttcgtgtaagcagtaccatttccctggatcaagtagtctggtacacatgagttcatagctgatataccaaatgcacatacatgagagtctagtgcgaattattacatcataagcccgcaggcatagtcttagaacatcagaccgagcggtccggaatacattccaaaagcagagtagataaggcagcggcacgccattgccacaggcaacgaccgtaactaagacctactgagcgctgtcctcttcatcaccctcttggtagtacgcgtagggatccttcgaaacttcatctccggcctcttattaagtttgtatattgcaagggtgagtaccaaccgtactcagcaagccatcacagcaacaatgcacatgataggggtattcaaaggatggctatggtttctttgcgcaaagccagttttgtaattcttttcacaagcctaagacctagcatagatcgatcatattttagtgccagggttcacatttaagcaacgacggttctgtccaccatccattgtgatcccaaggatagcttcccgccattgagtcgtcatgattttctgaggacatccccttcccgcctctcaggaagtggctccaacagcataaaaatcattatgcaatatcccatcccacacaagttaagaatttaaagtctagccaagtgtaatacatgtcccggtgctcaataaccgcgagcacggctattcgaatagatttggttcactcacactgcagtggatgtacactttacccgcactctgcgactgcccaacatatgagcctcgtcccaacacatgagacgtgtcacggcaaagcttttcgataacctcgcattggcagtacccgctccatgaacttttcatcctcatgcactctaggcgtacacagtttctagcagtgagaggagttctggcgcacccgggaagggaagactcacatatgcgttaagttataattatgtttaaattatcacatggcagtcctaccgatggcgacaccactgtagacacccgcctcgcggttctaccaatggctaccccaccgtagagcccctgcctcacacatcaagaaaccactatgcatggatactgcctccgctcagctatttactccgctaggtctatccccatactagaagtgcggttgtacgggggtcgtttcatgcttaacttcatggctcggtccttaattgaccggggacggtactagcctttcccagataccacccaaatcctccgtccgccccagtctaaaataagtgtttaatttcattcctactttcacaaatcatgtcatcattatcatggcaatgtggcgctcatgtctccacatgccgcatctcaattaccttcccaaaggtaattgcccaagcatatagcatttgataaagtatgagcatgcatgaatctaaagtagcatttctaagcatgtgtcatagttgactaaggacttatacgtaattatggttacaaggatttaaaggtaagcaataatcaaggcatggcataatttacaagtaggatgttcatcattgtatgcaatcttatttgtaaacaaaataaattttgcaattgggatcaatatgttcaaagaatagtgatgacttgccttgctcgtagtcctgcgggtcttgaccctcgctcggatccgcaactccctcgggctctacaagtacgtgcgaagaattgatttgaattccattagaattcaaataaaatccaataaagaccaaatcgaaaagtgagcgcgagaggcgaattctatatcaactacattattcgcgaaataagactatcccttatccttagatattttgtttttcctaagtaaattcctaagaattcaacacatttatttatctcttaaataaatctaaattcttaccgcaaattgattactcgtaaagtttaccaaaatagtctataatcacattaaattttgcaattctacgactataattaatccataattaaattctaattattttatattttctaaacttcttaattttactcaaatgcctatttattttctttctctttctttctttttctttctttttctttccctctttcttttctttcttttctctcccttttctccttttcttttttttttctttctctccctaccggcttctcccttcctctctctctcggctcttgtctcctcggggcggcgacggtgaccgagcaaagggagggagggggggctgcttaccgacggcggcggcggcgacggtggcggcggcggctgcgacgcacggcgcggcacacggcgcggcgcggcggcactgagggcggcggcacgaaggcggcgacgcggtggagaggaaagaggggaggaagaggggaatgggggggaaatggtgtgaggtggaaagggggtggccggggaaaatttatagggcgcggggagggggtggctggccctaatggcgacgcgacggcgcgaacggggcttgggacgacgacgacgcgtggcgatgcgacggcgcggggctcggggcggcgacgtgacgcgcgcggcggcactgggctcgaggcgcggcgacggctcctggcttggcgacggcgcgtggcggggcaggggcgtggggcgcgaggcgacaggcacgcgacacggcgacgggacggtggcgtggcgacaggcgacgcgacggcgacgcggtgcggggcgcgaggcggcgagcgcgcggcgcgaggcgacgggacaacggcgcggcgatgcgacggcgacaggcgacgcgacggcgatgcggagcggcagcggcgcggggcgcgaggcggcgagcgcgtggcgcgaggcgacgggacggcggtgcggcgacgggacggtcgcgcggcggtaggcggcgatggcgatggcgcgcggcagcaggcggcgatggcgacggcgcgcggcggctcggggcgcgaggcgcgtgctgcagggggaggggcagggcttagggaacctcgtcgagcacttacagcgcaatgaacagtgacttttttctatttttcctatttggttgtttttgctattcaaatcttgtcccaatatttctaattttcgcacaaatgaggttcccccaatgtttgagttattctaatcagagggttcacccgagattaatattattcctatttatttttatataatttgcttgaatttaattagagtaaattcttatcccattgcacctaaatttaattgttaccaatatggtcgcgataatattttatttatttccaacctcacctaatctttattttaaattatattttaatcagttattttgccaatttaattttagggtttattcctaattaattattccttattcacgatcagtaaactttgaaaccaaattccaataaaataggcaaataaaatcagcatgatgcaatttattaaaaagtttttgaaggcccatatttttagagttttgattttcgttggtcgaattttcagggtgttacatacggcaacacatgcttgcggctcaaagtagacagaagagctacgccgatgtcagaagacgggaattagagtttgaagtgggtgatcaggtacttctaaaggtatctcctaccaaaggtgttgtgagatttggaacgaaagacaaactcagccccaggtatattggtccattcttgatagtggaaagagttggaatcctagcgtatcgccttgagttaccagagtccatgaaaggtgtacatgatgtgttccatatttccatgctgagaaaatatttaagagaccctgaacatcatattaccgtagagtcggtgacaattgggcaagacttgacatttgagtctcgtcctgtaagaatattggaggaatctgagagggtgctcaggcatagaactatcaagtatgtcaaggttctctggacgcaccagaccgagcgagaagccacatgggaacttgagtcacagatgcgggagaagtatccagagttattcacgtctggtgagttatataagtcctacctatgagttcctttccatacttgtccaaggtataactggacgaattcgagggcgaattcgattgaaggagggaggaatgtaatatcccgtgttctagagtatgattgggcgaattcgagggcgaattcgattgaagaggggaagaatgtaatgccctagggaatattagcacaaacgcgcaaaagttcaatttttaaaccgttatttgaataggcgatcaggaaccgtagatgcgtagagctcgcagagtagtgcaaaatagactataagtttataagtttatagtaatcggagtccgatcgaagttccggggattaaaacaatgtgggtcgttagatcttttcagtctctttatataaccaaccaaaagaaaaaaaaaaggaaaaaaagggatcgagagatcgatcctgtagccctagccgccaggctcctgcgccctgccgctcctgccgcgtttctaccaccaccggcgccgtctctacgccgccgccgttggtgcagtgtcgccggtcgccaccaccaccgtcgccgctgtgctgctgctccgttttctgctgctgttcggtggattgatttgcagagcagcaggtttggttctgcttcttgatttgtgtttgtctccagcgtggtgaagtcccaatttctcctactgctgtgtgtcctgaccagctacttcgtgagttgctgcagtagccaacaactagggggcagggcaggaagagcagagaagtcaaggaattgggaggaagagaggcaaggttggggattttattttccaagatttcacaaattgatctcaaagttgatttttctccacagtaaggctgtaagggtaactccttttagtcctagaaattcaatttgcacgtgggaatcgattaaatcgccggttgagagtgttcatagtcgctatttatgggctggaaaccgtattttcaaaactggcgttaaaccatcaggattctggttagttgtcctaaatatagattgtagtcagcgtcgatatctttccaacggtgctagtttcactcgattccgataaacggtttaggagaaacagcaaaaacagtactgctgaccaggtccagaaatcaggacagcagttcgtttttcttaatctgggatttccagaggcataatctgattttgtgctcaacatgaaagttgtagacaattttgtctagatgtctgaagttgtattatttgctagtttccgttagacggtttgtgagttacgcataaaacagtaatggaacaactataggttatttaatacaaatcggtaaaaggtttatatgttctaggtttcgattttagtaaatatcccttgtaaccatcgttagttgaatatagtggtttatgcgtagttttgctccacaagtgtggagggttccaacgttggaggagttgagtcggagtatcgaaggagttaaggcaagtacaaaacggacttatgtaatggacaaactgagttgttttgtttggcttaacttgcataattattattcaattgcttgaaattactgattgtatgactctgacgttatgctacttattcgtgtttcgacccatattcaaattcatgacgttattcatgtttcattattccggatgttctgtttacattattcaagaaccatgcgtagacatgggagtgcaatttgggtctttattcatgatccttgagaagcgctgatcacgcttgctcggcttaccggtaatgctaagaggatattcacacctgcccgagagggaactactatattttgacttttttgatttaaagtaaagtaaatccaacccttcatattggtttcttaatgcatatatcatgtgtatgttttactagttcaagattgtacttgctgagtattctttacttactcttgtgtttaatttggtttttaggtacctaatgacatcgatcaacatggggcgggagtagcacccttggactacacattattattgcacacaactgaaatttagttttagattatactttgctcagcataagttttgcatagaagttgtaagggtcattaaggttctgattcttatttttcacgtgggatttgtggagctaggatggtttggattgtgtggattatatcggtattgacttttcttataactgcctgtcgtggatgtccatatttttaggggagactggcgaaatttctaataattttaggattagtttttgagtgtattttggtatggcattctaggtacgtggttactgggggtgttacagcgtcaaccaagaatcatgccatgatgtgatttcagttccattttaatcttctaattacctgccatgattttaggtgactgatatctggttcccttctctagttctcttgttctgcagctgctcctctggattctgattcaaggattctcccgatggaactctaatttctcctctttaaactcgggcacctccagattgatttgtactatggcatactaatcctggaactaaaactcctttctttacttgaaactcaggtacttcttcttggctcttgctctactggtactgcttcctgccatctttcttgatctgctgactgctactggtgattctcttcctcctcttgaagccgtccccttgctgatctttgctccatcttgcttcttgacttgagtttcttgctccttctaaatctgaaacccttgttcatccaagaactgcacacccctgcttctccttttactcctctgacctccctctctctcttactgattgcttttactatggatgctatgcagctatggttaattgatgtattgatttgtgctggatttcactgagctactacagctgttgttgctcttctaagcggagccatactactctactactgttgcaactgctgctaatgctgttcctcgaggttgtctcccagccaaaacaacatgatggctagtctactagctaggctaatatttgtatgtaatttgtgagggcatggtgatgcagctgcttgcatgtcggtttggaaaaggatttgctgccacatttttcacctaatcaatttggggtgaaaaaggtaatttcctctttgatgtcattttggtgattacatggaaactaaagtcagtaaattataattactgcaggaaattggttttatacgtatacctatggaattcttacattctagtccttaaggtttcataatatttaagattttactagagctcgagggctgattggtaattgctctagttttattttcattttcacaattcctctattgatttgtatataatagctatgagttgagtatgttacagaacatttgcaaagcataatatggatgtatgcatgcatgcatgtatgcagatatacactgatcatttgtgaataaagtgtcgtaacttctattgtgatttttattgtgcatatgtgtatctctcggtgactactaatgtgcgctataattcatgggtagcaacgcgacaatgaacaaaaactaaattatcccactcctcaccagattagtctaactaacaataaatcaatgatgcatatggatatgacttgataaatagatgacaaggaaacgatcgaaaaaaaatcatttaagatccataatagaacaacaatcaacatatttataggtcctagccagcatcgtggctcaatcgacaccgctctcagccagtgtgaccaagtcattagcgtgactaagactatagctaaaacccgggatgttacatcctacccccttaaattaagtgaataattttattttcaatacatcctaccccttaaattaagtgaataattttattttcaattgttgaagtaatttttttttcacacagtagtatgtattccttagtcctatattgtttgctaatcaactatgacttattaaggatattctgtaacagtctattacagaagtaaattctaagaattggtaagatcactatggttcagcaccctacaatctggcgtatttgtttagaattctagtatgtcaaaactgatagtatttccaatgatttttaacacttttgacaaccttcctggaatttattcttttctctttttttttaccagtcaatctacccaaacaatcttaccccaacagtataatctctaatatggtttcggattgaagtaagcatggtataagtagttattgttaattgaattaagaaaaaagatcaatattccataagacatgatatatgttggacaccttaatattacaatgtgatgcagaagtttttttttaactagggtccttagattaatttgcaaggcaatgatgaaaaatgttcaatcaaaatatgtccttagattaatttgcaaggcaatgatgaaaaatgttcaatcaaaatatgc

SEQ ID NO: 26641 - DNA, 3883 bp, Oryza sativa
ctgcagccctgggtctttcgttctttttaaggatattagtgttgctataccattactaatttgtctatttgcatgcagttcatcgagccttcaacatttgagattggcgacaattaccactcctcgattactgaaataaatgaaatgaataagagtcggttggatagtatgctgccgtagcagcgtacagagagctaattcgcgatatgggtggtttccgtgcagcataggatgctcgcagttatggtctctaagtacaaacatggagtcacagtaagagggatgctcggttggtaacctgttcatataccgagccactcttactcaaagatcggtctgtacaagcattgacactatggataatacaggcagaagcatgagggtcgatagagatagtacaaaccagagatagtagatgcagaaagttaaccagagacagtacatacataagtatgaagtatgggcggtaggtccgaaacatatgcggaaaaataaagagttagcactgtattggtttttagttgaacatctgttgtggttctactaatatggagacaagtactcccaccgtcccataaaaaaaattaaatcctagggatgtaaacatagtgtatgtctagattcatctatagtgtatgtctagattcatctataggatttgatttttttaggagtagttaagtagcgttgtgattcttttgtgctgtgattaatagcgccactgtgtagagataagttttaatagcagttgtgattcttttgcggtgtggttgatgcgccactgtgtagtagtttggcgattgtgtgatgctactacttactaattttgttggtaattttgttctgaatctgagctgattcagttttagctcaaactgatactcaataaaattgcgattcacatgatacaattttgctctttgtctgaactaaaattgagatttacatgatatggtttgttctgctgagtttcagctgagttggttgaagttttcttgttttttatacgtaaacgtataattggtttgttctgctgagtttcagctgatttggttgaattttttttattttttatacgtaaatgtagaattttcattttagttgtcgttcctggagaatcgttatgcctaggtcttggacgatttgcagctaactgacggagatgcaattttagttgcatgtctattacatccttgagcgaacaatgatcataaagaggagtttttagccaaatttgttagaaacagtctcatcagccaatagtgttgggatgactaaacataattagaaaaagaaatgagaaaaaaaaagaagagatgttacaataaatggagttttctattcaatgcaattattaatcaaaataattagagggagttgagtatgtgtgttaggaaattcatctggtgtaataatcagctgaatacaatgtttgagaggataaaatcttggtctcttaacagctagtaggggaagtatcctgttaaagtctgaaaaggatttattctaatcatgttcctattttgttgatacagattagttacaaaaaaaaaatcaaaatttaagtttaaaaatagttggatgttgagggaagatgtacatgatatggtgagaaagcctaggggaacactaaggagggtctctcaagtatagaaaaatggcaaagaaatctcagaaatttaaagaaagctgggttgaaatatgaattgggaaggaaaatataacagagaaaaggacaaatggtgtgaaaatcataatgtatgtgtgaggagaagagaagagcgagggagattggagaatcaactaaggtttactacgagagaggagaggctaaaatggttacaaaggtgcagggagagagatgtgttagagggtgataataacactaagtactatcatgccaaagctaatgggagaaggaggaaaggtaggattttttctttgcgataagagaatgtgttgatagttgggcaagagtagttgctgagttttataacagatttttataaagatatgtttaggccacctgaaagatctaatataagattacaaaatttggagatgggacaattgtctgaagatcaaaagaaagaattgttgaaaccctttactctggaagatggaaagtaacaaggcacctaggcctaatagttttcctactgatttttataaacacttttaggaggtgataaaaaatgatttgaaagctatgattgatgattttcataagggaattttggatatcaaaagattgaattatggggttatctccttaattcctaaatgaaaagacgcagcacaaattcaaaagtttaggccaatatgtctccttaatgttagtttcaaaatcataacaagaaccctgatgaagaggctaacctatgtcataggtgacgtaattgagaaaacacaaactgcttttcttaaagaaagaaacatcatggagggagtagtgataatgcatgaagttttaaatagtgttcatatgaaaaagcaatcaggagttctgtttaattaaggtggacttcgagaaggcctatgataaaataaattggccatttctatgtcagatgcgggaagtaaaaggcttccctagtgtttggtgtgatttgatcatgagatgtgttggagggggtaaagtggcagttaagataaatgatgagagaggggatttttttttccaaacctataaagacttgagacaaggacaccctttgtctccgctgctttttgatattgcagcggatgctctacctcttttaatgaatagagcaatggaacagggaatgattaaatggctagggcaggaatatacagaggatgaaatagtgattttgtagtatgctgatgacactatcttcatgctggaggataacctagagtatgcaaaaaaaaacttgaagtatatcttgtgtctctttgaacaaatgtcaggtttgaaggtaaatttcaataaaagtgaggtcttttgcttaggagggggccaagaaaaagaagagatgtattgtcatattttaacttgtagaaggggtacattggccatgaaatatttggggatcccaattgataagaagagaattcacaatgtggactggagccccactaaaaacaaaattgagaaaaaactgggatgttggcaggggaaacttttggctattggtgggagattgaccctgataaatgcaagtcttgcctttatacatgatgtccttttatgagttgccaaaaggagtaaggaaaagaatagattttttttcagatctagatttctgtggcaagaggatcaaggggtcaagaaatatcacctagtcaattggcaaattgtttgcactcctaaggaacaagggggtttggggttattagatttgggttgtatgaatgttgccttgctgggaaaatggctttggcgcctggaaaatgagagaggcatttggcaagatttgttatcagctaagtatctaggtcaaaaaaaaaactttatctcaaaaaaaaaaccaagacctggggattcacatttttggaggggtctaatgaaggtcaaaaagagtttctaactttttttgtgagaaggtggggaatggtaaaaaatagccttgttttgggaggacagctggtttggaagaagacctttggctgaacaattccctaatttgtataatgtttctcttcgcaaaaatgtgctggtggccaaagtaataggagaagggttaggtagtctaagattcaggaggtctcttgtggataggaaacattgaattgactggggaggaggataaagtggttttgaaactgactaaaaatggaattttcactgttaaatctttctataaagcaatgatgattcaaaacactggctttcaattcaagaatatttggaaattta

SEQ ID NO: 26642 - DNA, 19586 bp, Oryza sativa
gctgagaaggggatggaaggggaagaaggcaaaaagttagttttattctgaaaatgaaactgtggagcatcttttcttaaaatgtccaattgctagacttatttggaacatagtgagttgtgtgtttgattcgaaaccaatccagaatatacatcacttgtttgggaggtggcttcaggattttcaaaaaaagataaaaactttgtggtggtggaaattgcagctattgtttggactatatggaagttcagaaatgctgcatgtttcaaaaataaaagaacacatgatcctttagagttgatatatgttgtttgctcctggatcaatctttggtccattttgtagagatcgggggacgcacaagaaaggcttcagtgggggcagctctgttaaagacggtggtcgctgacttctacaacactagatttggatggaattcatatgtgatgcggttacagggggtaggatgaaggggttgttggggttcctctgtctttttgtgtttctgaagatgtatgcctactggtggctacagttccgtgtctttttttttctctctgctgaatcttgctcccttttgctgtaagactattaaagactctgtagttttctcatttcattaatgaaatgggagaggtttatcctctccttctaaaaaaaggggtgataatgggtgataaaaagaattgatcgcgctgcaggtgcccaaatgggtgataaaaagaattgatcgcttttggagatccttcctttggaaaggagaagaccctgacaaaaccaacccgggcagcagtttagttaattggcaaacggtgtgtaaaccaaaaactttgggtggtctgggcattccggatttagagaggttttcaagagccctccgtcttcgttggctttggcttggttggaaggacgaaaacaaaccgtgggctagtatgaacgttccctgtgatgatactgacaagaggctgtttcaggtagcgacgacaatcgagctaggtaatgccactaaaataagattttggcatgataattggctccaaaacagctgcccaaaagacatcgcacccttgtgcttcaggctggcaaaaagaaagcaaaaaagtgtccaacatgagctccataacaataactagcttgtctctttccggcaaataacatcaatagaagaaatccatgagcttgtacgccttgggagcatgcttcagggagacatgcttactccgtgccctgatgacatctcatggaattggaatgattctaaggtttacacaagtaaaagtgcttatctctttcaatttcagggatcttttgtttccatagatttctcttcaccttggaaggcgccggctgaaccaaaagttaaattttttggttggctagttctccaccagaaaactcttactacttaaaacttgcttcgaagacactggccgtgcaattggatttgttgtttatgcacaagcgcctttgaagacactaattatctgtttagcgaatgccctttcgtcaagaaagtttggtccctagtcagttcctagcaacatttacctacaagcaatgctggccttcctgtcggaacttcagattggtggtctcaaattgattgtgtgggttcaaaggagcaaaagaagacaatgagaggagccctacttaccacttggtggaatgtttagttagaaagaaatagaagaattctcaccaaattttcaatcttagagagagcagtggagcaagatcttgatctccgtagttcggctttttaggccccctaaattttttgtttgtgctgtgttctgttgtatcgtttttattttccatttctggactgaactgttttgtattgttttctacttgtaattaaattccagcagatctcctgttgtcgttctctaaaaaaaatccttaagcaaacaaagcccccgaacattcagttagttatccattgatcaacattcagctaagagtgcatcataaatgcgtatagtttaggtagttaatatttttcctcaatagttttagctaggcaatgcatattgagactaccatgtccttcaatagtatggaagagaaacgaggacccctgttagttccattaaacagatctcaattattttagatgaaaatcatgcttcaacagtccccctaatcaacatccaaaatttgaggaaaaaaacgtcgttctcaagcaacacccaatttgtggatcgtgcggaggcgcggagaagagggcaagcgccgatctcgtagggagttcaaggtgggcctacctaaaacatgtttcagaagttaatgacttaggacatgtttggatcatttagtccctggactaaaattaatctctggactaaaactttagtctcctattgtttagatccagggactaaaagagactaaaggcacgtggaccaagaaagagataagacagaggctatcactttagtccctataattacccaaacgatccaagggggcggaaagagagggattcgaaccctcagtaaaaaaaaaattgtacaacgcattagcaatccgccgctttagtccactcagctatctctccctgttccaaatcgaaaggtttccgtgatatgacagaggcaagaaataacgattgcaaaaaatccttcctttttctttcaaaagttcaaaaaaattatattgccaattccattttagttatattcttttttcttaatgttaataaaagacctccaagagggactaatgaattttagtcttaatatgtatttttagtctcttttagtcatccctgtttggattcttagggactaatggattagtcccatgaaccaaacagggccttaattttagaaaatctgttggataagtttttttagaatctaaatccagattagagatttctaaaggaatttttggatttagaatttaattaggggaactgttggtgatactcttagatagttaacacatagtatcaagcaagatgttaaaatactaccatctcctatgtccttcattaatgcggagaaaatacaaggacatgaagaaaataaggtgagagtactattgattcagtggctaaaatcgagaataaaacgatgtaaattagggataacttcttagcctaacaatacattcttttacggacggagggaaattcttatgctaataaaatacactcttttgagggatggagcatgataaagcgtatacacaccactctaacggaaaatgaatttaatgaattttatcccagcggcaagagacaaataagatttgaccatgatcacaaccattcagtttcccgagtagttaatagttgtggaaatcatttatcagcatattctttcaaggcagtattgcgccatatctatgaacaacctaatcaaaaccacaaggacatgatgggttttaagttccacatataaaagccccctgattcctcgcaagctaccccatatgccttttgcgtagcggatctttggaaacctccttccttgcttcttgattctgcatttcccaaatcccgcacgaacaaggtaataatggcaaaacatgacggctcaacttggtaagttgtgtgtcaactgctccctccatcccaaaatgtttcacgccattgatttttttaaatatgtttgactgtttgtcttattcaaaaaatttaagtgattattaattctttttctatcatttgatttattgttaaatatacttttatatatacatatagttttacatattttataaaagtttttgaataagacgaacggtcaaacatgtttaaaaaagtcaacggcgtcaaacatttagggaatgagggagtataatttctacgatagcatccttccgaggtgacatcagttcttgttatcctacggcagtgaaggccattgggtcactacaaatcgaaataaactaggcgaaaataggtgaaaacaggattttgggggaagttagaagataaattgactcgtaaaggggtttgtgtatgaaattgagttgtaggggggaaaatagaaacactaatgagttatagggggcatttggattttccccagttatatatgatggttggatgagctatttctttttttttttctgttagcacttttctcaagttgttaaattatgtatttttaaaaaaatattaaaaagtttatttaaaaacctaataaatcagtttttaagttagggtagttaagtctttctacaggtaatgcttaattaattatgcacccatgagttatcctattttacatgccactgccagttcaaccaaaagctctagataaaacggagccttagcaattagatctatctatctgttatgaaaaagaaaatagtgagataacctctcttgaaaggattcaaattcaggtcggtgcacagtgcagtgttgtggaagacggtatacggatatcggacggagagagtaccgctaaacggttaatcggaatgcggacgattaatcggaatttggcggaaatataacgttttgaaagtatatgtacatagttgataatagttttccctttttgataaacaaatgcatataacttaatatattccttctatatatatccttaaatagaataaccatatatgatatttaaataagttcataatggatagctgttactgtatatctcaattctgacgtagtgatgggttttgttcataatgcatgaaatgaattatcaagagaatgtagtacatagcataaatgaccgtaatcaaggtcccaaataacatatgtatcggcttcatcaaatacaaactccaataacctgatcatcgtcaaaatcaaggaactcatgttcaaactttagaggaagtcagttccttgtcattttacatcttgctgccttgtgagaatttcggaagagcaaacttctagtcaatagtagtaaagggcacagctaatgagctggattgtggaatcgactttgtcatcacgccgattatacggctgattagacggagacggacgatttaatcggtaatgatcggatttatgcgtttgttaccgactaatgatgaccgcatcggcgtgacgtgatggactgatctccgtatccgtattatcggacgtattaacggccgttaacaccgttttccacaacactggcacagtgcactgccctgggccctggcatatctccctgccagccgagctagcagccgttctccacagatggaaacataaaactttacactgaagagtcaggacatacaaatacatatctgcagcaagaagcgaaacgcacaaatcgcacacagttgcaatagtacagcagggtgctcatataaagcacgctgatttttttatttaaagggagaaaattcatttttgtattatattcttaaacgtttctcaaaatcaagtttcactccgaattaaaaaagcacttactttttatctaacttttaaaccggacaaataacactctatttcctttttatttttgtttaaaatgatgctggtttttcctagtgcaaacttttattagacatgaatgtttttatgacgtatatgccaatatatatatgtcaattaataactaggtccacacaaataaaatttacctgataataatttgcatttacaaaaccactattatataaatgaaaatcattgtgaaaaattattgaatgtgctatttgtccggttttgaaagttaaaggtaaaaaataactcctttttagttcaaggtgaaacatgaatttagagaaaagtttaagggtctaaatagactttaccctttatttagtgatgtaggagagaaatgaaaaccccaattaacaatcttcagcttcccttgatatcaatgtccaaataagtgtaatggggatggttggaatgctctgcaattgctttcttcacaatgtgctcctcacatagattcccaataaactcgagctctttcaggcttgggaggtgctggattccatgaagagaagccacccttgggactttgaaagcaaccctctcgagcttaggagctgtgccattatcaaatatgactgtgctgaggtagctgccttcaaatgaaagatcaactagtttcttgaattcgctgtcacggaatataattgtcccctccgtcaacgcttttcgcaggaatctgagacactgcaggccacgtaggctacccagcatgcgcagagcgtcttctgttaggtaagtctcacgcagggtgatcttggcgagttgatggagttctgtcatccaacgaggaagcccacctctggcacctcttatgtttaaggtttgaagcaacctcggaggtgacagcatatgtgaatcaatcaaactgtacccactgccactgttctcggcctcactccctgtcgcgccttctattatcctgattgacaacgagcgcagacagctttctagcatctgaatctggctaagcaaaaacttcatcagatcgacccttcctctattgaaaaccacacccagcttcctcaacctcctgagtcggccaagatcaatgagcccgtcatcttggctggagatctcaacatggtatagcacttccatatctgtcataaaactgatatcaggcatttttaccgtggaaaatgattcaccggatggtgcctcttttccagccagcagatacttaagcctagggaacacaacgtttaacaccctcacgttggtttggcgtatgtccagcgtctgcagattgtggagttcttggatttgcttgggcagatgataaataccagtgtcccggaggctcaaatatgtgagatgacgcgccctggtgcaaatgaccttcaggtctttagcttgaaaaccgctgcaaccctctagatcaagcacattaattagatgaagaccagggtgcgtggccagtgattcgaccaggctacgatctctgcatgcatgcaggaattcattttgaatggaaatacgtttggccatgtcagggaacaaatcttcgtccactacaccttcatcttccattatcgtggaaaggaagtcacggactatgccatgtactgtacagctcttgaatctgccccagaaactagtaccagtgaagtccccagccggaagaagaaatctgtggttgcaaagtgcatcgaagcagcggttggcaacatctgatggttcttctgaagcagacgttacatctgttctactgattagaccctcggcaagccatcttgttgttaaacttgtccttcgaaaggtgtgatttctaggggaaatagcaagatatgccaagcaatgcctgtaatgactgggcaagctacggtagcagaagttgagcattgaattagcattcagcgccgaagaaggttgcaaactgttgttcaggtccctcagctcttcgatgttcctgttagggttgacaaacagacaacgaaggagcatcttcatggtaaagatagatggggcgcacctagttaggatggactttaggacctccagcagatcattttgctggctgttggcaaccagggaaactgctctctccaagaagaagttgatcagagattctttatgctgctcagggaagtcattgaaatcgaaaatattctgcgggttgcaggaggtggccgccacttgaggtatacttgtgaccaacaatatggcactaccagcgtaacagttacagcggacaatatctcctatgtcgctcatgagtgactcggaacgaacatcatcaaagacgagcaagaacctcgtatcgttgagacgccttatgatcatgcccaggattgagccttgttcccagctgctgacgttctcaaccccaggaacattaggagcgatgctcaccagtatggactcgagcacctttttgctagactggtcgtcgccaagagagatccagtaggccgtgcggctgcaatcgggatcgtactgtccgtacatatcatgcactttccgtgcaagaatggtcttccccgtaccacgtagccctaggatggagatgacattcggctctcggtgttggaggaaatggacatattggtccatcaacggaatccggtcgaggagctccttcgatacttccgttaataggtcggagtcgtcgtcggccaatatgcgccgcctctcgaggtcttcatgctcggatgcggcacgctgatgctgctgctcgcgtgcaggcacaggctcgccggggatggcggcctcaggctgatccagctctccaaatggtcggctgtcaatggctcgtgggcgatgctggtcggggatggcgtccagctcctgctccggacgtcgttcgggctggctgattggaatgatcatctgccgagcagggccagggcgccacatccacatgtcgataacgccatacctcatccgccgctcgcccacgtctcgtgcccgggccgtgaggtcccggatatgggtagcgagccggtggcgggccaggatagtggccagcaaccgagcgaaatgcctcaaaggcccgcaacaacctgcgtcgtgggtgccgtcgaggcagtacacgtaccggtcgacgaagaactcagatctcacggccacgtccctgacctgattcagccaggcgcggacctgggggtcgttgtcttcgttggcatcggcgatcttgaagaggaaggcgttcatgctctccatttcgtccctcatgaactgcacgtcacggcgaacgccacccagcagtctcgtctcatcgacaagaacattgccgagtcggcccaatagagagttgacggcgccctgggcggagcctaagctgtccatgcgatatctcttgcagcaatatagaggaaattaaatcagctactccacctagacacctagcttagcttcgcttgcgggttgtggttgtggttgtggctgtggttgtggtcgacgcttgcaggagcttagccggcctgcacgatcgagcactgataagtgaaagattatatatatactcgttgcgacgaccatctgcagtagggctaacttgcacattatgatatgtgagctaggaatctatctatctatctattatataattaattaaaggaatagaaaaaggagcctccacgttcgctctcatggcctagaaattctcacattaatcggagaaaaagaaaaaacagagtccatatagaaatacaatttacaaatagctgaaattcggaattaaaaaataaggaatattagaagaggggactagagtccatataaaaatacaattaggaaataactgaaattcggaattaaaaataaggaatattagaagtagactatagagtccatatagaaatacaattaggaaaaaatagaaattcggaattaaatatataatttaaggaatagaaaaatgagcctccacgttcgctctcatggcctagaaattctcacattaatcagagaaaaagaaaaagcagagtccatatagaaatacaatttacaaatagctgaaattcggaattaaaaaataaggaatattagaagaggggactagagtccatatagaaatacaatttacaaatagctgaaattcggaattaaaaaataaggaatattagaagaggagactagagtccatatagaaatacaattagaaaatacctgaaattcggaattaaaaataggaaatattagaagtagagtatagactccatatagaaatacaattaggaaataactgaaattcggaattaaaaataagtaatattagaagtagactatatagtccatatagaaatacaattaggaaaaaatagaaattcagaattaaatatataatttaaggaatagaaaaaggagcctccacgttcgctctcatggcctagaaattctcacattaatcggagaaaaagaaaatacagagtccatatagaaatacaatttaaaaatagctgaaattcggaattaaaaataagaaatattagaagaggagactagagtccatatagaaatacaatttagaaagaaatttggaattaaatatataattaaaggaatagaaaaaggaacctccaagttcgctctcatggcctagaaattctcacattaatcggagaaaaagaaaagacagagtccatatagaaatacaatttaaaaatagctgaaattcggaattaaaaaataaggaatattagaagaggagactagagtccatatagaaatacaatttagaaatagttgaaattcagaattaaaaaaaggaatattagaagaggagactagagtctgtctatatagaaatacaattaggaaataactgaaattcggaatgaaaaaaaggaatattagaagaggagactagagtccatatagaaatacaattaggaaataactgaaattcagaattaaaaaaaaagaaatattagaagtagagtatagagttcatatagaaatacaattaggaaataactgaaattcggaattaaaaataaggaatattagaagtagagtatagagtacatatagaaatacaattaggaaataatataaattcggaattaaaaataaggaatattagaagtaaagtatagagtatatatagaaatacaatttagaaaaaaaaatagaaattcggaattaaaaaaataaggaatattagaagtagagtatagagtccatataggaatttaaaactaactaaaatttagaataaacataataaaattaaaagtagagtttagagtctgtataaaaatacaatttacaaataactaaaattcaaaattaagaaaaacattggaagaagaatttaaggtcaatataggaatacaaatattggaatataatttagaagcaactgaaattcgaaattaaaaattaaagaatattgaaagatgagtttagagtccacatagaaatacaattagaaataataaaaattcataaataaaaataaataatattggaagaagagcatagactctatataaaaatacaatttacagaaaattcggaattaaaaaaagaaatattaaaagacgagtctagagtccatataggaatatatataatttacaaataactaaaatttgatattaaaaataattaataactaacacgtatataaaatataatataaatattacacattagtagttttgtaaagttattgcaaaatttaaaattatgttgtcattttaatatatttgaataatataatgagaaaacatatatgctattatatgagagaaaatataatgatgctagccgcgcaatctgcgcgggccactatgcttgttaatattaatgtggacaagagtagactgtttgccacattgcatcaagcaaacagctagcaccaccgggccgggggccggtggtatgccaattttcaacgggttttaaacagatcaacacggccgccaacaagaaaaacacaccggagcggtatatagccgataatctttcctctgacttcatatctattatattattaaaggaatagaaaaaggagcctccacgttcgctctcatggcctagaaattctcacgttaatcggagaaaaagaaaaagcagagtccatatagaaatacatttagaaatagctgaaatttggaattaaaaattaaggaacattagaagaggagactagagtccatatagaaatacaatttagaaatagttgaaattcggaattaaaaaataagaaatattagaagaggagactagagtccatatagaaatacaattaggaaataactgaaagtcggaattaaaaataaggaatattagaagtagagtatagagttcatatagaaatacaattaggaaatagctgaaattcggaattaaaaaataaggaatattaaaagaggatactagagtccatatagaaatacaattaggaaatagctgtaattcggaattaaaaaataaggaatattaaaagagaagactagagtccatatagaaatacaattagaaaataactgaaattcggaattaaaaaataaggaatattagaagtaaagtatagagtccatatagaaatacaatgaagaaaaaaaggaaatttggaattaaaaaataaggaatattagaagtagagtatagagtccatacatgaatttgaaactaactaaaattcggaataaatgtgataaaattaaaagtagagtttagagtccgtataaaaatataatttacaaataactaaaattcgaaattaagaaaaacatgggaagaagagtttaaagtcaatataggaatacaatttagaagtaactgaaatttgaaattaaaaattaaagaatattgaaagatgagtttagagtccacatagaaatacaattagaaataataaaaatttagaattaaaaaaaaataaaagacgagtctagagtccataaaggaatatatataatttatagataactaaaatttgatagtaaaaataattaataactaacacgtatataaaatacaatatgaatattacacattagtagtttcgtaaagttattgcaaaatttaaaattatgttgtcattgtaatatattttaataatataatgagaaaacatatatgctattatatgagagaaaatataatgatgctagccgcgcaatctgcgcgggcctccatgctagtttgattaatgcccactcagttcttaaatacatgacgttctagagatctttcagttaaatctatttaaaccattaattaatgtcgtcattagtatacatgttactccatccattatcgaattactaatgtgttatataacggtcatcccacttttacgacgaattacatttcaatgattataatatgattaattacatagttatatttaatatggtaataatcgataatctgatatattttcaagtatttataaatttaccaaaaaagaaaaggtcaaaccttaaaagtaaactccctccatgtggtgtccaactacgtttgtttgttggcttggttgtcaagccgggtaatgaaaattttacctgcttttaaaaaaaagaaaaaagaaaagaacttatagtgttcatgtcaattattcaagaatggagagtatacacaatgttctagttctcagtcatacaaaatatttaagttttgatgtgtgaaaattgtatttaaatattcagtccgaataacaattccatatagctatatatatattttatatttttataactatattagtaaataatgatccaacatgtgcatgaatgtccatatgtgtcaagtaaaaaataacatagatactctctctgttctaaaataaatttatttttcattcatctcccacatattaattaagaaaagaatatccctaatttatcaatgcacaatgcaattatttctcactttatttactcacaatgcatttatcatctacttttacaaactctaatgtcatgattgcttaaaaaaataaacttatttgagacacacagaaggggtaaaaaaatgattttattatgggacctaggtagtgtccagccaaactacggtacaaggattatgtgagatgtcatatagtcaggtttgcaatttatatctatcatgtattaaaagtcgatgacatgcctatccatataccaaaatataatcttgtaccatataccaaaatataatattagtacaaggtatttattcatttgatttaattaagagctcctatgccctcccccgtgtgggcgatcgactcgagcgatggagaaccagggttcacgattccgacgcgccccttcctcccttgtcctccgagtcgccactacggcactaccggaaagccatatggtgtgcggcgaggtaggatggtggtgaagggggaaaatcctcatcagtggcacaccagaaatctgggcaatggatgcacagaggagggcgaggcggcgttcggtgtgagcacatctggcatggtgaggccctcccttgtcttctcttggggcagctcaggcagcaatgaggttgttaattagacgaccgtcgtggatgcagggttggaaatttcggtcgagacaatattatttcggccgaaattttttaattttttatatttttcgtgattttttggtaatatttgttcaaattcaactaaattttgtttaaaatttcaggaatttcggatcaaaattttgaaatttcagtatttcggtgaggtccgatcaaatcgactaaaccgaaaggtttaaccctgcgtggatgtggcagcccacggctagattcagtgagactggacccgacgagaccagatttggcactcagattgtgggcgacttcggtgagacaactacggtgcgtggatgtgacggcgcgagtagacgatgggaggcaacgggatggctagggcaggttggcgagaccagatcctgccgctcaagcttgtggggatcgtcctgcgtggtggagacagtgcggggcaccttatactttctccgtcccaaaaaaacttaatttctgggttttcatgtctaacgtttgaccattcgtcttatttgaaaaaattatgaaaaaatttaaaaagataagtcatgcataaagtattgtttatgttttatcatctaacaataatgaaaatactaatctaaaaaaattccatataagacggacggttaaacgttgtacacgaaaatctaagaattgagttcttttggaaaggggagtatgccgcaaggcggtggtgacatggcaaaatgacctgagacagcaggggtcagtgatgcaagaaaacagcagcatggctcacggccttgctgtgcctccagcaatcgacgtgtggggagatggtgggagtttgggagcaagttgggcaccggtgggaggttggtggtggggcgctagaacggtggtcgcgtgcagtgaagttcttcggatggtggcagctgatggtaataacgaggatgcaacgatatgagggctggatcgatgttttttgagcggaagcccagctcaattctagaccgacagtggccacacttttaggtgccacaaccccccggaggcgttgctctacggcttcctcctctccatctgttgaaatttgtcgtgtgaaaatcttatcctggtttctctggacgtacgacagcgatgtcctcgacgtcctgacctccctagggcatcgttgtgaaggtccatttcctatcattctcttcttcaaacgatttgtcctcttacaacagtgtttttgaccaccaaattaaagaaggccacaccggctgatatgtgcgttgtttttatatgagtaaaatgcaccagcggtccttgaacttgtcagtaggtttcacttaggtccacgaagttgcaaagtgcacatcgaggtccctaaacttggtttattgtatcatcccggtccaaaaccgcgtttgaccgtggtcttgcctacgtggcacgccacgtgaacgatgacatgtattttttttaattttttctccctttcctttctttttcaccactgcgacaacccctcccctcgtgccgcctctcaccaccgagaaaaaagaaggaagaaagagaaaaaagaaggaagaagggagaaaaaaaattccatgtcattgtccacgtggcgtgccacataggcaagaccacagtcaaacacggctttggaccggaatgatacaataaaccaagtttagagacctcgatgtgcactttgcaagtttgtggacctaagtgaaacctcctgacaagtttaaggaccactagtgtattttactctttttatatagtcctactaggagttggatttgaaattaaaataggtataggatagagttagagtcggactttgtcataagttctctcttaaatagagaggggtactataatgtaatcatgacgactacaatatagtgtaggcatgtagggaggacaatagcggtgaagccatggactcgtagtggctagttgctatattgattagggaggagcatccatatcagagccctggagatgtaggctttggctgaacttcattaattaaactagctgggtggcccacgcaattgcgcggctagcatccatataaaattatatatttttttaatatgattttacttaaaatttattaaatagttatctcgttgtcttaagattttaaaagaccaaaccttatcatccttgtgtttctaattttatagtttttaaaagtcacaccagttgctaccccttacttctgtcatattattctttattagcttgcttgatctaccactatttctattcattcttctttgaacctttaaaaattggatgttaagacttatagtttttagagtttattgtcctgttggtcttcttttgtataatttctagaaatcccgtcaagcgctgtcattatactcctctacgatcgtccactgcatcttctctttattgtcattgctattttaaaaatcgaacataattattgtttaggttcatttttctactttccaaaagtttcaccaaaacgtcaacgactttgtcactgtactcctctatggctccccgttgctgctcttctttattgtcattgagatttttaaatcaaacatggttatcattagggtttatttttttactttttagaagcccgaacctttaaaaatttgaccttatagttcttagagtttattgtctcattgggttttatgtttttttatatttttttagaaatcccgtcaaatgctgccactatactcctatacgacccgtccgccgcatactctttattatcattgggattgtaaaaatcgaacataactatcattgaaattcattttttaatttctagaagacccatcaaccatcggcggctctgccattgtagtcttatatgacccacccattgcctctcatttttattgtaattgagattttaaaaattaaatatgattaccattgaggtttatttttttactttctagaagtccccgccaacccccatgaccgattgcttcacgacctgtccgtcgtacttccttttaatcgtcattaggattctatttggtgttttattaatagtttttagatgtctcattaaccaccaccactctattcctctataggcatattacttaattaatctcgtcatgtgttttagatactcttttctttcaatactcaatagtcttaatttttttatcaccaatcttagttatttataaattgtattcctagttaaaatcttatttttcttttttctaatttcagaatttattttattttttgtattgtgttcttttcatatttttatttttttattttcaattttagctgtttcaaaattgtatgcctactttaactctctttttaatttgcctaatttcggatttttattttatttttttattctgaattttaattaatctactattcggttcttatatgtactcttatttctatattacttatatttaattcgaaattttagttaattttaaattgtattcctccttgaactcttattttattttcttttttctatttcctatgttttttatttttattctgaattttaattaatctcgtaatggattcttgtatggactcttctttcaatattccttgtttttaattctgaattttagttatttttaaattttattcctacttggactctcttttttttgctaattttggattttattttatttttattccgatttttgattaatttcgtattgggtttctatatgtactcttcaatattgcttactccgtttgaatcttcagaacatgtcaatatattttgccaatcactttgcattgcttaatatatttatcatattttattcagtcatagatggacggggaattctgtaattagttttgtattctaattacctattcagctccaacacatactatatgcaggcaacgtgcatgtccgattcctcgtcaattaaaatattgtaattacttctcagtttcctattatgatagaataggcttagcttagagcagtagtttctattcatattcatattcttcaaattaatctacaccgttaaaatctagtcagtttgtgatctaaaggtttaatattttttgttttttctccgattaatgtgggaatttttagccccaacaacgaacgtggtaccttcttttaagactgttttaataatataacttgttgggtggcccacgcaattgcgcggctagcacctaaacaaaatcatatatttttcatatatttttcagtatgattttacttaaaatttattaaataactatttcgttgtcttaatactttgaaatatcaaaccttagcatccccatatttctaattatgtagtttttaaaagtcacaccagctgctacctttgtcatatcgttctttatttgcttgctcgatctactactatttatattcattttctttgaaaccttaaaaaattgtatcttatagtttttagagtttattatttcgttgggtttcgtttttataatttatagaagtcccgtcaaacgctgccattatactcctctacagcctgttcactgtcttttctctttattgtcattgggattttcaaaatcgaacataagtatcattcggggttcattttttactttctataagtcccatcaaaccgtcagtggctttgccattgtattcctttatggctcacccgctgcctccattatttattgtcattgagattttaaaatcgaacatgattatcattggggttttttttactttgcagaagttccaaatctttaaaaattggaccttgtagtttttagagtttattgtcttgttgggtttcattttttataatatttagaagtcccgtcaaacaatgccactatactcctctacggtccatccaccgcctacattttattgtcattgggattctaaaaatgaaacataactatcgttggaattcattttttgttttgtagaagtctcgcgaatcgtcggcggctctgcaactatactcctatataccccgctcgctgcttctcatttttgttgtcattgatattttaaaaataaaatatgattatcaatggggtttattttttactttttagaagtcccggcaaccgccttgcccgtttgcttcacggcccgcctgccgtccctccttttaatcgtcattaggattctatttggtgttttattaacaatttttatatatcgtatcaaccgtcgccattctactccttttataggcatgttacttaatttatctcgtcatgtgttttagatggccttttcttttaacaatctttattttttatcaccaattttagttatttataaattgtactcctaattgaaatctttttttcttttctaattttaggggaaaaaatgaaattttaattaataccgtatagtgttttttgatatttttattttttttttttgaatttaagttgtttcaaaattgtattcctacttgaactttcttttagtttttctaattttagatattattttataatttattacaaattttaattaatctcgtattgagttcttatatggattcttctttcaatattgcttattttcaattacgaattttagttaattttaaattgtattcctacttgaactcttattttctttttctaatttcagactttatttttatttttattccgaatattaattaatctcgtattgattcttatatggactcttctctcaatattccttattttaattccaaatttcaattatttt

SEQ ID NO: 26643 - DNA, 3900 bp, Oryza sativa
actctctttttctttttctccgattaatgtgagaatttctagcctccacagcgaacgtggtgccttctttcaaaactgttttaataatataatagatagatagatagatagatagatatcgtttgttcctatgtcattatctagcatgttttgagggatcaatgattaaaacgatggagaatgttagtcatcgttctgctacatcgactaatttttgtaatagaatgaacccttctccacttttataatagaatgaacccttctcttctcttacgtaccctcttcctcttcaatctaaatgtgtggattgagttgagtgtggtcaggacgtcacactcctgtttgttcctcaatagtttttatgttgtagacacgtggtatgtttttttccatgttatagcctcataaagattatggttttgtaaactttttctactgtatcaatataaaccttgtaccatcttgtgcggttttgtaaaaatatttattcattgtacaacaggacgaaaaaatatttattcattgtacaacaggacgaatttggattacagcgtagagtggaaaattctgcatattgatgattatcaattgtacctgttgcaatgccgtgtcggcatgggttatagcaagaccgactaataataaagctggccaatggaaaagataaactccctctatcctatgatacaaggcatattaaacttgacacggtctctacaacttatctttgatctataatttctcatatattataaggtttgtaataacaaaattataagcatatgaaaataaattcaaattgccaatccaatggtataatttttagcaagtaaaattcaattcatattatactaaatgtagatcaaaatgttttgaaggtagaatcttaaaatgcgtggacgctttatattatgggatggagggagtaatagattagttacacacacacacacatatatatatatatatatatatatatatatatatatatatatatatatatatatatataccatgtcaattgtcgcatcttcccttggataatagtagagctcactttctactattagctcatcttaaagccaacatatataatagattagtttataaggttggttataattttcttcttctctctccatctctcacgtatttgtttttaaacttgtgataagattagctcttacatgagagtcaacactcttaattttttactacctctatcttctatctaaacttataaacttataggaggtttatagctccctactaagtagacagcaagtggccgtataaaaagtccaacttgagttcgtcgcgattccagtagtttgaccgggcctatttggttttccctgacgccgatgcaaccttgacagattaaaattaaagttgtggtctagcagtctatggtattacataattgtttccaacattgctcactctattacacaagtgggataagagttgtaattgtgtacactaatcgatttattttatgaacaaatcatgcattagcaacttgcagattcgaaactgaaagcatatttatggatatgtacggctgataagttcttaaccgtcccggtgggggaacccttgaacaccaatccaatataagatatcttaatctttcaactattaaaatcggtgcattttagctttctcggtggttttgagggtgccttcggtgacgtgacgtctacatgacggtgtgacctagtctttatcccacatagtgcttacgtgacattagaatttaaaaaataagcaagagaattgtcgatagaattaaaaaaatacatggaacttatttgtcattaaaaaaatattataagacccactgacatatgggcccccatgtcatcacttctcttcctcctccctctctacgtatatgaagacttgattcacctaccacaaaagctaaactaggatgagagcggctgcttctttccactccccggcgaccacccataccgcttcttctttgcctggtcgtccaacgaccctgagctgccgccaatcatatcggcgccggacatggacgcaatcctcggtggcgcgctcatcatcttgtgactggtgttggtgctgtagtgctgcatgtaaggccggatgcggcgcgcgcctgcttggctcggctcggtttagctcgttaggataacgagccgaacgctaagttgttagctcggctcgtcttgttggtaagctcgagccagctcgttggtaaaattgcaaggctgcacttcagtaagcagctagcacatatcaagccagccagcaagatggcagaaacgcataaagcaaatgcatatccataatacgatgttccaatccatagcctatcagcaattcacccaagaagtacaaaaatatcaaatagtaactatgcaaaattgcaaatgtaacaagccaataaagcaaaaagaaaaaagcaacaacagatcaagtcctcagtattgacgccaatgaaagaaggaacaaaacagcaggaatacaggcttgctcgacgttgacggtctcagtactgacgccgacggcagcgaggaaattaaggaggcttagggtcttcgatcaaccatttgccgatgcaccttgattagaaacttggtggcgccgatcccaatacctccaggatgctagggatgttcgctcgtcgcgcggtgcaatgggcattatcaccaccaaagcagtctattcctcttcccaaaattcgccggctctgtgccacaatggcaagtttatttgggacaacagagctccgcctcgagtttaattctttgcctggcttattgccaaggatcgcctccccacgaaggttaatctccataaaaagaacattgtgcaatcccccaaatgcaagctttgcagcgatgaagacgaaacggtgagtcatctttttcttcactgtccgttcgctgatgaattctagagatctctcaacattcaccccggcatctcacgcgtgcaagatctctcaggtctagtcgctcctaggcagctccccgctaaacacttccaagttttatatctactctgtttctggggtttatgaattcatagacatgatgttgtttttcgtgatctgcctaaatcactcctaagaatggtagcaaaatgtatggaagacgctaatctttgggctgagtgttttcgtagagaagacagggtagttgtgtcaatttggaaggatcttctctcttcctccgtacacgtcactcgtcatgctaaggtggttgatgatggcgctagctgcgcgtgtgtcgcagttgcgcaggcatggtgcgcatggctggtgtagaccgggagtggttacacagcatggcacatgcgctggcactggacacatggacgtggccaagagaggacgttcctggcctagggttgatcgacgggggcgtcgatctctcttaaggggggacgtggccaagagaggacgttcctggcctagggttgatcgacgggggcgtcgatctctcttaagggggtgagggtgtaacatcccggtctagggcttaataggattaatagaatactcatatcaacaagttgcaacttcttttccggaagccaatctccaaagaacttcagggttaagcgtgcttggcctggagcaatttgggatgggtgaccgactgggaaattcttcccgggtgcacacgagtgaggacaaagtgtgcagaaaagacatgtgttggtttgtgagggcagtctatgacctatgaaagctatcagaagacgggacgttacaaaatggatagatggtgacgggcgacagccaacagcgagatgcggagggcctggatttttcacattttggtctttttaaaaaacttattttgcaaatagacccctaaaaaaacttatcccggaaatggtcctttttggggcgccaga

SEQ ID NO: 26644 - DNA, 16199 bp, Oryza sativa
gctctcctccctagggcggtgccaaccattttggcgccctcctcctgccacgtcggttcgcgtgtaccacggtggcaagaggacggcgccagagaggctggcgccgtcccgttggacgacggcaccagccactctggcggcccaaaaaggaccatttctgggataagtttttttaggggtctatttgcgaaataagttttttaaaaggaccaaaatgtgaaaaatccagtgcggagggcagccaacggccggcgatgaccctgctggcggcggcacgaggcgtgatgggggaggtcgagacggcgttgggagcgtcggaggctcgatgcgagatgggggggagcgagagtgcaacactgggatcgagataacggggggatagggatctaaggttaatttgtttgcatttatacctggtgcctagttgggctgagcctctaaatatttttgttggactgccttttgacttgacctcgtttagctagtgagctggctcgttatgacaagggataagttcacattgggtccctctatttgtcgcccagtccgattttcgtcccttggtcgcaaaaccgggtacaactggtcccccaacttacgaaaccgtttaaatgaggtggcgtcgacgtggcttctttgactaggtcttcgtcatacgtggtattgacgtggcgcttacgtggtaatttgatccctgaaaaataattaaaacagtgggacccacatgtcagcttcatatccataatctatccggttatccgctctctctctctttttgtcagcgaagaaggacaagcggctgagccggagcggacgacgccgatgaccggagcaagctggcgacaagaacggcggcgccaagggccgggagccactctcctcctccttgtcggccgtgggcggggagatatcggcggcggcctcgacggggagccgctctcgctaacggtggccgcggaaggggagatgtcggcggcggcctcggcggggagccactctcgctgatggtggtcgcgggcggggagatgtcggcggcggcctccgcggttcgggtcttccctcgccggattcttccgtgacagtggtggcggcagcatatgtcgtcacggaggaggcaacgatggagatgaggagcacggcgggcatagagggcggcgctaggatggagatgtgtcgcgcgccattcctctcccgtcggtggccgcatgccgttcctctcccgccggtccactcccgccgcccgccgctcctctcccgccaacgcccgtcggcgggcgcaccccgctcctctcccgccgcctaccgcccaccgcacctcgctcctctcccgccgtcagccgcccgccgcacccctcctcctctcccgccgtcagccgcccgccgcaccctgcttctctcccaccggcgtcgttgaagcatacagagccacagaggtagatgaggttgaaaaagtgggacccgctgacatgtgggtcccttttttattttttttactggcatgtgggtcccacaaattttgtataatttttttattttgaattttgatgtttttttttcggatctaattgccacgtaagcgccacttcaatgacacgtgagacaaagacctaatcaaaggagccacgtaggcgccacgtcagcaaaaaccgggcacaataccgccgagcgacctcacttgcatggtttcgcaagttgggggacctatcttacccagttttgcgaccaagggacgaaaatcggactgggcgagaaatagagggacccaaagtgaacttattccttatgacaaatgaactaaagcattgcctcagctcgttaggaattcattacaagccaagcccagtctagtcaagctagagacgagctgagcgagctaacgagctagagtttttcgtccagccaattcaaatgaaataactgacccagcgaacaaagacccatttagttcgcgaaaagaaaatttttagatatcacatcagatgtttgaccggatatcgaaaatgtttttcggacacgaatgaaaaaaataatttataacttgcatggaaaccgcgagacgaatcttatgagcctaattaatccgtcattagtaaatgtgggttactgtagcacttatggctaatcatggactaattatgctcaaaagattcgtctcgcgatttcctccctaactgtgcaattagttttttcatttatctatatttaatgttccatgcatgtgtttaaagattcgatgtgaagtttttggaaaaaaattttggggaactaagcggggccaaaataactgacacaatctctcacattctcactgacccggcgaaacaaaaaaaaaagattaagggcttgttcactttgatatcattttcaaccttaccaaattttggtaaagttgccaaagaaaaatggttacatttaaggcctgttcactttaatgccattttcaaccttaccaaattttggtaaagttaccaaaaagtggctacatttagtttactaccaaattttggtaattatataagaaatcctgccaaaattttggcaagttactaaaattttggcaactttgccaaaattttagcaatgacaaaatttggtaaggtttttttggcatcaaagtgaacatgtccttagtttgctgccaaattttggtaactatataagaaatcctgccaaaattttggcaagttactaaaaatttagtatttctaaaatttggtaaggttttttttagcattaaagtgaacatgccctaaacaatcccctatacctctcacagtctcaatgccccgtgtcttgttagcgcggtactccatggacctcgtactccacgctgaagacagttgtgatgcaagacaacctcttggggttattgtggggtgtgtttagttcacaccaaactttccccaactcccaatttttcatcacatcacatccaaaatttttctacacgtaaactcctaacttttttttcaaactaccaactttccatatacttctctccaatttcagaaactaaacacagccgtagtcatttgggaggcggacacaactatgcgcttcgttcttcgtaggtctgtcacctagtattcattaaaaatccttatattcatgtccatattatttgggtaagatatactacgtagataaaaaagctatcatttaaattggtatgggtagaaaagttatcattccaagtttggatatggggaggttattacatatttgaagaactttgttcatacccgtttataatgggtaaaaatctgacataaaatttttaaactcacattcacattataaaatcttatcaattttgcttgaaatttacagagatgatttattatataaaagagcaattttctacaaattttggtccatttctacatatgggactcacatgtctcttctcttacccattaggttacccctacccattgaataatatccacttaatttgggtatagatatttttttagatgtgaatggttaaaattgggtatagatatgggttacacaataccctccctagtggcaccctggtctggtactgcatggatcagtcctactccctcttgaactgggcagcatcctctgagaacgctaataggcgatcggtcgcgcgcctcctctcccacgtgactggacacgtgtcgcgcgcggagaaggggcgcaggcggcggtgcggttttctttttttttcggtttccttttttctcgcacgttcgtttttttggtttgttctgttttttctgcggttttttttcgcacggtttttttctatccgtatatattttttcagttttttgggttttttaatatatacatatgcaaagtttgtatacacatatacaaactttgtatatgtgttttctaatatgtacatatataaactttgtatatatacgtatataaagttggtatattttgtatacatatatatacaaactttatatatgatgtatacaaactttgtatttgtatacatcgtatacaaattttttatttgtgtatatattttttatacatatacacaaaaagagagcaactagaggacggtataccgttttgacggtatacctctctatacacccacgagcacaagtacgattccccatgactcgaagccccgcgtgtctgatcctggcacgatgctcacaagcacctcgctgtcaggctctcagtgcagcacgcagccaacccttggacatatcacgtgctcctgtctctgttggcatcgattgtagacttgtttctattgttttaaaattttgcagtgcacatgtttaactaataaagtgctaactatttctttccgtctaaagctacgtactttagttagacgattatgtgctagatggttgtgctaatatataagatgacaataaaatctctgtgatatttttacggtacacatctagtaatgttgagatattatccgatacccttgagctagctatcattcgacactctcaaggtatcattcaatagatattatctggtactctcaaggtatcaccggtaccaatgaggtatcacccggacccgatacaatcaagttatcatcatatatcaggtaccctcgaagtatcatcgggcctggtaccgttaaggtatcatcatatatccggtaccttagagtgataccttaaaagtatcagatatataatgataccgtaacagtatcgagggcctagatgatacctcgatggtaccggatgatacctcgagagtaccagatatacgatgataccttaaaagtacctcaagagtaccgagtgataccttaagaataccggatatacgatgataccttaacaacaccgagtgcctaggtgatacctcgatggtaccgggtgatgtctcgagggtattatctggtacctatactcttgagatatgatgatacatatggtgtattaggatggtactgtgaaagtatcatgtgtatcacatacatccggtatccttttttaaaattgtatagaaatactgaatttttcagtttgttactgtgatttcacattagtactacaaagctatcttaaagtatatttggtctggtcaaatgaacaaggccatacgtggccgaatgaacatgcacatgcactctgctaggcaggttaggagcagaaatgtgatacgcttggaagatgggcgacaagcgcgtgactcgaggagggcccacacaacaccacggagtgggcgctggctgtagaaagaaatcgtaatctatactgtcgggagaacggaataccgtcctttagtttttctctatttacatatgtatgaactgtagaggagggagactaaaagaggctagaactgaccgcgcgccgcgcgctgctgatcgccaatcagccaggcctggcatcctccgctgccgtgagtgaccatggcagcggcttcctctcccgtgtcaggatctccctgataacctcctcctccatgtacactggccctcttggaccggtgcactcctctacctccaccgtcgccgccgccttggccggggaaacgatgctcgacttgtgatgatcggagcagactgtctcttctctgtcgccactgtcgccgcattattcgtcacggcgctcgcctttgacgacgacgcactgttcatgcctatcaactccgatctaaaacactggtcgctagcaagattgtaagtattgcgatccatatatatcgtagtatcttcctaccaagatgaaacaatatcaatcccacttagtatcctaatttttataatatcccgatcctactattgattaccatatgattttacgaaatcttaggtaatatcccgattctacgatcatataaaatgttatttaaaataagatggtttgaaaataaattaaataaatatgcactagtttatataaaaatcagttaaatatatcaaacataatgtattttcttataaatgtctctatttacataacatatattattactatatttttatatagaatagctatacataattaatataaatattaattaaacttaaaaaaaataaaatctcatagtatcctgatactgcgatacgatactattttaagcaaaacgatactacctagtatcccgataactaataagcttggtcgctagtgggcggtggattaacgggagaagcaacgtgacggtttaatgcagttaatttttaaatcatgtttgaccatttattttatttaaaaagttatatattcatcatttcatttattatgatttattttatcattagagttgcttttaacaagagtaaagtccatcgccggtccctaaacttgtaccgcagtgtcatcccggtccctaaactcacaaatcgaccgttcaggtcctcaaacttgttcaactgtgtcatcccggtccctaaacttgcagatcactcgtttaggtcctccaacttgttcagttgtgtcaccccggtctctaaatttggatttgaatatcatctagatccaataggacggtttaaagactttatatttaaaaataattcataactttttcatgtgaactctaataaagacaaactttatatcaaacttgtagtcctcgacgcgatctacaactttgtagttgaatttttttattttaagtcattttttgtcccaaaatgtaattttaaaattaaaatttcaaaatctataaacatgcaccaatattttgggactctaaacagttttaattcaaaaacttttcaactaaaatgttataggtcgcgttgagggctacaattttgatataaagcttgtcttcattagagttcacatgaaaaagttataagttattttttaatataaagtttttagaccgtcctgtttaggtaccggggtgacacaactgaacaagttggaggaactaaactagtaatctacaagtttagggaccgggatgatacagtcgaacaagcttgaggacctgaacggtcgatttgcgagtttagggaccgtgatgacacaacggtacaagtttagggaccgatgatggactttactctatagtttaaacaattaaatgtgacgatttattaagcatataatactatgtttagaaaaaagtcaacatcgtcgaactagaaaaactgagtttgcaccctaaaaggaaaaaaaaaactgagttcggttccgtgtcgaactcggtctcttcccgcaatagcgccgacccacctgatcggactccgatcgcccccgcccacccataaccctaaacccgccgccgccgccaccgccaccgccactgccgtcgaaacctacgcttcgaaaccatgtcggccacgacgcgcgacgacgaggcgtgcccgtcgacgaccaccaccaccaaatccacaacggacgacgagccggcggcgccggccgcgacgacgccagcggtgacaacaacaacaacagtcatccacgacgacggcgcccctgccccgccgtcgccgaagaggcgcaaggtggcggcggcggcggctccggctccggcggtggtcgacgagagggcgcggctgaagcggaggatcgcgtgggtggcggacaagatcgcgacgcaccgggacgaggtggagacgccctacggcttcccggacacctgctacggctacgccgggtacggcttcgtcgggtgggtgcgggcggacttcgccggcgaggagcgcgccgccgagagggcggcgctggaggcgtggatgcagatcgagtgggagaggcggctcctccggtggcgccgcagcgagcagcagcagccgggcgtcgacggcggcggcgactcctccttcggcgtctgggatgatgatgatcaagaggacagcgagaagaaaacggaatacaaaataatagcaggatgattcatggttttttttgtctatccatctaatcaaatttgatcgaaatcacgctaatgatccatcaatgtgcctgatgtttatacattttttgcctgctgctactgcaatctgatatgtgttcagagtcatctactcctagcaatgggaaatttaactatttgccactcttgtgacatggcaattaacgatttgccacaccgtgtctatgacatgtgggcccttatgtgtctatgacatatgggcctagtggcaaatcgttaagcaccactcgtaagagtggcaaatagttaaaagcccccctagcaattgaatgcgcatctatagatgcaaatgttatgtattcgattctttcttcagtgtcaaatttatgccttcgtgcccccaactttcgttcttgattaatgaaaacatccttggcaaatgctttcgtagttgttcgtctttcataaatccaagaatttcacctctgactatgaaatacgaatgcccccgactgtccctattaatcattactccgatcccgaataccaacacaatagaaagaaaaattgaataagacgaatggtaaaaagttaacactgtcgtaaatacggaaggagtacgtcgaactagcttatgtaatttacatttgaaaattgaaaataaaaattacaaacaaatctactcaaagttacattataactataatgcaactacactgtaactataacataataactatgctgtaattttttaggtaggcgggccgatgctataatgtaattttctctttcggtgttgctcaagtattggtttgttgggtagcgaaaaaccttcactgcgattgtggtatagtagagaatacaatgctcctgttgtagtatgtattactcagatggaggtagagcttaatgattgccgtgtgaaaaagactccgtttgtgttttgggctttctccaaaagccgggtcaatatatttgatctgatttcaaaaaaaaaaaaatgccgtgtgaaacgtgatcgaggagttaaacttctgtacatatagagagagagcaaacaaatgcacggcacgtacaacgtcgtatactcgtatctaagtaatctaaggaacgtgaaaaacaacagattcgtcaaatttctagcagatccgaaaaaaagaaccacgaaacaatcgagccgtgtcccttccgactccaactcttccccggctatacgtacggctccgcgttcgcctccgccttcataaaccaccgtctctttccccccatcgaaagctacgatcgattccaggtcaatttccaacttccaactcgcgtcatcgcggcgaaatctaccggcgatcgatatatggccggcaacgagtactccaccaaggcggcggcggtggaggcgatcgacggcggcgaggaggtcgtggtcctggcggggaagctgctgctgccgagggaggtggtcgacaagatcctggccatcaagaggaggcccttctccttcggcgacgacgacatcggctcggacgacgacgagctcagggagctggccgtgcagcacgaggccttgcaggacaagttcgccgcgtgccaggccatgatccgggagcatcgccacgagaacaagggctacgccattgtcgacgacgagttgcaggtcaggatggccgtgaccagggccctgcaccccttcgttgagcgctaccactgggtcggggaggaagacgaggaggaggagcaggtggctgacgtcgttggtggtgaggaaaagctgatctgagacgcaactgagaattgcagagctttgcctatcttaatagcattacaattaatacgtactgtctcatcggatggcctaatcagtcaaagaaaaaaccaaattttgaattttcaaatctaattttgagtttgattttgagatattttcaacgtagtttcttttacaacattggcttttaagtcacaagaacacatttataaaaatttcacctataaattcatttttatttcctaataagccgttttggcttattaggaaataagccaaacgatggggacctcactttcctatgctgagcttattcagtactccgtatctatcgatctacatactccacatgtctatgtgatggctatttatgtatgcaactaccccatctgtttcatgttatattcagaccgtgtttagttccacgctaaaattagaagtttaaagaaattgaaacgatgtgatggaaaaattagaagtttgtgtgtgtagaaaagttcgatgtgacggaaaaattgaaagtttgaagaaaaaagttggaatctaaacagggcctcaatagtagtatctaactatctacatcattcaaataaaatattgttgcaaggtaaataaatgaacaaccatgtgccataatacaactattatattgacagattctttgacatgcttttcaaacttattatcaaaatatattcaatgtttcatttaatgaaactaatttggtgtataatgttaccaaatttttttataaacttgatcaaaaaaaaatcctaattagggcatcttcagggaaggctgaaacaaaataattatcatctatattgcctctatgttacaatgcttctccaagtgaccagcataaatgtcataaacaaacattacagtacatgacataaggaaaaggataaaaaaaattcaataaatatcacagcaagattaaaacatcacaaatcaactatatgcatcagcatcagaccatcagcatgcatggttaaatcttgatgataatttaacaaatgaacatcacatgcatcgtcgatcgttgcgctaactgaagataaatcattatactatttgacaaaaagttttttataatactagatattgatccaatttcttcaacacaagcttcatcttcaccttgtcgaacacagcgatcgtcctggttccttcctccaattccttgggtctcacctcgaacgccctcgtctcttgattatagacgctgacatactcggcgaactcgccttcctccggtggatcatcggcgaagattttctcccagacatgtgcccgccacagcctccgctcctcctgcagccgctgcgtctcctcgaactcgtcgacgtcgtactccacctcgacgaagccgttgctgccgtactcgacgcggaacttggcccaggatttgcccaggtggccttgaggatgccgttgacgtgcaccagcagcgcctccggctcgtcgtcgtagtagatctccgggaggtggtcctcgtcggcgtcggcgtcggggacgaatgggaatatgggatgtatctctcgatgtccggggcgtcgtcggtgcagagctctgtacggtcgaggacccactcgatcggcgttctcctgcgatagccgcatcgtcgccaccctcctcctcaccgccgccgccgccgtaccgtcggagttagggcacgcctcctgctggccatgctgctcgaccgccgccgccgccgcggccgccatgatttccccggctcgccgcggcgatacatttctgaacgaactcttagagccgtggcttatgtaaaataaaatgggccggtccgtacggttttcgggttaccggaaaccgaactagagttatcgctgcggccccctatccgtgtcactgcacgagcacgacgggggaactattctaatccctcgaggggatattccctcgtttactcaaaaaccatctaaacagttatgaaaaattctagaaaaatttgacaacatttatacaacacatatatataactccacaaaatcttaagtccaaactcaactcacacgtcgagatataaaaaaaagacaaattcagcgtatgaatagtaacgtactgtttatatataaatttgtcttttttgtttctcgatgtgtagatcgaatttgaacatgaattttggtggactagtaggtataattatactctacattgtcaattttttttagaatttttgacaactatttgcatcgaatttagaagaaaaaggtatatgaggggatatcccctcgagggattagaatccactcccgcacgacggcctcacgttggcatcttaaccgtcctcggccgatcggacggctccgcacacagggtcgctggataagaaaatagccgaaattttgacaaatgaccctttcaagaaacttaattaaagataaatcgtaccaaaaactaatttagaaaatgataaaccgtgacctcgacgtgctttaacgtctcgacgctgctataacgttcatgctgagatcttgttcgacgaggcacaaattcgtcggaggagctcgcattcaccttctgtacaatctgaaatcacgcccagtagcgttcccggtcgtaggcaagcgagggcgcaaaactgatcgccctgagagagcgagggcgatcgctcgcccagtagcattcccggtcgtaggcaagtcactcagtatcattccatcgtatcctctttttttttcttttttttttactttaatgcatataaaaccaaatgagaccaataaatacatgcagcttggtgattgcagcacacagcaatatggaatggacgcagcagtggtatgcgccactatacgccattggcaacactgtgcctccaccgtatctattcatccttaccaatgatccccactagattgagccatctcacctaggtctgagctttagcataaggcaaagttcaaaggcaatatatagcacttgagagttgggagattggtattatagggggctgctataggcaaatgaacacaagaaagtttgcaatttttcatggtacgaattgaacagcattgaaacctaacaagtgcatgcactgttaacaagagatgaaaaaatatgcaaaactttgtaatttcacagcgttcaggcactacataatttcacctatctttccttcaattaaatagctaaacttgtgatttttaaagagaaaaaaaaaacagaaaggactaaagaaagttcacttataattagctaattaaaacatctcatattgcatagatgggccagcagtactcaagattgatcgccgattaagatccaaaaagataatcccacaataacaagaaaacaatgacatacgcttgcataaggaaagagatttgcagaatgcattgaattatcattaatcttctaaaccatcattatctaacttataacaagtgacaagtaccaacatcgcaatacataagtctgcttcagcaaatgggaaacctattaggcactcgttgattcagttcttcttcacgaagacaaaacgcttcttctccttatcgaacacaggaaccccaatattaccttccacttccttcatgacaaacttcctcctcttctcatcgtacacttcgatgtaatcgccgaactcgccgtcctcgatcgtgggaagaatatcagccatctcctccgcgagcatctccgcccacaacgccctccgctcctccctcctatgctgcctctgctcgaagtggttgtggtcgtactccacctcgacgaaccccttctcctcgtgcttggcgcgcacccacttctcgaagtccctgaacttgtcgaactcgtccatgaggagactgtcgatgtaccgcatcagggccttggggttatcgtagtaggactccggcaggggatcctccgcgccggggacgccggaggggctctggaggaggaaggggatgtacctcgagatgtcgggcgcgtcgtcgccgcacagctccttccgggcgaggatccagtcgacgttttcctgcgacagccgcagcttcgccgtcgccgtcgccggaacctcctcgtgggaaccagttgccgccgcagccatatatacttgttctgactcgccggcggcacgcagagggaagtttcgatgcttggattgccacaaaagggaatctcgtcgtctcgttaacctaagcaagccctctcgattttggagattgtgggggggaggaggcggtgcggcgtgcaggtttatactggtggaccgctccgcccgcgtccgactcgaagttcatcgttgaaaccgaaccggatactgaaaaccgatcgataggtgaagtccgcgtccgtcaggtcatgggcctcacgggtttaacagaccaaacggagcgcataccattttccggacaacgaaacaaatacgatcggacacaaataggaaaatattttttttttcggaacgtaaaaaccaactcaacttttaaaaacaaatatcatcatatataattagctcattttatataaaatataatataatatataactttttaaaagtttaaatattattaatagtgtggactagcgttaacagatggactactattaaaatctaaaaaggtatattgaaggtcatatagttataaagaaatacggtatgtcttatggcttttttgatatccgaattattattcatatctaaggaaaccccgatatcttattcgtattgtatatgggagaaaatatatgtttttttatcagtatccgaactatccgagaattatccgtttcgaaagatatatgtattcgtttttattcggaacggacaaaactatccactccactttcatccctagctattgacaatgtacagtggcatgcctaaaactaacggtgatattgacaatgtacagtggcttgctatatttctacatctctatctctaactctactttttatcttccatcttctatcttctactattataaaaattaaaaatgtttttgctagtattttgatacgtcatcattgtttgagtcaactttttaagttctacaaatccatgtttgagttcgtttttaagttcgttcgcttttaaaaatacaaaagtagtcgtacaagaaatttctttaaaaaaaactcgcatgctaacttgagacgaaagttggactcctaactgcagctaatgattttctaaaaaaattatccaagtgaattctcatagtgaatttcaccctaactaaaccgtataacaataataaaattaaaatagccttcaccgttgcaacgcacatgtatttttttctatttaaaaaaatgacaacatttcatggcaactcgcatatatccttttggtccctaaagtttggccttaaggtcaatatggtcctcgatattttattttgtccgatcagatccttaaactttgtcatatggtccaatatgaaccttaggctcaccagaaatgccatgtagacatgctatgtcatcattttattaaaagtggattgtgaaatttttaatctgtatatttgtatttgtatgtgataataaatactataactaattaatcttatataattagataatttaatctaatcccaggaattgatatatacactaggtcttgttcgtttctccaacaagatggagatgaaattttggatactcgtgatatgcttttcaaactactaaacgttacgtttcgtgcgaaaacttcctatatgaaagttgctctaaaatgtcagattaatccattttccaagtttttaataattaaaactcaattaatcacacgttattatcacatcgttttacgtgaaacacttaatctttatctccatcttcatcttcaggagattcaaacaccaaatagattatgttacaagatggcatggcaacgtgattttttttttccaaggaccatagtagactgaaagataaactctgaggactagttcgaacaaaatgaaatatcaaggatcatattgacctcaaagcgaaagtttaacgactaaattggcgccccccccccaaaaaaaaaaataataataaaggggagggggatgagcgggtgtttgtacgtacctacatatgtacgtttgatggtgtatgtacataagtaaatgtggcccatgaccttatttattagaatgccagatggtaatttaggagtgtttataggaattacacaaggcagcacagggatgatttggctctgcccgtttcatccttctcaccgcattatccgattattggttatttagggaatatatgtcacgccccgaaatagtcccgaccggaactagcccgtgacgtttcaaattaacctgttaatcgataccagtcccaggaaacagtgctggtatcacagggagacagaatatcacagcaacagaggtctctttattatagagtaggagtacagtcatgttgggctacggacagatcccgagctcacaactgcattacaaaaggaaagcggaagccaggacttggaccaatcatcacaggcgcgacttgggaactaggccgaaaccctaaaactcatcgtagccggcttgctcctggaagaactcctcatcagcaagaatcgcttcatcttcttcagcaactgggggggattatttatacagagcaagggtgagtacgggggtactca

SEQ ID NO: 26645 - DNA, 16375 bp, Oryza sativa
acggcgcccgggaagcggctttgcgagcggggagctcgcgcaaggggagggggcgctcagcgcgggcgactcccgcgcacgcgcgagcagcgtgcgggcgaggctgagcgggggaaaggaaagagcgcgccggggggggagagagagagagagagagagagagagagcgcccgggagagagatgggccgagctggattcggcccatcgaacccgggggaggcaaactagacttttgcggaggaaattgatttggagggatttggattcggaattgaactcgacgattgatcggggattgagatcttgagatggcacggacactagacaacaaacaaagaaacaaatttcgcaattagggtttttaagagataattttcccgctaggcgccacgacggaacgggcgctacagaccaacccccctaacaagaatctcgaccccgagattcagcacctaagggagcagctccggaaactcggcgcggagaagatcttctcgttccctggttgcctcatcttcagaatgattgctccattggactttgtagaacttgatggtcttccttcgagtctgacgttctgcctcttcaagaaccttgatcggtctttccttgtaggtcagattcttttccagctcgatactacccaggggaacttgctcttctggaactcgaagacatttctttaactgggatacgtggaacacgttgtgcacatctgcgagaccttcaggtagctcaagctgataagccacttcgccacgtctggcggctatgaggtaggggccgatgtagcggggtgctaacttgccggacatcccaaaccttctcatacctcggaggggtgacacccgcaggtacacatgatctccttttttgaactcaaggtcacgtctccgattgtcagcgtaatttttctgacggttctgcgctgtcttcaagcgttctcggatcagcttaacttgttcttctgctgacttgagtatgtcaggaccgaataccagggcttcgcccacctcattccagcacaagggggtgcggcactttcttccgaacattgcctcatttggcgacatctgaatactagcctggtaactgttgttgtatgagaactcagcatacggcaaacaacgatcccaagtgccttcgaaatccaaggcacacgcacgcagcatgtcttctaggatttggtttaccctttctgtctgaccatcggtctgtggatggtaggccgtactaaaatttagatcagttccgagagtttcatgcaactgcttccagaaccttgaggtgaactgagtgcctcggtccgacacaattttcttgggacagccaaatctacatacgacatgagtcatgtagagttctgccagtttctttccatcataggtggttttcactggcacgaaatgagctgatttcgtgagtcggtccacgattacccaaatggagtcatacccgcagggggttcttggcaaaccggtgatgaaatccattccgatctcttcccatttccactcgggaattggtaggggttgtagcagaccagctggcctctggtgctctgccttgactctttggcaaatgtcacacaaggctacgtattctgcgacgtctcgcttcattccagcccaccagaagtatgccttgatatcttggtacatcttcgtacttcctggatgaatggagtaggcggactcatgagcttcctttaggatgagatctcttaactccttcttggccggtacacagatgcgtggaccgcaccaaactgtgccttgttcgtctatggagaaattggtgtctttcttctcccgtattctttttattaactcttttatcccttcgtcatctttctgggcctcccggatttgtgattctagggtaggctgtactgtcaagctggcagggacacctgactgtaccacggtcagccttaacttctccaattctctgcacaggtgatcttggttaggccgtgtttgggctacattgcaataggccttgcgacttagcgcatcagcgaccacgttagctttaccgggatgataatgaattcccagatcgtaatccttgattagttccaaccatcttctctgtctcatatttaactcggtctgtgtgaagatatacttaagacttttgtgatcggtgtatacttcacatctgttcccgattaaataatgcctccagatcttaagagcatgaaccatggctgccaactcgagatcatgggtgggataattgacttcatgaggcctgagctgcctggatgcgtaggccacaacctttcgttcttgcattaggacacatcctaagccttgtcttgatgcgtcacagaagatctcgaaatcttttcggatatctggcaaggtgagaactggtgcagtggtcaaccttttcttcatttcttgaaagctgtcttcacaggctgcagaccattgaaatttcttttctttctttaacagctcggtcataggtctggctagcttagagaatccttcaatgaatcttcgataatatcccgctaagccaaggaagctgcggatctctgacacgttcttgggcgggttccaagcaagtacagcttcaaccttgctgggatctacttcgacaccgttggaggaaatcacgtgtccaagaaatgctactcggtccaaccagaattcgcatttctagaatttagcgaatagttgatgatctctgagcttttccattatcagcctcaggtgttcagcatgttcttcctcgttcttggagtatatcaggatgtcatcgatgaacaccacgacaaactggtccaggtattccatgaagattttgttcattaagttcatgaagaacgctggagcattggtgagtccgaaggacattactgtgaactcgtatagaccataacgcgttgagaaagcggtcttcggaatatcttcagatctgattttcaattggtggtaacctgacctcaagtcaatttttgagaagactcttgctcctttaagttgatcgaataaatcgtcaatccgtggcaacgggtacttgttctttatagttacttcattcagggctctatagtcgattaccattctctcagagccatcctttttcttaaccagaagcactggggctccccaaggggatgagctaggtcgcacataacctttactctccaactcttcgatttgtcttttgacttctgctaactcattagctgccattcggtagggtatttatgcaattggagttgtgcctggtaccagttctatggcgaactcaatctctcggtctggtggcatactcgttaattcttctggaaatacgtcaggatattcactgactatgggcaccgactccaaggaggtgacttgcaaacaggttaggatagaccgacttgcggtaggggtgttaggggtaaagcggacttgctttcctccaggtccttgcaaggtgatggacttttcggcacaatctatctgtcctttgtgcttagccaaccaatccatccctaggatgatgtccaagctttgcgagtctaggactatcggtttggctaggaagtcaacttcctcaattctaaggttaacttccgggcatatttgaattgcccttatattcctcccaggggaatgtactatcattggtacacgcaaattttgggttttccaaccgtttcttttcacaaaagcttgtgatatgaaagaatgggaagctcctgaatcaaatagaactattgcgggtacggagttgacagagaacatacccatcacaacgtctggagcatcctgagcggtttcagcttgaatgtgattcacacgtcctcgaccaaagtggttggaagcacgagaaccttgtccacttgcctgagagctaggacgagactgagctgccgctggagtaggagttctggcggtgctgccattagcatgccctgagttggtgttggcaggattctgaggacactgtctagcatagtgacccatctggttgcaccggaaacactgaactgctgacggtccctgtggtgacttgaaagaggtaacactgtttggcgcagtattgccactaggggcacgctgctgtggcggaggtgccggacggtttatctgaggacgaggggcgtagcctggctggcggttagtttgagtgatcgactggtggtattgcatgggttgaccgtagcgagggcgaggtgcgcctcgggaagaatttccctgatggttagacttgcgtttcttgtattcttcggtagcctcttttctggcatcctcaagcagaagtgccttgttgatcatatgttgaaaagtggggaagtcatgagcaagcaactggagtctcattccaactgcgattcccttcaagaatttcctgatcttcttcttatcggtgtctacttcctcaggggcgtaccgagccaacttgttgaactgacttaggtactcattgacactgttgttgccttgcttaagtctgttgaattcttctttcttcatgtcaatagtgctttcaggcacatgagctgcacggaaagccgtagcaaactcatcccaagcaatgttattgggttcaggatgtgcattgcagtaattttcccaccaatctgcggcaggtcctcttagctggtgagaggcgtagagcgtcttctcaacaggagtacactgcactaagttgagttttctatcaacatctttcaaccaatcgtcagcctcgacgggctcgacggtctgagagaactctggcggacgtgacctcagaaagtctgtcagcttggatctattgttgcccacgtgagggtggccatgcacattatgctgaaaactggctatggctgtggttagtccttgcaagatttgtgtctgaactgccattatgtgttgcatgttgttttccacatgaggtggggaagggaggcgttcttctccagaattgtgactgacagtgcagtgagagaggtgagactgctccatctctgcatcacgggaaactgtgcgatgcgagcggctgctgcggcggggttgctcaacctctgcgttgcgggaaacagtacggtgcgaacggttgctgcggtgagactgctcattagctgattcatgatttgcttctgcttcaactctaccatcttcaaaaccaaagcgggctggtgcacgagctgcacggcgggggcggctagccatctaaactcccagaaaagggcggggtaagagtcagataagcacttaggagggcaaggagcaaagcaaatagcaactcagatagcacacactaggcacaactggatttttcaaatcataaaaacacctgatacaacgggtgtggacaagtcacagagctacgccgagcttgactgtgcgcacaccacctaggagaaccagactaccaaacaacacccacaacaaacacacgcacgcgctacctcgccacgactccaaaagagttggcggcggaacaaaagggcctaacacacggacggctgctgaagactgcctcctctactcctcgtcggcctggctgccccctgtagtcggctcctcagtcgaagaaacgtcgatcggctggcgcgaagggaccggcggaacctgtcgagggccggcagcagcacgggccgctggcggtgggggagctgggtggcggaaacggaacacggtggaagaaccaacaacacgcttccgtgcagtgcggataaagcgtgggccacggcgggaggaagcaactggagtgtgtccgggggtgtaggaagggctaactgggtgtgggtagggggagtacactggtgagtacggcgcacgcgagctgggggagcgcgggccactgggagtgcgagcagagccgcgggagctatgggaggacaggtggctggcgtggcagaggcggcctgagtcccaagagatagtgtcaactgaggtgacaccctcctcggccagacgggcctccaaagtggcgtagcggcgggcaagggagcggtaagcctcaaggagtaggtcgtgctgagtggcctgagcctccgaaagctcgaccatgcgagtcagcactggctgagactcgctgtacggacaagggtacctggcgtctgagtggccagaaggaaggcgtggaagctgccggaaggcggaacctccgagacggtggctgtagtcgtgggccaggcgacgaagcgcattccaggagaggtcctggtacgcgatctggagagtgggcctggccacagtgaagtggtgggggcgaaggccagctccgtgtatacctccacgagggtaaaggtacacagagagctcacagtgagggggaacacggtccacggagtaccccgtgtactcgggacacgagaagccaaggaaacgggcgaggtcacgaagctgggcgacgtggtgaccctcaccaaaaccgtgggaactgaagctggcgttcacttccatctacaattttgaaagagggagaaagatcagtaaccattttagaaacaaactattgaaaataaagaaaacaaaagaaaccttagcttttcgcaagtagttttgaacttagtatccttagggtcgtcctaagcgtcgggtttcgccctagggccaagcctgtgctctgataccatctcttgtcacgccccgaaatagtcccgaccggaactagcccgtgacgtttcaaattaacctgttaatcgataccagtcctaggaaacagtgctggtatcacagggagacagaatatcacagcaacagaggtctctttattatagagtaggagtacagtcatgttgggctacggacagatcccgagctcacaactgcattacaaaaggaaagcggaagccaggacttggaccaatcatcacaggcgcgacttgggaactaggccgaaaccctaaaactcatcgtagccggcttgctcctggaagaactcctcatcagcaggatccgcttcatcttcttcagcaactgggggggattatttatacagagcaagggtgagtatgggggtactcagcaagccaggggaaataagtgtttaatgcaggcttcaaggagaggctgttgtttttgcaattgattttatttgaactccttttttctaaaaacgactaagtgagtgcttctcaaacgacacggatgagacagtgcgtcttgtccggtcggagtatgtgcaatgtatcagtctttagatttgaaacaagattggcacccggccaacagcttttcaaacggccacccgggccaacaacttttcaaacggccacccgggcctagctgatcccgtcagctgctgatttttcaaacatcgaacccattttctcaacagcaaattcacaagcggtagtcaaacaaaactacgctaggaatcacctcacatccgcccatgaccgtgggcacggctgttcgaacagtttgttaacctctgcagagggggtacactttacccacacgacattactaacccggatcacccagcccgtggggatcagccacgtcgggagacctccaagctttcatggcaaggcatttcgaaagccgatacaggtttaccatatgccgacgagaggggtcccagaccaacaacaggttaggtcccagaccatactgtgccaggaagcccaggggtcctccccgacaccaccccggcgaatccacatgtctctcggcatcaaggctcccctgataagctagttactcagccaggggtgtcccattccacccatgtggtcgtacttgtcttatgttcggatgaaattccaaggaaacggtccttaggtgcaagagcgggaaaccgtacacccggtacgttccccggtccgcggttttggaaatccatttagttcacaagcaccgacccaggtgtcgggttttccaagtcttttgtaaaactccagttttacctaggttgttactcagattttaagtttgaaggcgaccgtcgatactcgcacagagtgcacgaatatcgaggcgcaactgggtggttacaaggggacatggtatggcaattaacaatggaaggatcaaatgcaacaagtcaggtaggtccaccaatctgccttgcagatgggacaaaagattaagtgcggtcctatcaatgcataatatttttcaagcaatataattaaatttcaatgataggctcaagatgttcaaaggtggcttgccttgctcgagatctggagcttgatcctcgaaatcctcgcactgcgggtcttcgggctctgaatctacacgcgaaacggaacgactcaacaaacggcgaaaataaagccctattaatgacctctaagcgtgccattagatagatctcgagatttgatgaattttggaagttgaacggagtcaaacggagtcacggttgggaagatattgaatttctaagattattggatttttggtctaaaggaaaaaggatttaattaaatcctttttggaaaagaaaaagaaaagaagggagggagggaatatagacttttctcgggcggctagggtgcggcccaagagatttggggcggctcggccgagcttaacgggccggccggcccaagacggcccaagcgcgcgcgcgcgcgggagggaggagagagagtccggtggaccgggctcaccacgcgtggccccgggtgggacccgcttgtcagcggctcggctcaccgtgcggagggagcacgcggcgcacgtgcgcgggcggggaggaacgcggtgcacgcgcgcggtccgcggcggacgcaggtgcggcgggcccatgcgcagcctcacggcttgcggtggaacgcgcgcacgcggagggaccgaccggggtcggcccgacccggtctgggctgagctggcgccgacgtggcgcctacatggccgccacgcgggccggcgggaggtagacgacgatccggccgcgaatggacggcgggcggcggcggcgagcggcggagcgaaccacggtgatacgggcaaaagcgagcacaccgggcggttacacgagacgaggggagacgaaccaacggctcggatttgccgggggttgctcgacggcggcggattgcggcggtggcaaccggcggcgggagaagagggaaacggcgacgaggccacgagaggtcgattcccggcggtgagagcatctacgcggcttcgggaactcgatgctagcgtcggattgggcggaactacgccgagcgaggccggcgacgagcgggtgatacggagctcgggcggcgacggcggcgagcacgcagcgagcgacggcaacggtcggggcggcgccggctaactacgggaaggctactcaagctactaccgaaagctaggggaaggagatggagcgatgaggaagaacggagagagacatcaccgagaagaggaggggcgctgtgatgagaggccgacggcgcgggagtaatctctccggcctcgggccggggaagaggaaggagagggtgcggccggagtcctcttccgcgtccttgctcgtgccggcagagggaggaggggcgcggctccgtcccttggcggcttgcgcgcggagtggcgggggccgggcgatgacgacggtgatgacgggggggcggcttggagcggggcggcgacaccggcgactggcgcgcgcagaggctgacggcggcggcgaccgggcggtcggccactcggctcgcgcgcgcggcttgcaatgggcggcgtccgcgcgggcgcgcgcacgcgaacacggcgcgcgggaagcggctttgcgagcggggagctcgcgcgaggggagggggcgctcggcgcgggcgactcccgcgcatgcgcgagcagcgtgcgggcgaggctgagcgggggaaaggaaagagcgcgccggggggggagagagagagagagagagagagagagagcgcccgggagagagatgggccgagctggattcggcccatcgaacccgggggaggcaaactagacttttgcggaggaaattgatttggagggatttggattcggaattgaactcgacgattgatcggggattgagatcttgagatggcacggacactagacaacaaacaaagaaacaaatttcgcaattagggtttttaagagataattttcccgctaggcgccacgacggaacgggcgctacaatatatgattataaaaaataataagctgaaaatttgtttttttagataatggaatgaaacatcccggcctttactccaaagagctacagccaattattacaaaaagtaacacacttataaaatcttaattcgagatgaaactatcaaaccaaccaaaattaaaagaaagacctaacatgacaaggaaaacattattccagcctattagaaaatctccatccatggttggcaaaaagttgcataaccgttgactcaagagtacgacatgcaacattcaggaaaactccatcttcctcacacttttgtagttgagcccacaaccgaagccaatatgttgccctgaaaattacttgcatataggaaatagatggtgatttgtcaaaaaccctatcatttctacacaaccacagagcccaacataaagcagaggcaccaacaagtatcaactttctcttgtccttgtccacaccctgaagccaaccattaaacatatgaggtatgcttctaggaaaatgtaatccaaaagaaaattgaacagctctccaaataaactttgcataatgacaatccataaacaaatgctggatcgtctcatttttcatgcaaaaacaacatattaaacccccattccaattccgtcgtgcaagattatcctttgttaagatgactcccttaagcaaataccacataaagatcttgatcttaagcggcatcttaagcttccaaatgaacttatttctatcaatgtaaccattgctaattaaggctaagtacattcactttactgaaaaatgtctattttgatgataattccatctaaagcaatcagcagaatcatccaactggatatgagcaatggaagcacacaaattataccaaagtgttagattatgtccaactaaagctctcctaaaagaaacatttagtggaacagaacccataacactagcaatagaggcactcttccttctaacaatagcatataaagatggatacttgtctttaaaggctatataagctgaaaatttgtaaagcagatcaagtgatcaactgaatgtctgaatcccatcgtttgcccttttggttatccatcgcaatcaaaattaaattttaatttttttttgaatttatttcaagcttttttagttacagtgtttttttcatcgttgacttttaaattatttgaatggtcgttgaccatagtttttttttttaccaacctcgatcattccgaacatgtccctgtgataacgtcggaaacttgtgcgacggatcagcatgcatgagccggtttccgtcgcacttgtgctcacctcatcactggtcgcgtggatcaaggagttcggagttttattctccgaatccctttcaccgcctcatcgaggcctcgccggagcgccgccgcatcgtgcgtctcctggttaggagccctcgtctccggcggatgcgtgcgcacacgaggagcagccaccgccacaccggcgtgagcactgcggcaggatctcgacacagccatgagctgatcgcagcgctcgcaggtgaggtcagaagaatgcatcaggaatatctcatcgtgatctgatcatagcagattaaaacatgtcgatgtcaaagatttttttttgggtgctcgtgtatttcagccccgtggccttgtgttggtgcggtttttcggctcatctaagccgcacaggacggatctaacggccgcgagacatctcaaatcaaatgggttcggagttttgttctccgagccccgtctcgcccccgcgcctcatgcacacctcgccctgggcgcgcacgcagtacgtcccagcggcatgagcaggcaggcagccgcggcgcgagtgatctcgatcgcgtcgtggccgccttcgttggtccaaatgcgacggggaacgtgcgctgcgatccacgccacgacgcacgccgcgccgctcgcgggcgagggatctatgctatgccgggcgtcagtgcaagcgaagcgatcgaaggtcttccggcctaaacaccagcgatgacgagcatgatggcgtcaatgcttgctcgctgcttgatctgggccgcctgtgctgccgtcccatcgtggtcacgtcggaaacttgtgccacggaatgatcgatgatcagcatgagccgggcttccgtcgcgtggatccaaaggtgttcggagttttttgttttttctacgaacccaccttcaaccgcctcatcaaggcctcgtccgagcgccgccgctgcatcgtgcatctcttggttcggaaccctcgtctctggcggacgcgtacgcacacgaggtgtaggatcggacacaagtaaccaagcctattaagggggggtgaatggtagggaaaaccaaatacctaaaaacttttagcggaaataaaagttaccctcaaatcgatggaaatctcgacgtagtcctgtcgccgccgcgggttgaaccgcttgcacgccgccggtcgaaccgcttgcacgccgccggtcgaaccgccgaacccgatgaaacacaaatcaaagaactcttaaagtagatgacaactttattacttctctgtatttacaaagtgcacgaacagcactccttacaaaaatctcgactaaactcgaaaccctaactaaactagcaactcaattgctctcaaaagcgataccgggaagcctcacgctccccctctatttatacataaaaaacctcctactcaaagtaggtgtagaactcctattcacaatagaactcaataactcaatttcctttttctcgaaaactacagccgcgccgcaccgaagtcggactcctcctgccgtcgcagcgaaactccagccgccaaccgagccggactcggtctctgtgttgtgcctcccaggccaactgccaatcggacatgcaagcccacgtgctgacgtgcatagccttccatccaatctcagcacacagccacacatgcatgtactaaacacacgtgtacagcacacagccacacatgcatgatcaacatacatgcatcgataccatccatatgcatgctacagtaccacgtgtactgtagcaccatatacccttttctcgatttctcactccaatctccttcgcgaacaccggcacttgcacgcacacctcgtgaagcccgttgtaaagatctctcccacatggtgtccatccaccgtgtgccatctcatatccaacttcgtcacccggtattcttgaccgtctggacctcaactcctccctgagtttagttccgatccccaccgttgaccgaagttgacctccaagaatccagactctagtcaccttctcacatggtatcccgaccgcactagacctctgctcctccctgagcatagtcccggtcctcaccattgaccaaggctgacctcaagtcacctgcacacaatcagacaaaacaaccgtttctgggcacagatatcacaacctgacccacattagtcacacgcactcacaccaacatccacacatctctcaaaccaattctttgataaaatcatttgcacagccaattgttcatcataaatattaattatgacaatgatttaacacgaggatcgagcaggaaacccaagccggcgtaccgaaagaggcactctagcatggcaatcccgtcagcgagcgatacacgccgcggcgccacgcgcgcgcgcgcgcgacagcccggttcgcgccctgagcgcgcacgcagtacgtcgcagcggcatgatcgccgtggtgcagctcgccgtggcacagcccaaccgcccaaataaaccagacggccagatcgacgaggaacgcacgccgcgacgacggacgaacgccacagtaagcatagtagcaaccaatcaagaattgcagctaactggtagtaacaacattcacatggatgactatatgcgacccaagatttgcctctgctcatttcatccttctcactgccgattagtatattggccgttcctctatttagggaatatacatgattaaaagaagaagctgcaaatggaggaaacaattttgatccctcgagagaatgtcgctcgtttgtttaaagccatccaaacaattactatgaaaaattctaaaaaaaaattgatagcactcatacaatataagtatgagccggtttctgcaatcgcacactgtgctcatctgggccgtggcagatcaatggacgcagtgggttccgagagacgcatcgtgcgttccctgcttcgatcggaaccctcatctccggcgggcgctggtacgcgaggagccacccacgcgcgcggccaccgacacgcgccggcatacaggaagaagcaccaaccctgctggctgctgccgtcatggtgatcctgtcagcgagtgatgtgaacctgattctcgccacgccacgtcaagccgcgcacgcccatgacagccggattcgcgaccatgctcaggcaggctcgcgccatgatcccatgagcacgcagccgcgcaacgtgcaagatcgcacaccctgacaaggaacgctacgacgaaccgccacgcgccgacgacgacgacgcacgccgcggtactggcgtccagaacaacgctcttctcgacccacacaaacgagaacgatggcgtcaatgcctctgcccgtacgttttactcagtaagaacaccacagccatgcctctgcccgtgccaccgtctccatcgtggcctcgccctgcgacggttcaacatgagccggtttcccctcgcattttgtgctcagctcatcactggtggcgtagatccaagggcgttaggagttttgttcgccgaacccctttcaccgcctcatcaaggcctcgccggagcacctccgcgtcgtgcgtctcctggttcagaaaccctcgtctcccgcagacgggcgtacacatgcacacgaggagcacccacgcccacgcagccacggccacaccggcgtacaggaagaaagcacactagcatggcgtacgacagtcgacagccggttcaaccgcacaaatagaccagacggccagacgaggaacgcacgctgcgacgacggacgaatgcaacaatgaactattagtactagcaaccaatcaagaattgcggctaactgcttcttgaacaccagagacaacgagcttaatctgatgccgtcaatgaccgccgcttgatcagctgcgcacaaaagcctgatcgagccccaaggggggttcgtagctagtttaaaacgccgaaccccatgttttccttttttactaggcaagaacgccaccaccggcctctgaccgtgccacgccggtgcacccgagtgctgccgtcgcatctgttaagaattggttggattgccacgtttccaatcaaacccaagccagcacaagaagcatcacatatcagcaggagcagcagaagctagcacttggagacgatcgaacagaagaaagctaacgcaacggacggagaagctatgccgggcgccatcacaaacaaggtccgcgtcacggtcacggtaacaccggtatacaggaagaaagcacactggcacgtgcacgcatgcacgatgcatgatcacgcggcatctcccacataaccatgaactgattactcctatatccgttccaaaaaccctggaaagggacagatcgcaggcatagttattagaccggaccggtgatcaaaccggtaaggcactcgggtcattggtttattgctcggaccggtcaaaccgccggtttaaacgggttcaaatagatgtttgttatattggtttcacaacaagccgcatagactagtggtggaggctctccatggaagcatggaggttttgggttcgaatcacaagttctgcagctttttccgtatttctctccaacttcacgtgatgcgacgcgttccagcggtcgaaccacaccggtttttgtccggttctgcagtaaaccgcccggttcaaccggtttctcgccggtttgattgcagaccgatcttttagctggaccggaccggccggcgccctggttctagttttttctggtcggaccgctggtccagtccagttctaataactatgatcgcaagtcagaatgcatattagaacattaaaaagatctcgtcctgatctgatgataagttcataactgattctggtaagagtttccatattagaacatcaaagatttttggtgcttgtgcgttcactgttcagacgacggggaagggcgatacggagatgaggggtgtagaggaagtggggcaggcggccggacaaggtgaggaaggcggtgacggaggagtttccctgccgtggaacccgccgaagctccatcgccggtagtgccgccttgcct

SEQ ID NO: 26646 - DNA, 516 bp, Oryza sativa
cttactatgtaataggaaaaattgacatgtcagctctgagcatcactgaattttataggtagatgtggagacctcttggattttctcagtgtatagaaagttgtcccaaaacataaccttcttccctatttcctaagtgtgtttgttcgttcgttgggggtgggtgtggggaagcatttttttttttgttttttgagacggagtttcactctgttgcccaggctggagtgcagtggtgcaatcttggctcactgcaacctctgcctcccaggttcaagtgattctcctgcctcagcctccgagtaactgggactacagtcacgtgccaccacacctggctaattttttgtacttttttagtagagacgaggtttcaccgtgttagccaggatggtcttgatctcctgacctcgtgatctgcccgcctcagcctcccaaagggctgggattacagagccaccgcgcctggttgagccttttttttttttttttaaatagtgcttactctttttttca

SEQ ID NO: 26647 - DNA, 13430 bp, Oryza sativa
cccccctcccctccctccctccctccctccctccctcccaatgatactactagtgttttcgcttgatttaaatgcctttacgttttcatatgagcacatattgctcctcctctcgtaattaaccatatggcatccactattgacaaatagtactcccattttgtcttagtataatagtagtatcatatgagcacatagtgtgtgtcttagtgtgagcacatattgctcctcctctcgtaattaaccaattaactctagtatcatagtgtgtcttagtgtgaaataagatgggagtgtagctactctaaaaatagagtaaatatgacctgtttaacttacttccattttcagagtatcatttgactgagcctggtattgataagtgcttctagatgctatgatggcaaatcaactgtacattttagtttcatttgtggtatgttttattgcatactcagctaaaaaattgtattgctgaagcacttcagtgtggtattttgggtagattatgtgcattttttgctcatgttggagctttgggttatagaattcatcagattgcagattacagatctgatagagcaatctgtcaccgtattgtcaggtcttcaattgctatagtccttacaaccaattttctttggttaatacactgctattttcccatttgtgtattgaaggttctaaactaaggcatatatataatttctattaaccctagtttggattggattggacaaaaataatatagtcagcctggatcactatttgctagtatccgaagctccaatgcacaaaatgcaagcaaaccaaaaagaaggaagaaaaaaaccccgataagcaacagaggttcaaattcagccctcatcaccataatcaacactttcgcgatccacattacccacttgctgtcacacttcttcaacttgcaaaggcacttaaaagctgcatcaatagatcagtagataagcaacttcatatggtgatcgattagcagctctttttgacaacaatgccaccacaccaccttccatgtgtgatccttcattctccatttaatgatctctcaattcctggcagctacctggagctcaggcctaaagaaatttccaaaatgtgttgccatcgatagttggtggagctaccgcaccaattagcttcaatcttgaagttatgctatttttcttcatacagctactctacagcttgtagtctttatattgttgaaatggatgaccaaacagtattgcgctgccagtgatatgctcaatctccgtacttctcttagccctggctgtatttaagatcaaggaggatagacttagacaatgcctctgccactgttgggtgccgcctaaatgacagtaggtatcatgcaaaatgaaccctgacatcaagtgccacttgaatgctccaaaaaaaactccttccttcaaccttgtttaaaagaatacattagacatggaaacaacctgttgaagctctgcaaacattagcagttacaaacggattagttcactcatagcattcgatcacttgagatgtttctgcactaatgaaattaatcgcttactgcatcctttgttgagtatgctgttttggactaaaaaaagttagtagtcgttcctagctttatgctgattgttttatgaatgctgtaccataatagtaggcattctaactttccgaactgatctctatgttcttgccctgatacttgacagacatccttcacatcttctcatatctcccaagagatctgaattttattgagcacacaagcaatattggttggagggagtaagaacacttttctgccatgtgtttctgaacctttctgatattttcttcattatgattgtttctggttgcatgtgcaggtaccaaagggcgagaccaattattgtagatccagcattgcagatctcaaataaaactgaggttgtgacaacaaaggagaaaaggagcttgccttcagctttcaaaatatttgtaggtattgcctcatccttgttttctacttaggaaatttcatatattctgtactagttatctgcaacattttactgttgcctatgttgatatgttccctcttttcaaaatataatcttttcgagcacagtactgatagattcttccatatttttatggtgtatattagaaataacaatttcaatgttagctgcgttttttgcgcactttatagataatatattatatatcacatttcaatcataaaattacatctagaggttgtataaccagcaagctcaggctttgtttagatcccaaaaaattttggccaaaaacgtcacatcaaatgtttggacacatgcatggggcattaaatgtggggaaaaaacaccaattgcacaatttgcatgtaaattgcgagacgaatcttttgagcctaattacgccatggtttgacaatatgatgctacagtaaacttttgctaatgacggattaattaggcttaataaattcgtctcgcagtttacatgcggaatttgtaatttgttttgttattagtttacgtttaatacttcaaatgtgtgtccgtatacttaaaaactttacacccgaagaactaaacacaccctcattcatgaaggtaaagtagttttttgcataattggtggtacttttatgtcagagtgtcagacatagaagacttgtaaaaggggtgattgtgcaaactatttcaaaaatatgatcatacagagatctaaatagagaattcctcgacaactgaactaacaggacacattgcattcttggtcagcctttgagacaagcagcatacggaattctggctctactagattgattattctgtctacctcagatatatatgggataggaccataatgcatcccatttctttaccatttggacagctatcatcgcagttgcacatttgggtgacatctgcattatatacagatgcctgtattttgactatcaacattctgttggattatttaaaatgctcgatatattgcttaattcacagtccactcagcacagtcaatgggcaattttatcatctgtagagttgagctctaacctgtaatgtttctcctgacgcaggctcttcatgggtaatacttagccgatcattcctggaattttgcttattgggatgggacaaccttcctcgcactctactcatgtattttgccaacttcttggcatcctcggagggctacttccacacggtgatctgcaactcaaagtactatcagaacactaccgttaataatgatctccgattcatggcatgggacaaccctccacgaacattacctgttaacctgacaaccgagcattttgacgcaatcgcaagcagcggtgcaccatttgcacactcctttgccaatgacaatccagtcctggatatgatcgacaccaagctgttgaggagagcacctgaacgattcacacctggtggatggtgcttaggtagctcggtaaatgacaaagatccatgttccttcttcggaaggtcttttgttctgaggccgacgaaaagttcggcaaagttagagaaattgctgttgaaacttttggaacctgataatttcaggtctaaacagtgtatataacacattcttgttacatgtagccttgtagccagttgtagaattttgatagtgttcagaggcaagtgtgaccggaggtggagatggtttctcattgttgcggctgtaggcacacagtgacacagcgtgtcgttgtacatttgcaactggaaggtcaagtaaagtgactgaaatcatacatttacacaaaattttcatctctttcatggatacgaatacgctgcacaatgtgccatggaatcaggtaccccagttacagtggagtcaggccgagttatgggcttgcggctgaatttttcgtgtaaaaaaaaagggtaaaaaaaaaaagaaacgcctaccgagtaccgactgttgatttcgtgaatccttttaatgcagcctcgtagaacgccaatgttcgcttcacctcccaattgcagttcacacttgtgtgtatgctagcaaaatggcttcccgccttcctctgattaaaactgcatgtatatctgtataaatgcggcacaatcccctgtactgatcagcgatcacccaagcaacttctcggctctctccctcggagaagatggggtttctgccgggcgacgacgacgggccggcggtcggcatcgacctcgggacgacgtactcgtgcgtggccgtgtggcggcgcggccgcgtggaggtgatccccaacgaccagggcaacctcaccacgccgtcctgcgtcgccttcaccgacacctggcgcctcatcggcgacgccgccttgaaccaggccgccatgaatcccctcaacaccatcttcggtgagaactcgaactcccttatttgccataatgccatccatcccagtaccaaacgctagtaactactgtaactagtaagtacttgtttagcactattccttttaatttgtagaacaaacatagaaaagtttagactcaatcctatataaaaaaaagtcctataaaatttttgaaatcatattcattctttgaatctatctatctatctatctattctattatattattaaaacagctttgaaagaatgcaccacgtccgctgtggaggctagaaattcccacattaatcggggaaaaagaaaaaatctacaccgttagatcataacatatctagactacaagggttgagatttaatcacaatatatgtaaaagcttgactctttgattctgtttttatgaatcggacacgtgaaagagcgtggagttagattttgatgtgtgctacgcagcagcctttgaaatcaaaatcaaattaggaaacttaatttactgacaggagacaaacacgtcatgtctgcatagctaaattagaaataataaatatgcacaactgacacgtcctgtacaaaatcatatgtaggggagataaaacaactgggcatccgaactccttcaaccacatttaagttttgctctatcgcataatctttagagacggtatgttttttagaaaaaataaattctactccctccatctacttttgatagtcatattttcaaatctgaaaattctatttttgataggcatatttcaattcaacaacctatcatcttaatgactttctcggatttgatgcatgactctccattcttccacacaagattggctacttgagcatcgtgaaatgtaaatattaatgaatcgcttgtttacgaggaatgactagtagcatgtttaaatggatgataagtagaattacttatcattggtctgtgtgccaagatgaaatatgactatcaaaagtagatggagggagcaagtaacaagattcccaatagctttctctatatttagggtccatatgttatagctcatactccgagaatggggcagagctgagaagcgggcggaaatcaccatattaattaaaaaagtgaagtatttaaaggatctagattttaatggtgcatattgattgatataattatatacaaataaaatattctatctattatcttaataaagtaatgtaaaaaaagtctctaagtttgctctcgagacttacaaattctcagattaaaaaaaatctaaatagtttgatcatggtcatgcctataaagaagtagagtggtgacggttgatgggaattctaaaaattaaaaacaaaccaaatagaatcccaatgaggattaagaggagggacgacagatagaccgttaagcagtatggttatagcagttggttggacttatagaaagtaaaaaataaacctaatgataatcatgtacaatttttaaaatatcaaaaacaataaggagaggaggcaccaggcgagccgtagatgagtacattggcaaagccattgacggtttggcagaacttctagaaagtaaaagctgaaccaacacgataattatgttcgttttttaaaaccctaatgataataaagagatgaggcagtgggtgccccatagagaagtacagtggcggtgtttaacaggactttaaaaattatggaagagttcatgcaggaatacaatttataaataaaaaatgctagaatgaaaaatatggaattttcaaaaaaaaaaagaggacaatctagaatacaacaatgacaaacgataataaaaatgagaagcaacatgcctataaagtagtagagatgatggttgatgggacatctagaaattataaacaaaactccaaatagaatcccaattaagattaagaggaggaacacagacatgtcgttaagtagaacgttcacaatggttgagaggaggcagcgggcgagccataaaagagtacgatttggcaggacttctagaaagtaaaaaaacaaaccccaatgataatcatgtataatctttaaaatatcaataataacaaagaggggaagcaacggacgaaccatagaagagtacattggcaaagccgctgaaggtttggcgggacttctagataattatgttcgatttttaaaatctcaatgttaataaagagaggaggcaataaacgggctgtagaggagtacagtggcatcgtttgacgggacttctagataattatgttcgacttttaaaatctcaatgttaataaagagaggaggcagtggacgaaccgtagagcatagaggagtacagtagcagtgtttgacgagacttctaaatattgtaaaaatgaaacctaacaagccaacaaactctaaaaactataaggtataatttttaagttttcaaggagaataaatagaaacaatggtagatcgagcaagcaaataacggagatatgccaaaggagtgagtggtagcgactggcgtgacttttataaactataaaagtagaaacaccgggatgataaggttcagtccaaagtcttaagataacgagataactatttgacaaattttaagtaaaatcatatgtaaaaaatagataattttgtatggatgctagccgcgcaattgcgcgggccacccagctagttcctatataatggataatcttatagatattttagaagaaaattagcgagagctccatcctcatgaaaaaactagtcgtgtttttttttctatttaaacaattattcttgtatttttaacgagttttgcaatcttctatttcgtacttgtgatttttgtaaaaatgttgtgtttttgaatcgattgatttcttgtagatgcgaagcgattgatcggccggcgattcagcgacgtgtccgtgcagggagatatcaagctatggcctttcaaggtcacctccggcaaggacgaccggccgatgatcgtggtgcagtacaggggcgaggagaaggagttctccgccgaggagatctccgccatggtgctcttcaagatgaaggagaccgccgaggcctacctcgacaagacggtcgagaaggccgtcatcaccgtgccggtctacttcaacgactcccagcgccaggccaccatggacgccggcgccgtcgccggcctcgacgtcctgcgcatcatcaacgagcccaccgccgccgccgtcgcctacggcctcgacaaggtggtcggcagcagcgacaagaagaagagagtgctgatatttgacctcggcggcggcaccctggacgtgtccgtcctcaacatcgaccccggggtggacatcgacataggcatcttcgaggtgaaggccaccgccggcgacacccacctcggcggcgaggatttcaatggcaggatggtgaagcacctggttcgggagttcctgaggaagtacaagaggccggagatcaggggcgaccagagggcgctccggcggctgaggacggcgtgcgagaaggcgaagaggatgctgtcctccacggcgcagaccaccatcgagatcgactcgctccacggcggcgtcgacttccacgcgaccgtcacacgggccaagttcgaggagctcaacatggacctcttcctcgagtgcatggacaccgtcaagcagtgcctccgcgacgccgggacggacaagggcaccgtcgacgacgtcgtgctcgtcggaggctccacccgcatccccaaggtgcggagcctgctccaggacctgttcgacggcaaggcgctctgcaggagcatcaaccccgacgaggccgtcgcgcacggcgccgccgtcaaggccgccctcctcaacggcgacgccaacgagaaggaccttcgcgacgtggtccttctcgacgtcacgccgctgtcgctcgggatagaggtattcggtggcgggatgtcggtgttgatcccgaggaacaccaccatccccgtaagcaggcagaaaatgtacactacccactacgacaacgagaccgccgtgctcatcaacgtgaacgagggcgaaggccgaagaaccaaggataacaacccgctcggcaagtttgttctcaccggcatcccaccggcgccgaggggcgtgccccagatcaacgtcaccttcagcattgattataacggcatcatgaacgtgtccgcggaggacaagacgacgggacgcagcaacagcatcaccatcaagagcgacaaggggaggctgagcaaggaggagatcgagaggatggtgaagaaggccgagaagtacaaggccgaggatgaggaggagatgaagaaagctgaaggctatgtggcaccctaaagagaactatatttcttctgcgtcttctgatcatgcacgggcatatgtatggccctaacatgtgccttgtttatgctggaagttggaaccatggcttagttggtgatatggtgggagcatattattgaatgccttgcatattccaaatttgggagtatttgttttcaatattgcagaattgcagatggagttgtaccaacataacaaattatggagtcacaagctgaagaaggtaacacgggaatcaggctagaactgggatcgaagcttattcacaagaagaaatacaagttaatgctgcaggcagagacatccaacaaaatgacagtataccgcaaaagccgcaaaccacgttttatagtgtaaagaagttcagaggaaaataatatcgatattgtgttgaaatgcctagtctgagatataaagattattacaaataggccattgcattacgactccatatcatcaaggcaacaaacatcatgatcaacaaagattccatattaccggaactaaatgcccttgtctcgtgcaagtcgctgaagatggtaattgatggtctttgctgcattctttggccttcctttctgagatcatgccacaagcaggaatcagatttcaggataaaaaaatgttttgaataaacaatttgaagggataaaaaaatgatctggattatgacctgagcctgagcacaagcaaccaagagatccttctgtcggacacacttgtcatcgttctgtttgttcaaggccaggcaattgaggaaggaaaccatctcgatcatgcaaggcttcgtgacaccaccgaacttctttgggtttatgtaaagcgcacccgccttccgacccattcttgcactaaaccttcatgtgattgatacatattaataaaaagggtcccaagataaatgggcatacaagcaatgtaagaaatgaaatgtttgaaacaaaaaacatggagaacgctagaaaatggaatacacatttatcatagactgctgttctactaaatactcctataacagtaatcatgttttttttttcttctatgcatgtaaattgcaaaacttttctccaaaagttacaggtgataagtgctgattttaactgtacatagcaatcatagcattagggcgattggaatcgctacatgtacatatcttaattccccttcaaagccagctgtagaaataattacaaactgacacatcatttgttctacgtctattatctccagatataaacccaacaaatccatttagagttcaaaggaaaagacccatttgattctccaattatcatgtctttgacaatctaagcctctaaggggttatatgttcacaggacaatcctgaaatacacctataaaaaggaaaatgtccaccgttttcattttttttcatcaaaaggaagttcacgattctgaggtaaaactgcacttccaaagttcatcctatcaactggatctcttttctctgttaactgttaagcctattagcttgcttttcacaaaatggatctccattgccgatgttttcaaacatgaccagtaattccttgcacgatccataatctattacaagtaaatcccaatcgttccactagaacgatggcatgtaatctccgcttcgtacaacttcttaaactaattatctgcgtacgagcattccgtcgaacaggtcgcaggccccggcgagctgagccgacccagcaggcgctagcacagcaattcctcaacggcacaagaatcgagcgcaaggaaaagcaatgcgccagcgcgagtgctaggctcgacggttgagacgcaccaagcagtagcccgtgcgcagccgtcggcgcggccggccactccacgccggcgcctcccgagaagtccagacgaggctaggtgagtcgcgggacacggaagggtgggggatgggcgggatggagatgcggcgcgtacctcgagatagccgggggagagcgtcgccgtcgccgtcgcagccgcgcagccggcggcgttggtggggaagcggcggcgggaggatgcacgagtagtttctggagaagttgaggccttttctgggatctgctagttctgcttatttttcataaaaggtcctacataaaattgatatttctatatttttgattaaataattacataaaggtctttaatgaaaaaatatggctacggattaattccaaatagttgcgaggatcaatttgaaaaagaggaaaaccccgaaagccctagccgcaaatctcttcctccccattcgccgccgcatcgttcccccacttcgcctccacctccatctccggcgccggcgaggccaggtttgaatcggcggtgctccggtgctcccctcccctcctcgaggcgacaagttccatgggtgtttgcgagccgacaagtacaagagagagcttcacagcctaaacccaaagcttaatctccgcctctctgaagcatttcgtcgagcagttggtgcgggcgctgaggcagaggccatggcgatggcgaaggccaaattgatttccctatctttcgccgacaagtgccgggtaccgctcgccgtcaacctgaactcaccctcctcctccttcctcttcctagtgttacctcggtaagtttcgctttctcttcgcagaatatcctgtgtgcaaattgggaagcgcacctcaacactatcaaagctgacatcaagggaaggtgtgcacgctggacacttcgattcgtactgatcatataatccgcatagttcttgttttgatttttcatctttggggctccttggcagcaagggggagatttacacatcaagggtgcactacatggtcgagaggggcacgacctacttgattgttcccgaagacgacaggcacaccattgtaatgctatagtattgatgcttctcttacttgcaatgttcgatcaatccatatagtgcttgttataatgaacgaatgtgttgcttgtgtgatatccccaatttgatagaacattgtaatcgacgagcggggatctctctcggtctgcagcccaatcccaggccgccttactaccttgctcagatcactcgggaaggtagttctataaatcccgagaaaccacaattgctatacaattgttcttattgcctttttcctttatgagttttgttacaattggtggtgatcttgcttttctggtgtagttgcctcctcgaatcgctatgactggtgatgtgctgttcatgaaaaggtctaaggtacacaatgttctgagtgcctgcacatggatacccatatgcatgattgcttggtactccctccgtttcacaatataagactttctagcattgcccacatacatatagatgttaataaatctaaacacatatatatgtccagatttattaacatctaaatgaatgtgggcaatgctagaaagtcttacattgtgaaacggaggaagtataagttgtaaggtgatattgactgcttcaactattgtgcttaaggttccagttatcgccgatagcctgaagaaagctattctgaaggaacacaaagctgctagtgaagctagccatagtgtgtcagcaatattatcttctgcaagtgctgcatgcagatcacggagcgaaggactcctcagtttacttgaccaagggagctcctacaatatcttaaagtttgaaattgggtatgtacttcatactctcgtacttaatgatattaattttaggtcatcacaggagatttttagtagttgtcaatgttagtagttacaagccgctatttgtaatcgtgaaattatttccgtgcagttcatgtgtctacatagattcgcttgggagcagccataaagttgatttggataactttgaaccaccaaaagcagatctgttatgtaagctttctacttgatccattaagctatgtatctatttagagttgactgctctaaacaattattgttccttcgccttctcattttgcagtatgatattcactttccaaatatatatatattctcctctgtagtgccattctctgcgaggattattgatggcatcaaccggagtgacccaagacggagagcacttatctttttctgcttcgagtattttaatgtcactgcaacggtaagtgatcatcatatgtatcttaagttctggttgcaatgtaggataactgtataccacactgatgtattttcttatatttgaagggttttctttcttgtgttcgaaattaagaccacctattgttgtacaactttactactgttgactttgatcctctgtattttgttgaaggacgcactcttgctctctattgatcaccatggatttgatgtgctcgccaaggtccctgaaaaagcagtgctccttgatgtcccacgacagtacgtctggagagagttcaggttttcattcaaagaagctgccaaggatattgaggacttctgccgcatgttggttgagttagaagaagaagctctccagagtatgaagagctatagcgggttataggtctaaaggggggaagttaacttgtttttactacgttatgtaacccgagaatttatgatgtctctcccttatcttttctgattggaggtacatgcagatcgttcaatagattttatcttatgtctctgcatcatctttactgattggaggtcagatcgttcacaagattttgccttgttctttgttgtgcacgggtcacaggttgataccgtccaattaaactag

SEQ ID NO: 26648 - DNA, 2452 bp, Oryza sativa
aaaaaagaagaaaaaagagcaatggtataaattgctactcaatactatattaataaaaccataataatccaaactttaacaagtaaagcaaaaccggggccataatgaaagcccgtaccaaaaaagttgcaggagcactcaagaattcggtgtaaaacgaacgacaaattattgcaggtataactaaaagcgataaaagatcgatcatttagtcgacttcctcgatcttgggccctggtccgctgcttccgccggcggccgccggagcatcctcgtccatgcctccggccatgtcagctccggcgccctggtacatcttggcgatgatggggttgcagacgccctccagctccttcatcttgtcctcgaactcctcggcctcggcgagctggttgctgtcgagccagctgatggcaccgtcgatggcgtcctcgatcttcttcttgtcggcctccggcagcttggacgcgatcttgtcgtccttgatggtgttccgcatgttgtaggcgtagttctcgagcgagttcttggcgtcgaccttcttcttgtgctcctcgtcctccgccttgtacttctccgcctcctgcaccatcttctcgatatcctccttgctcagacggcccttgtcgttggtgatggtgatcttgttcttctgcccggtggtcttgtcctccgccgagacgttcaggatgccgttcgcgtcaatgtcgaagcacacggtgatctgggggacacccctgggcgccggcggaatgccggagagctcgaacttgccgagcaggttgttgtccttggtccgcgtcctctcaccctcgtacacctggatgagcacgccgggctggttgtcggagtaggtggagaagacctgctccttcttggtggggatggtggtgttcctggggatcagcacggtcatgacgcctccggccgtctcgaggccctgagacagcggcgtgacgtcgaggaggagcaggtcctggaccttctcgttgccctcgccggtgaggatggcggcctgcacggcggccccgtacgcgacggcctcgtcggggttgatgctcttgcagagctccttcccgttgaagaagtcctggagcagctgctgcacgcgggggatacgggtggagcctccgacgagcacgacgtcgtggacggtgctcttgtccatcttggcgtcgcggaggcacttctccacgggctccatgcacttgcggaagaggtccatgttgagctcctcgaacctggcgcgggtgatggtggtgtagaagtcgatgccctcgtagagggagtcgatctcgatggtggtctgggcggtggaggacagcgtcctcttcgccctctcgcacgccgtcctcagacgcctgagcgccctcgggttgcccgtgatgtccttcttgttcttcctcttgaattcctgcacgaagtggttcaccatccggttgtcgaagtcctcgcctccaaggtgggtgtcaccggcggtggccttcacctcgaagatgccctcctcgatggtgaggagggagacatcgaatgtgccgccgccgaggtcaaagatgagcacgttcttctcgccgatgctgctggacttcttgtcgaggccgtaggcgatggcggcggcggtgggctcgttgatgatgcgcatgacgttgaggccggagatgacgccggcgtccttggtggcctggcgctgggagtcgttgaagtaggccgggacggtgacgacggcgttcttgacggtgcttccgagataggcctcggccgtctccttcatcttgttgagcaccatggacgagatctcctcggcggagaactgcttctcctctcccttgtactgcacgccgatcatcggcttgtcgccggggccgggtagcaccttgaacggccacagcttcgcgtcgctctgcaccgacgtgtcagagaaacgccggccgatgagacgcttcgcatctgcaaacaagcgatcgagtgtttcagatcattgatcaataactttgcactgaaaattgaaattttaagttttaactgacaaaaccgagcagagcaggtcgatctaccttgatggtttcactaacaacttattaagtaacactaaatttaaaatttaactgaccgaaccaagcagatctatctgtgttgatgggttcaggacgatgatcaagtaacaacttagcactaaaaatttataataattaactggccgagccaagcagattgatctggtacgttgatgagtttcatggcgatggtcaactaacaacttagcgcgaaaaaaattgaatatttaattggccgagccgagcagatcgatttagtagtatttaatagagacagtgcggcgatgatcaactactaacaaacaacttaataaagccgagcagagtagcgtcgatctagtaattaataaagctgccgatgggttcatgtcgatgatcaactacaacagctagatatt

SEQ ID NO: 26649 - DNA, 9885 bp, Oryza sativa
gatgatctcgacgcggtcgtgctgccacacgccgacgcacgagtaggtcgtcccgaggtcgatgccgatcgccggcccgtctcccttgccggccatgatctccctctccctcgctctcgtcgaaagctctcaagcgaaggggaaaaaaactcgaaaaggagaaaatcgatgcgatctgaagatggcaggagagagatcgatttgtgagtggacgagagcgaggcagcgatcgttttataggtctgcgtggttctagaatgttccgtggaccggctggaccgtcggatgcgatccggacggtggttggaggggcggcgggttcgtagcggacgtgggaaacgggcgactttggagagtttggactcggccgcgcgttggagacgcggttccagagatctccggaaggttctagagacttgagagttgagacccgttgggccggtaacgatcaatcgttttggtacggggctatggcctctgccagcttgggccgttcgatgccgatcagacggatgggcgggcgaaccgccgggtttgaccgggattttctgcacggttgaagtcggccgctttatgtactttgcctgttttagggcttatttggttcagtgccctaacaatttttttggtagtgtcaaaatatagataaattttggtgctatcaattatttgatagaataaatttgtattcatcttatttggtttgctatcaaaatgtagccaaattgtgataccatagcgaagaaagttctagattgctaccaaatttaggatgggcattaccaaaatgttggcatcaatccaaacaaatggtgggtactatttaggctaccaaaatattggtagagcaaattttggtagcaatccaaaactgccctttgttaccaactttttcttcaaacttctaactttttcatcacatcgaaacttttctacacaaacttctaacttttccatcacatcgtaccaatttcaatcaaacttcaaattttgatgtgaactaaacacacccagtggtttattattactccgtagttggcaggtgttatgggaacatattactgcttactgtacaaattatttccatgtgtacgattttttttttgaagaaacatgtgtacaaattttatggtatcctataggaaactaggggtttctatgagtgaaaacagtcagaaatgatagtatcttttcgggaacaatactcgatcagtcggtaattgatcatatttattattttaactacttagggttaatattagtacgatgtataaagaaattagaaaaataaaatttatatagcaaaaaaagtaacagtcagaaacaatacccttttgcataaacggcactcggttatcgggaatttccgtgatcattttcgttcctaggggtttccatgcatgcaatttagcgttgaaaagatgaattagatttgtatacaactttttattcctatttccctattgtagttatactccatatatggttgatattaaatgtgagattggattaacgtacacctcttctcttttgtttctgatatacaattgtatctctatcttagttgcagaccacgccgaccatacctaattttgttatcttgttgcaaacagtgtgcaacgataatgactcaaaacatgtttaacctacgtcattgtgcatgacacttagtaagttgcactacaatttatatatttgttaattttagaattttgcggtaaccggggctgaacgaatccggttaatcggctttaactgccggcgcgtgtatatgtgcttggttttcgaaatttacgagatcttttaaagggtagattcgatccgtgccattacaaatttgtttattcaaataaatatcattacaatttgtttattaatcgtgccactgaaattttacaaaattcgaatggtaccactaccatcacattttccatccatctccatcttttttttttccgttttctttcttctttctaccggcttcttcccttgagcttgactggcgagaggaaagtgacgacgatgagcttgaccagcgacgatgatgatgagaaaaggaaggggaaggattaggctgggcacgcgtgttaggtgctggtaaccttgaaattcgggatcgaaatggcggcctcctccacttccgcgttgatcggcgggtgacctgctccgcttccgcgctcgtcagctgtgaccttctagcaccaacaagaaagaagacgtgtcgcaccttctgtcacggccacttgtcttggatctcctctcgccggttgaagaggacagggtttgccttctggatctgctggcatcaaccgccaccctcctcgtcctaccccttcctctaaaatgatgtcactgttgccgtggagctcctcctcctcaagggtgtgagagattattgggcggcgtgatcaactcatcaagaatataagaagagagagggaataagacagaaaaggaagaagatcgataaaaacatgatggcagtagcacgatccctgtaaatgatatggatattcatatttgcaatgatatggatccaatttaccctttttcataaaatattttgttaagcacgaattgcacttaacaaaagaaaaacggatgatactagctactcccaccgagaacacacaaattatgcacggcgcgaggcacggacgatcactctcaggatcctctgacttcttgtaaagttctgatgtggttacgtgtctccaaacaggccaagagcgtcggactccaagcagatggcagctcggctcgaactcgcgtggaaaagtcgggcaaagtgtgtgtggacagaggacgagtaggaagcctcgttgcagccactacaccgaagatcccgcgtggaaaagacgaaggccctgtttagatgggactaaaaaacttttaagttcctatcacatcggatgtttgaaaattaattataaatattaaacgtagactattaataaaacccatccataatcttggactaatttgcgagacgaatctaatgagcctaattaatccatgattagcctatgtgatgctacagtaaacattctctaattatagattaattaggcttaaaaatttgtctcgtgaattagcttttatttatgtaattagttttgtaagtagtctatatttaatactctaaattagtgtctaaagacaggaactaaagttaactccctgatgtaaacgccaccgaaaagtacgtcggccatcgtcaagtctactactccagtcagcagctaacaaggccagcaactaaacaacactgcgtcgacagtgccgccgtgccatctcaccctgctagcctgctactgctagtcttgcacggagcattttgggcatcaactcttggctaccggcccgttgcgtcttgcctgcttacataggtggactcttggtgttgggccgcatcgtttgccactgatccaacaacagcggagaaggggagaagcccggaaaacctcagcactccgcacttcagcagcatctgcatctcccatgttcaggattgatattatttttaaccataccattttttaataaattgctaaaaatatctatatttagtttgttaccgaactttgataaatacataagaaattctgttaaaattttagtaatattgctaacttgctaaaatttaacaggtaagatttattttggctactatcttaacagtccctcgcccctcggtgtgttacctgatgcatccggcagaagaccacagagacgagctcactggctggtgacgatgacctaatcgtcattgcgagtcacgactgaggaagagatggaattatttggttgcctgtctgctcgatgcgaaatgcagtcactcgcgagagagaacgggaaagtacgtctcgtgccgtctttgctaggccttaagggcggatgcggcccaggtaaactttggggcccagcatggaggacccgtataagactgcaaagctaccaacggtagcagtccgacttccgcttgttctcgtgggcgaggaatggaggaacccgtaataatactccctccattttttaatagatgacgccgttgactttttctcacatgtttgaccatttatcttattaaaaaaaattacgtaattataatttattttgttataggttgttttatcactcatagtactttaagtgtgatttatatcttatacatttgcataaaatttttaaataaaacgaatggtccaacatgtgagaaaaagtcaacggcatcatctaaattggaagacctgctgtatctactagtttttttttcaagcattataaccggattcgctgacaaatttgagagacctaaagtgaacttattatgctctaaaaattatagacagcccaagtaatctccaaaaccaacacggacagcccaatttgggtcgttgttagtacctgcgatcgagttcgccggaacgtcgtcccaatcggccagtccccgtcccgcaccgtatttgtgcggttttagttgcgagcggggcggtggtttggtggaatggtggtacgcgaaacgaaagcgacggccgctcgcttgcgttatctttgcttgccaacccggtgattgacgggcacgtagctagctaggccgggtccctctctcctacagctcgaattcttgcatgatcagatctgtagtatctttttttttccctacgtaattagctaagctatatactccctccgtcccaaaatgtttgacgccgttgacttttttaatcatatttaaccgttcgtcttattcaaaaaatttaagtaattattaattctttttctatcatttgattcattgttaaatatgcttttatgtatacatatagtttacatatttcataaaagattttgaaaaatacgaatggtcaaacatatttaaaatagtcaacggcgtcaaacattttgggacggagggagtatatatctcgtacgtaattcactgccaatgcgcgcggcttcaatgaactcgagtatttccttttaattttatgggactgtttatatatctgttgacagaaaatcctacctcccatctttcaaattttggaccgttggatatgctttaggattcgtgcacagctttaaccctaacttttttctcccattccccacctcttcgcgcattttgccgccgctgctaccctcgcgcgtcgccaccgcccgatccccgccgccaccgccccaccgcgccgccacccgcctcgccggctagccggaaggcgtcaacggcgccgacgaggccccccgaccagcctcctcccccctccttcctcctcgagccgtcggcggcgagatgcccccgccaccacgccggtccaccgccgtcctctagccttgcagctccggcgccgccaccggcgcctcgccgccaccggcgcctcgccgcccacccgatccacccaccaccgagctgtcgtctcccccgaccatccctctaagcccagcgaactcccccttcttcccctccccctcccacccttcccagttcccaccccaccccaccccaggaccctaattcgtcggctcttcgccggagtttgggtcatcgctggcgccggagaagaataggagtttgtcggagttggagaataagcaactggagcacgaatcgcgaagcacatccagtgaaccaaaatttacaagatttggaggtaggttttctgtcgattgaagcttagcaattccgtaattttatctcgcatatgctccattattgccgcttaaaactgatgtgaaaaaaattagcaaacactttagttttgcctcactacataaaatcttccataaatgcccgtgcgtgtgacatgtaaatcgccttaagcaagattctgtcccaataatctttcgaaagagaacggtttgctagctttagatcgctgtctaacggtagctatcagatcaaattcaggtccggcgcgggcgacgacactgcaggtttacgttgacgcgccgcgaaaatgcgtaggaacccggcggcccggtcggtcgcttaaagcctaaaggcgccggccggccacgaactctctctctcgcgcctttattccctccttcccttttgcacggcggaccatcagctgagagagccctacacacactgctaccaaccccttcagataacctcccccttcagccaatccggcgtccgggcggcccacacgcatcgtgatcgcacaaacaaaatccatgttttctcgcactgtgcggcaacagcggaagatcgatataataccattcactcctccacaccaaatattccccctgcagctagctagctttcagtctttcagtctctttttcaggtactgtatatctaccagcacacagctgatgcacacatccagctgagctggccgtacatcatctcctgcaaaagctctggaaaaagaaggatagacgatcgtggaagctgaaattgctttccggcatttgcagcttagctcatggtggaagctcgattgccgggcgggggagcaagctcgctagctaggcggtgaaatgctgctgcagcagcagcatgcatggctagctagcccactgggcctgcctgaaaccatggctgccggccaatcgagatctcgttcccgcgcgcccttgcatggcgtgtgcaaccactgtggcgataggggccatggctagctagctggttagctgcaagatcaaacgtactacgccacgggtgacccacgcgcgcgtgttcgtccgtgcgtgggtgcagcttgcgcgtacgcgcgcgcgccgagactgacagaccgaccacgccgcgggtggcccggccggccgaacagcaagcactgtccttgtcgccgcgctgtccgaacgtacagccggccggtgagagggttagctagatggagggaggcattggtttcggtttcagtacctggctacctgcgtgttgcattgcgttcggcaaaagaggtggctgacttgacgcgacctgatcatcagtcgggctggaaatttaatttgggttcttatataccgatgcatttttgttgctagctagctagccgaactgtttgggtacatttgatattttgatttgtttactatcgcggccttagtgtattgttttcaacaggttgactatgccgtcgtacgtgcatatcggcatgttctccttaattttgccccgttgtaacagtacgatcaagcatcgatcccaagttcccaatccaactccccggccaatctgacaaagtcgcggtgtggggctaattaatgccatgtcatgcatggaaatatggaatctggatcattccaatgtttttttaaaaaaaagaatataaaaatattgaattcccaaaatagtttttatgatctcctttatgctggaggaacagccataacaaaggctgcagttctaagaaaggcaaattcaatgatttgtcactcaaagagctaggtttattgttcatttttagacgactagctagcatatttctagtgtgttgcaacggatttttattttgaaaaaaataacatattttttatggtgaaaaataacattgattgttattaatccttttttccatcactttctaaatatatcaagcttaatgtttgcatgtctttcaggtaagaggtggaccctctggtccaatattacatttttttccttttaaaaaagcccaaaattttcctccaaagtttgtatttattatatttaaggatcatcggatggcttgaacagtgaaataaccgtcgcctttgtgatcagttggagcagcctaattttttctcttcctaaaagaacttaattacttttttcttagcttagcctaagcccaggacggttcgacccattttccatccaaaaaatccatgtgtctattcatataatatcgttactaaccgctaaaagatctagtggctgtttggatgctatataataacattgccactatttaccatattttttttgccatacttagctaattaagttgtggctaataaaaagtgagccacgctttaactagaaaaaaaaagagtgtgccatacttttttgagttgatgccatgtgaaaccatgagaaatgagaactaatcttatcataattaagtgtggccaagaattaatcaaaatatgagctaataacttggtcaaagtgtgtggtaaccggtaaccttagccaatgtttggcaatgaaccaaacagtcgtttggtttttcttgaactcatggctatagacctcaatccttcaatgcttaggttaatataataaaatatatgttaaggtgcacatatttattgcgctgacagtagcgtcatgcttcgagtactcccaacaaagtagaaaaatattgtattggccatgacaaatttgaaagacaagtgtaaatataatggtagtcatcacttcacaaagttttttgaattaatgtatatttgatatatgagttgagaaaaaaaaagaattccttatcgcaggaaggatatatatatacaaaagaacgagaaagtttccaaatgaatttgttgctccatattttcttttcaaatgaaattttttggactagtggatagctatctgcataccttttcatgtattggggagcatattcccctgccggaacaactgatgaaattccttcacaacgacatgtggctttgatacctgaagaacattttataatactaccccagaagcactggctggctagctagctatagttggagtatgtattacagtattagggtttctgaagcttcttcttttttttttgcatcaactcttattagcttcatatatttatctgaacttctgttcacgctagaaaacaaaccaaaaacagtcacccctcactagtcaccacctatccagccatttcttgccatctcagtcccctctgtatctccaccagctggttttttgcattcaatttttctgctgagcacaatgctaaacgagtacagtcttaaaggctaagcaagctttaattacacacacacacacactctctctctctctctctctccaaacattcttcccaaccccacagagagaaaaaaaaaccccaagaaatataaagccaccatacgcttaaaaggagagaagataaattcatgcttttctcctcccctttctctttcttagtttctctctctctctctctctcctgtcttctctcctgcagctgctggatgtgattctccaccacctcctccttcctagctagctagccagagtgagtactccacaccaccacctcccctctcctccgtttaatttcttccctcccagctagctgctgcagcctgcagctctcgccttgctttcttcttctctttccatacacaaatccccaacaaagaaaagtgcgaatttataaagaaaagatcagaattcaaagcagaagtaaagctagaggagataggggtggtgaggggaggggaggaaatatatctcaccactaactggcttccatggtgttcccttcagtgcctgcctacctagatccacctaattggaataaccaggtacttttgctgcatgatcttaaattcttaattgcttctccctcccttcttctccatcgaactctctcttgctagtgctgaattcacagcttgttcatggcaagagaatttttttgcaccaagaagcactgcagagagatattcttgtagtgttcttgaatattcagagtcaatatattctctcctaccttttctctcatctctgatctataacaatatgcttaattgcttacgcttatgtttatgtgtgtgttgcagcaagggcagccgcccaggccggcgaacgtaggcggcggcgatgcacagcacctgccggtcgggccgaccgcagctgcggcggcgccgggcgagatcggggggctgccaacaagcagctcgtcggccagcgcggcggcggccgcg

SEQ ID NO: 26650 - DNA, 3927 bp, Oryza sativa
ggcgcgatcatcccgccgtcgggcctcagctccatgtctcaccacctcccgttcttgggggcgatgcacccgccggggcccaacctagggctaaccttctccgccggattccagcctctcggcggcatgcaccaccacgtggacacggcggaccagttcccggtggcaagcggcggcggcgccaccattggcgcgtcactcgagcagtggagagtgcagcagcagcagcagcagcagccacaacagcatcagttcccgttcctcggaggagcactcgagcttccgccgccgccgccgatgtaccaactgggactggaagctactcgagcagcaggcaccggagcaacggcggcggcggcgttcacgttagggcagaccagtgctacagccaccacgtcaaggcaggaaggttcaatgaaactggaagatagcaaagggctggagatgagcctgcagaggcagtacatggcggctctacgccaaggagatggtgtctggggtaacaacaacggcggcaatggcggcagcgacggtggcggcaatggcggcggtggcagctggacaatgaacttccctggattccattcgtcatcaggcggcggcggcgatgatggcggcggagtgttgtagtacactacttctagctaggtcacacgattgatctggctcatcaacaattcgacaagaggtttttctaattaatttgcatggtttgagcaaatgcaaagaggaggcaaagaagaaaggagggcttgacttgagtgttaaactcttcatcaagtagaagcacacggctagctagctcatgatgatctcaggtagggtggtttaagttaaagctgctctttagttaacgctttttttccgccatttggttttgaactcaaaggtgtgccagtgttgtgtccatagtgtcgcctttttcaacttttttacagtattgtttacagggggttaatatatataaccaaacgtggtgcattgggggtatatatgatcagggatatagtatttgacttggagagattggagattgatcaaattacctctcattagttctgcaaaaacttgcatgaaattaatgtatggtttgtgtgccctttaatgtttatggtcctcttcttacaagatttatcaattacttatgcacctgaacttttgtgggttcaaagcatacacacattccttgctagccttttggtattgaataggactgtacgtacgtatatagcagtgcatagcttttgaatgcatctggactgacatgcattactacctgaaattgaaggcaactagctagtacacgttaaatatgcaacttaattaccgtatgcatcatgtggtggtgctaaccattatagttcaaacataggagtatatatatgtatatacagagttacatacattaattggcatgactacttccatcagctagtgagcatataatcgtatattcaatatctatatatgcatatctaaatcttctcatattcttaatggaaaatgtaaggagagtagcagttcaaaaatctgtcatatgctcataagccatatatatggtgaataaatgcacgcctagttggctactgaaccatttgtacaaaatcgatctcctggtaacgcttcacttcggattaaaaacagctatggtgatatgaatttcaaaatgcaagaagatttctgatcgaatcagtaaccattacactcaattaagacacccctccattgaattttgtaaggagtatctcaattcaaaaggtcaaacactatagattttaaagttgaactacaatcgatcaaaatatataagtgcattcagtgtataaattatacaatggatttatatttcaaagtgcttttacaaaatgttagttttacagccactaagaatatataagttttataatgtaagagcaaccagtggtcaaactttaatcttgctgactttttcataatttaatactctctccatttgacgtataggacaagattaagtcaaactttaaaaactttcttcaattttatagtagaataagtctaataagtttaagatattgtgatagtattttccaagataaatataaatgtaccatttaaaaaacactaagaattcgagaaattgttgatcaattgatgatcaaagttttaaaagttagatcaaaccttatcctaaatatcaatgcacgaacaagaggagtacaccctatacaaatcaacagaggtagtttttcctttagaaaaagaatcaatagatatataggtggtcctgcaggattcataggatttttcaaagtttccttctagactactatctcgttctcatagatatcatcctagaatacacacagttaaacctcgaaaccttaaatgattaattaataaaaatatattaggatttggcatcaaaaaactaatatcaggagctattcgttataaaaacactttcatacatttatattttaacaaatttaaaggttgtgatgaaacatgtgcattcaagaccatacgtgtcaatgtttcaaacgagaagtagaaaataatggatgcaatatcttctatttgatccattatttagcacacaaaatgtttatttatgggagtatatatatatatgtgcgcgcgcgcgcgcaacaaaattaattaaaactatctagctagagccatatatatagtagagtaagtaattaagagtttttcacattgaaatggtgcatatatagtacgtaaactgtagtatagaagagagtgcaggagtactttactagcaaatactcctatatagtagtatttcgccttgggcaaaaaatatacacacatatatagaactcagtactggtctcgatcgtgcatgtgtgcatgcaagcttttcctcagttttttgcagtgccagtgtgcaacatgatgtaacctcggccggtcacaaagtgccagtaccaccatgattagattatgattggaaatgatgggttttccttattgggccgatatatgatcacgaaaacacacacacacacagatatatatatatatatatatatatatatatatatatatatatatatatatatatatatatatatatatatatgcaaccatatacatgtatcaatatattcacttttcatttttcacacaactaggcacagctgcatcccatgcatatgcatgatttgccatcgggtgctcactagttaattaatgcttccattcgtactcttctgaacagaaaaaaaaaacaactactaaatgtcatgcccgttttgatgaaatcgaaaatggtgaccgaccacattcatcttaattgcgatgtgcaaacgccagcgtccgtggatagggatgcatatgctcgatcggtacatcgtctctctaggaagggctagctgatgccttgtctgctctttggagcacactctactgctcggtgaaagctcagtgtgtgtggccatagctagccatagctaccatatgcacaccccgtgtagctttgtggggcattttggccggctttgccatctatccttggatctttttcagtagagctggctggctggctgtagctagacagagctagggcgctgtgcatttcgctttgctgaaaagaaatggcttttgaccaacctggtgcacattcatgtccaccaccggtgatcgatcgatcgatcggcctgtggtgtgcaaacgacgacgacgactgatatttccgaccatctttcgccggccggcgaggtgtacgttgacctagctagctggattgttagagggaaataaattaagctttaatttctctctgcagcttcaattgatcacctccacgatcgatcgatatatatcaaatcttcttgcagcactgttgtacaattaatgtcgggaaggcaggtattctgcctggccctaaactctgttgtcagggccgttaattataccttt

SEQ ID NO: 26651 - DNA, 2898 bp, Oryza sativa
  unsure (1)..(2898): unsure at all n locations
ctggccctgcatgccatccctctggtactgctgccacatcatctgttcctgagtcaagaactgctgcttcttctccatctctgccatctgaacataggacggtggtgggaagctaagggacgccgcaaacgggtctccaccaacattctgcattgaaccatctggtgctggcagagccagcacttgtgttttctgtccagccggaggtagagcaacgctgctggcactcccagttgtcacttgtgcattgacatgctggcgcacggcaccctgatcatacataccattcagtagcaatggatccataccacctgtcattgtggccttctgcttggacagattgctcgctgtctccacaagggcaagttcccagtcagccttcccaggctcagctgcaggattctgccatgcagaagtcacctcattgccaccatttgaggggaaggcctcccatgagccattgcttccaccagctgcaggtggcccttggaagagggccagagcaagccggttaccttgctcatctgcagtcacagtttcttctctaagatccactaaatcaccctggggttgcggtgggggctctggctttacttcctcctccaccttctcaggttcaggctccttgtagtcttctggtgctggcagtgccttgatttcattcatatctggctcaggctcttcctcctttacaggttcaggctcaggctcccgaggtgggctcttgggccgctttgctcggtccctcataaattcctccaatgtctccagcaacttatcggtaacacgctgcacctctgggtactctgatgacctagcgaccccagtttccttacaccagccatagaatgcacaaagctcgtcaatctgctttgcggcgctggcatatgcctcaaatgccttcacgcactcggcatactccatgtcaaagaacctatccagcagcactgcgagcacctcacatatatcagcatagagctggaagctctctctcacaatctgatacagcgcgaccagcaccatcctgctgtgcttggcaccacctgtggggcggcaagcaaggaacctgtcgagcagctgttgcaggtggtgcatacgggcaaggacccgttctggcttcatgtctctcactggggtcggcggcttcttgtcatcagtgttgttgttgccgttcctctcacggtaatcatcataaccaccatatccatacccatttccgtttccagggggtgaggagtatgagggtgaccggcgaccatatgggtcaggtgatccccagcggtcacgcggtgacgggccatttgcactggaactggcgttggagccggagccttgcttgcgctcatggaggaagaactcaaggcgctggtcgaggtacagcgcataggtacggacgaaggcagagtggtcccatgaaccggagtgagcctcgtcgcggaagtcggagaggttgaggaggcgagtgcccctgcgcgtggcgtgcaggagctcgcggtggaaggaagggtcgccgtcggcgagaaggcggtgcacgagcatgagcgacttgagcgcgacgacgtagtcgcgggtgcgggacagcctccgggagcatcccgcgacggcggcggcgacgtgggcgcgggagccggaggtgaggtggaggatctctcggatgtgtcgctcctcggccggctcgtcgtcgtggctggtagccttgacgatgagcacgtcgagctccggcgcgatgttgctggtgaccttggccagaccgatgctggtctggtccttcaccgcccccagcgccttccggatcgtgctcgacgacatntngccgtngccngngcntcctcctcctcctcctcctcctcctcctcctcaccaacaaaccaccaacaaccgcggccgcagcagcagcagccgccgcctcttgctcggtttagatctgaacagaacaaacacccacatgagaatcggagataacttcgccctgtttgttgtctgttctcgcgcaaacagggcaaaaccagcgcgggatttgctcaaaaccaaacgcggatccctgaaattccgcaaccttctatcctcaaaacccatcggagtacctaccgagcatgagatccgcggagtcgggaggcgagatctcacccgcggaatccacccaacaccgatgaaatgaatagctagatagagatattaattaatactactagtcgactcttagcttatcatcagcatctatagcagcagcaaaccgtagctaagccgaagctactctctcccagccaaagcggcagccggcgccctccggcttcatcgtgaaaaaggcacggatctagcgagcgagatcgatccaagcgaaagatttacctttgcggtagatccgggagctcgagatccgggcggtggcgcgcgagcacacgccctcccctcccctctctctctctctctctctctctctcagctctgtctccggcctcttggggtgggagaccgggagctctggggctcgtctgaaactgcggtccgcggaggaggcgagggagacgagggaggaagaagcgaggcaggcggcgtgtgtggtggtggcgcgtttttgtgttggggggcgtttggtgccttgctgttttcagatttttatattttgcgcgaggggaagggaaggaaagcgagcttcgcgtggcttccttccgcgcgcgcgcaccgacgcgccccctcggccgtccgggttttcccaaaaatattttccactgcgaaaggaaagtggggtggcatgccgtcgcgcggggggaagccaaggccaagccgcggttgaccgctgcgccgccggctgtgttgtgcgcacacgcaaagcggcgggcgggtgggcgggggcgttgcaccgtgcagctcccgggtgtttggggggggggggggggg

SEQ ID NO: 26652 - DNA, 18269 bp, Oryza sativa
ggacgggaggggtcggcgcgccgttgacatcggcgtgtgcgggtgcggcggaagctgcgggttggtcggtctggctgacccgtcacgccaaaggtgacagtgtgacacacacccctgcgctgcgttgggggggcctgtggttacttctgggcagaccgcataggctaacacgatggtcgtcggagatagctaaagcagttgatggttaatactatacggagactattcaactctgttatgcacgatgaaagaaactgtcataatgattatcagttcaaatataggctttgctaacgatccaatgagagttgcaaggactttggtatttttattttagtagtatatattaaaaatgaacttttcagcatttgattccttactaacatacaattgaaaattatcctataaaatcgaagtaagaggttgctaattagtttagattaatccttaacggtcgagtaaaaaaaacataaagaatattgtaacaaatggacattataacattttcattacttcttcaaaaagtgtttcttttttatgtaaaaattttctttccttgtaattggacataatgcataagaagggtttaagctgctcagtaattagtatcatgtgcttgtcaggttcgtacatagatcctccattttatatttgtaattgaaagactcctttgttgctaaatactcctcaattgcaggtaataattgcatcactggtacatctacaaataaaaaatttagttagcaattatttgaatgcccatattgtatattatatatcgacaaaaagaaaaacgttgggaaaacccctcttgataggttgcggtgctctatctaaatcaagctagttaattgctaaactgcttaattattgtaatcacctccacaacaccactgatacatcttgctagattagatcttttatctttcaaggggattaatatacaatctggtactagcttttatttgtggggggagaaaagggcattaatcacaatctgctagtttatttttttttggggggttgtctggtagttataccacgcaatgatgtaatcgaaagaaatagatgctctgttcagtcactaaaaccaatcttttggatttacctctagtcgagtgacttaatttttaagctcgaatatgttctattattcatgttggataattcaaattgtactagtaatttattttataaactatacttctaccatctactcctccatcctataatatagcaacttattacgggatgtgatattttacagtgcaacgaatctggacaggaggatgtatagattcattatattataaaatgttacagcagttactaggttgctatattatgggacagagagagtaatagttttgtttcattttgcgtattactaatataccatgatgataaatctatatattgggtacaacaaagtccaaaacaacctttttttcctcatactgtaccttatccacattttttttctctcaaattgcaatcagaccacagtccacatgtgcacatgatactatatacatttccctcattttgtttacaaactagaattgttgtttgggtcgttgcacatgaaaacaatcatagatttcacaaaagctctataggcctaatttcacagcccctaccagtattcacgacacactggtccctttccatttatgcctcgatttatttggcaggtggccggtgctatagacaaatgcttggtagtgtataacacggttggctttggcttgtgaagtgtcaaataccaggacggccggcccttgcatgcgtttctccgctgtacctagcctgcaaaggtggactagtgctcgtggtggatggaagtagtactcgtacagtcgtacttggctggcatttgggtggcgaaacaactgaacccatccgatcgatctgtaaacccgagagaaagaggagtggacagtgtgtctccagcgagcacgcagtgacaccgtttttacatggtccaagtctgtgctaagccatccactgtttttccttatctgtttgattaatgattcacccgttgacaccgttgtcgacgcgtacgacagcaatttgtccccattctcctcctgagtcccgaatacacgggataaggttgatattccattaccagtctaaaaaaaaggttgatattccatttggagaactgccgggtgaaaatagattttgtttacggtttttgattagataacggcctattaggaacatcatggtacaaattattagtgctgtaattaggtgaactcgtaaaatcattcttttttttcaagcgctagataagttgccttcccattgaaaatgagttctgtagtgaccgtcgacttgtaaaaatgcatttcattcatgcctacgcatggtactcgttccaaatccataaactatccagatcccttccttttttcagttttgtcccttgttcatgctgacctgcatctttgggtggggacagattgagcacttcagctaaaggttaggcatcgtgttcttgatgaaccagtgaagctagtgggcaaaaaagccatcgcctatctccctgaatcactgagaggctgagagctacggaatggcatatcttagtcaccaagtaaaacgtccacactggtaagcttcatgtatgattaagaaaggatacctccactgagctatgagatgggcgatggcttttttgtcctccaagtgaatgtacctctattttggctgttgatcacttgtacggtcatcaaacttcacgtcttattctgccaaatccttgaacaggtccatgcaacattgatttgagttggtgttagaactagttgagggagggagcccggccagtaatatgcataggtatgggggattagggccggtcctatgattttgagggccctaggtgaacttatcgtgatgggccctctaaactatataaaaaattttgtgatatatatagacgctaattttacttgcaaaacaaaaataaatatatccatatattaaatttaatatgtctggtaattattgagaaataaagtcgactaaaataataccttagaactaatatcattaccttagtgaaaaatagaaccccatcatattcattgcttcttatgaaaagatacttctttggatatttcttgatgcaaaatcatcaagaacggtattaagatcaatagtgtccaagatatcattctcgatagagcacataaccaagccatttaacctttcttgcgacatagttgatctcaaatagttcttcaacaacctcaattttgataaacttctttcagctgaagctaccgtcataggtacagttaagagaattcgataggcaactgaaacatttggatagcaatctgtatccataacagacttcagaatctcaggcgcggacatcgaagattctgactaaaaatcattgatctaaacatcggatgagttctcatgagtaagggcccctttgaatcacagggtagaaaaaacagaggaataggaaaaacacaggattctggcaggaattgaagtgtaaaacagaggattgcaaaacacatgaaaaacacagaaatggtcgtttgattggagcgcaggaaaaacacaggaattggatgagaaagatagactcaaaggaaattttccaagagattggagctcttgctaaattttctctaaaatccacatgcaatgtgccattccataggaatttcataggatttggagagcttcaatcctttgaatcaaagggccaaataggatagtttcctataggatttgaatcctatgaaattcctacatgaatcctttgattcaaaggggccctaaatgttttcgcaaaaatcttgcagtgcgaccaaagatctacttcatcgaaggattttaaatttttagagttggccccccaccatcatgggcccccggcggtcgcctcggctgcatagggccagggccggccctgtgggggattaggcaaacccaaagcttgaagactcgggaactcgctcgggttaacaaagtggatcgtagcattgtcaacatctgacgatcgtattaacctttcatgtagtacggtttttgtctaggctataaaaaactgtagatatactacaccattgcggcattgcggtagtcggtagagacaaacaagtttgcaattatcgcgtgaccccgagttcggtggttgacatgaacggtggccactggccaccctttttgtgctccagagtttagagagctactagtacagttgagttgaaaagggcaaaatgtatatttgccaatacgacgctactccgtcagataattcactggcagattatagacaattcaagagggaggtttggccgtgcgggagtgtttctttaccgacacatgcatcggcattcggcaaaaccacctgctacacccgtgattcatttcaggtggatcttcttgttgctttgccacaaataatgtcctaactaagagcatcctcagcagatgcgctatccagtccttcgtataagaaatagcgcatgaaaataaaaataaacctctagcagatatgtcatcacattcttaaaaaataacgtatccgctaaacatgagagatgaatgccaaatttgatattcctctatcctcacgccaaatcgcaacgaccatgtttgaatcgagctcccgtcctcatcctccggagttccagatcaaccccggcatgtcgttgtcgtcgtcgctggccaccaacgaaaacgagtccttaatgacgatgcagagggtggagagggagaggcgtaccagatctgggagctcccatcgcccccttgcacccctccacgctcgctaggtgccgccgacgggctcgcttaagccgtccaccaacgtctagcggcaccagctatcgtcggccggcgtctctttgcccgtgagttgttgacgtcgcccctctgcgctcaccgggtcaccgacgggctccgcgatgcggcgcctactctggtcgttatcgacaccaagatgtggcactagctgccatcggcgcacctttgcctgtgagctgccactgtcacccctgtgcgctcgctcccacttcctgttggagaaggagaagagattgaaggatagaacagagagaaaagtagagaggaagaaaggcagtggaagaaaaaagaggaaaggtttggatttgagaaaaaagagaggaacaaagcatgcctgttgctaaactcttgttgtcaccttacttatcttgatatgattacaaatatgtctgttaaaatatactcatttgaaagattttatgtgataaataacattgtaaaaatttagtcgttcaaaatataacccctgtagaagaaaataacacaaatatattattagttgaaacatattactcgaatagtaggatgttatatgaatgatatgttggagtgggaagagatatgaaggataatttttttatgactatttatatgaggatatggatgatcaaatttggacgaggtgttgggatactctaaaggctttaatttggattggtggtaatttttgtctaattaatattttggtagtgctatatagtatgggtaaagttggatcaaattaaatgtttatccggtactatttaaaattgccataaaaattaggagggtaaaaattggctcttagtccaaaacaggcctcagctacgaacgatggcagtgttatcctgtctgagaaaaaagtagagtgttatcctgactgtcttttggcacgagaggaaagacgctcgacacgtagaataaggtcatcatggtctgatggcgacactccatttcgtcccactcaaacctgttttctgaagatcattttgcacctcaaagcgaacgaaccgccgtgcaatttcttctaccggttattatataacgtggactagtgtgtgtgtcgagtagaaacttgttcagtcaactggccttggtgactcggggtcacctctagctagtgaaaactttgtccgttctgccggcgggtgaaaagtgctttgtagtatgatatctatctagaaagttacttcgtaccacccgtttgcccgtatcattatactgtaaatgtggtatggccaaatcgtccagatagctaatttattctaggcacatttctgcattatcatataggcaccggacagcttattggtattgtatggaagtatgacgtgtgcacataacacttgcaatagaaaagaagacaataccatcatcaagtctaaagacaagataaaagaagtggaggagaaacgaattccggcgccattgataggatggagtggttgacgatgacgtcaggggacaccatgagaccaatggtagtgagttgtggtcacgccttaaccaaataggagtatatttttagctaacagtaacaatattaaacacatgttgcaactggagccaggtgtcccatgtgagctgcataagtgagctaactaatcacctacttatcgtacggcttccatccataatactccagttaatcagcctcctgtagttagtaaacgagtataaaatttccctgtgataaaacccgctaataacacgtgaaaccggataaatctcggaacttgatgtatttcagactgatgaaatccatgaagtaacatgggttttgtacccgggcagtggatgacaaggcccaccacccagacgcgatggcagattggcggtccagcagcagcacaaccagccgcggcgctcgcggctcgcctcacgctcacgggccggaccggaagtggtagtaggaaagtgtaggcgttgctggctggctcgtgaggcgcgggcgtaaatgcgggcgcgtcctggcacggcgtggccgtgtgcgtacggcggcgtcatacgggagctgtacccgcgacctaactaaccggaaatctgcgccctacggcgaataaaaataggagtaccaccgccgtaggtgccggacagcaacatgatggtaggagcaggacaacttgcgattgggttttgtgacttttgtcccgagtcaatccaccgacgctatctagcacgcgagtgccattacagagttacaggcattttatcgtgttttatttatggggcaattacgtttttatcctgttttggtgcctatttttaatttggttctgtttttttaagtttgcttatttgaccctcttttttaaaaataaagatcaggcttgaccctattctgtgaaggcaacctaacggcgttagctcatgacaaaaataccgtttatgcccttgctcatttgaccctacttttattattatttttatttatccaggtttgacaaagcggtgttatatttgagaaattttgatatgggtttgataaatttaacatacgtttgacaaatttcgataattttgacataaattttatatatttttgacaaatttaacttacacttcacagatttggtaaattttttgtaacatcaatctcaaactgtacatatccaagaaaaacacaaacacgtagttaaggtatccccgcaggcttaaaaaaaatccggaggctaaccagatggagctcgaatgctagatagccatctcccgcatgtcgttgctgctgcagctgagcagctcctacgcgccgccgcgggagcactcgcgcgtcgtcgtcggtgccgcactacgcgtcgctgcaactcctgcatgccgccatttgctgcacctgcatactgtcgttgtcgaagccctttcgcccgcacatgccgccgctgtagcacccgtatgccgccaccgcagctctcgcgagccgtcgccgccgaagccctctatgtacgccgcctccgcagctcgcgccaagtgctatctccgtagtccctaccgcgcggcgcccgccgttgcagccccgcctcgtgccaccaccgcagctcccgccgcctccgccatagccgaagccctctctgtgcgccgccaccgcagcccccaccgagcgtcgacgccgctggaccacagctcccatcacgagccgccgccgccgccctcaccgtgtgccgcctccgccgaaccctagctgcgccgccaagaaggcacgggatgaaaaatttgaccgtggggtgagaaatttggtgtttgatttggtgttcactgctcagggttattttagtcagtttatattataaaatgatttttttttctgtttcctttaaaaaaccctaacggtggagtggaaagaggatcagacggcaatttcgattttagaaagcagggttaaatgagcaaagtttaaaaagtagggttaaattagtagttggacttcagaacagggtcaaatgaacaattgtccctttatttatctagtagtattgcgatttgcgagtagtactggagtaactgtttagtaacaggccaactgtgtacgggccggcaagttagatttagtagtattgcgtagtaatgggccggtctgattgtttcctcttccttttgtggtggaataagttcactttgtggccatcaaaagtgattgaaatctaattcgtgaccttcaaccataaaatcagatatcttgacccccaaactcttaaaacaggtacaatttgactccctcagcggttttgctgacgtggcatccacgtggcatccaagtcatcacataaactaaaaaataaagcgggcctacctgtcatcttcctctctctactaatatatctcacttctcatccgatcaaccctctctcttgccccacttttttcttggcgtgacatccacgacgccaggatgatgatgggcgacggtggggctctcctcagaccccagccctttccaccccgtcactggtggcagaatggtcgggcgagtggggattggtcggatatgcagcttcctcgccagaagtcattgatgggccgcggcggcgggaggaagttgaggcaggtggatagcttgccaaggtcgcccatggcgctggcgtcaagggcgtcacttgccaagacagagtcgatagttgacatgcaggaactcggcgttgtggactgagcgtcggctattcgtttccgctgcaaggacgtaagaaggaggggcacggcacaggcggcgtgccccgcgcgtgaaggcggtcctcgaggggcctcaggcacggcgcggaggtgagagaccacgactggggtgacgctccgtgtggtgggcccgtggcatggccgcctcgcgcgtcctgatccggggtggcggtggtgctcggtaatggcccaggcatctattgccgcacctgcgtcgcctaggagcgtgtctgcacccagccatctggtctcccgtcctcccgattgccaccgccaccaccgccgctccggcccttgcgcacccaccgccgctgccgttccatcacacatcctctcccgcgcgaacatctcctccccttggccctcgtgatggcgttgagtatctgcagcgccatggcgtcgtcatcgccgccctcctcgtcggtgctgaacgacatgagtggacggagcggcaaccggaggtggccccgaccccacgggtgcagttgatggagatgtggtctagcgactcgcgagccgtcggagaccacgctggtaactgcgagggcgaggatgacgagcagcagcgtgggccaccgccggcgttcccctcgtcctccctctatcgccagcctccgcgacagagccgccgcccctggtttctctacgccccgatgccgctctcaacaaagaaagagagaatataggagggggtcactgacaggtgggccctactttttttaaagtttatttgacgactaggatgccacgccacgtcagcgaaaccaccctataaaaccaccaaggagctaaattgcaccggttttaagagttgtgggtcgagatatccagttatgtggtttagggttacgaattagatttcgatcccttttaagggtcacaaagtgaacttattccacagctcggttcggtggcttgagcagctttgcaggcttgcagcacgtcggcccatcccaagtcccaacccaactggcaaacgtgaggcaactgccgtcgtgaccgcgcgtgccggccgaccgccaaccacggcgcgccgcacttcgactccagcgagcgagaggagcgccgcgccgcgcgcgctggtgggaccgcagcccgcaggccaggcgtggcggccctgcctggcacagatgctgccccgccagcgccagaagtggaggacgcggcggcgtccgcgatccgctttagcgccacccgtcgcgactcgcgacgaccccgctagtccgtcggtccgctgcatcgccctgtggtctgcgtgactgcgtcgccttgccttgcgttttcagccctcgatcacatgcgcatgcgcgaggccgcggaccacgcgcacaagtgtcgcggccacggagccgtctcccggctgtttcctacagtagtccacgccgcgcgtgagcgcgtcccatccattcacatgaggagaggagaggagcgtcctgatttccctccccaccgtcggatcagccagggaccttcacgacggcgtggatcgcccccccccacccccactccccctgcggtggttggccggtgggccctgactggcctcggggaacacgtcagaccatgtgcgcgctaggggcccatagggggataggcccaggtagcccgcggcggcggctcgcgtacagttggccagccgccgcggccgcaaggaaaaccggagagtatagccgatagcgagatcaagccaggctgccagccagccagccgcgcaagctgggagccggctatcgtacatgcggacagacgcaacagctgcgcgagagcgacgtacggggggagagaacgcacttgcttggaaggaaggagcatacatttcggcggattccttgggcggcggcaaaaaggctctgcatgattgcagctggagaacaattcgatctgtaaaagcttacgtgcgccggcaatatacgaattgggcaaatgctctcgtgtgtccttttagcttggaccaggtgtatgttattatagacaaaacctaaagaaatccccttcttttcttgtgtagcggaaccacgacacgtatgattaggccagtgtttgcatagtgactacgaataatgataaagagttcacgacgaggtatcaactattagttgggttgaatctcacataatataatactcatgtatatagctcaagagatccttaaatacgacaagaatgtatacgaatgtatttgctgattatttttgggagaaaatgcaaaaggtaccatgtcattcgattacaaatgtatggctgcactgagaaacagtttctggacaggttaacacataagcaaagaccatttcataatgcacatgctcttcttattcttcttgtcgaacttacatatgtcattgacaaagtggtatccaaaaatctttgatcactatcatacgttaccatgcttgtttaatttgaccaaataaaacttttttttaaggattggtttccaaaacttatgacctagtccattacgagtcacaatgtctatgatttattcagaatacggcgcaataattttatataacttgtccatcatgaatataaaacaaaaaacttgtgtttaaaaaaatatgaatatatagttaccattagagcaaataaacttgtatacttaaaaaatcgttaggcaccggtgaaaggttcaatcgtaataagatacttcgtctcaacacgtcaaactaggtgaaatagtcggcatgcaggagattcgaatccaggctgatgggatacatgcattgccagctgcccagccattacactgtaaacgcatctcaaataaacttgtacgaacaaatatctatactaaatagaataggtaactaaagtataacaaaacaacgattaaaaagaaaatcatttttggacatgtgctacaacttgcaaagtttgagctctgattagagtgtggttttaggcgaaaaaaaagtccagtcttgtcttagctaagcagacagatcatcacgcatctcattgtgcttttgaagtccctatccgtccaaattaggctatctctaaagattaactaacgagccactcaacgaaaaagccaccaaaatctaaacactccagccagcccaaaagccacgccgtccactccatctccgcctccagtgggtcatcatatctcacgattaccatctcacatagtacaccggtgtggccatctgcaccgtccattgctcatcgagattattccaactcccttggtctacacctccggtgcacccgcgcaccagccgagccgagccggcgccgcggaaggaggcggcggcttgcgtaagcccgtataagttcacgggttacactgactggtgggaccagaccgggtggcccactggcaggaggaggctatactagtcgaggcgatgaaaagccactaatctccaacctcgtctacacttctccaaatccccccacggcgcatcgcccgctcgccctcgccgccaccaccacccgcctccggccaccgcacactagggcggcttgagccccagcgccgccgccatggacgaggaagcgaagccgaaccctaacgccgacgcggcgcctgctgcagcggaggcagcagcgtcttctccgccgccgctttcgagctcggagtcggcggaggggaaggataaggaggaggagaaggaggaggaggaggaggaggaggcgggggatttggtggagaagctggtggagttggtggaagagatcgccgccatctcggacttcaggaatgcataccggcggcagttctgcaacctgtcgcggcggatccggctgctcgcgcccatgctggaggaggccaaggaggggccgcggccgctgccggatgtgtcgtattccgctctccggcggctcagggaggcgctcgctgactccagggagctcctccggctcggcgtcagcggtagcaagatctccctggtgcgtttctcgcttgaggctcgttgttttgttgccatatttggtcgttaaaagattacatttcttctgcttatggcctttcgagtttatttaggatttaataggagaatttgcctcaagaattggagcggattttagtgcgttcatactccaaacttcgtattagcacttccaattgtcccctgtgatatgaccattttagataactctttgacatgatctactgtatctctacatttttaaaatattttgttgtttcttaattgttattttgtggttgtgaagtaagctcaagcttaataatacatgctgaaggttggaccaggttttgttatacctgggtgtcaaatcaatgccgggccagagcagttgatgctgtttagcaacaagcttgtcaaaaacattatctcattatatttttccttttcgctggtgggtcagagtgaaatcggcctcaaccatggtataggaactaattctgtcacataagttgtaacgagcttaatttctgacgcaattttgtgcgcagctagactaaaattcaattgaaactagagatgtatttgataaacagtcttgtttcgatcttttatattattaggagaggtcagtaaggatccactaagtttgtactggacaccaataatttgccacgttaattgcagaaaaagagaaatatctgcaccgttagattgtggttaggtcaagattacaatggggtagatttatcatataattttatacaatgtagagttgcatctatggaaacaaacatgtatatgaaattctgctcttttataatctatagttgcacacaaaattgcacgggaaaatccgctagtgtatacaagtgtattttgtatatatatataatataataaattatttgatgggcaatattttatagcatcatggttggttagttttaaggttccgctcggtgttttaggttctcattgcaaaaacatctctgtgggggattgaaaaattcttttcttttttacttttcagcagatttttgctgcatttgaacgaattttcagtgcatccaaacaagtttccttttttttaccagattcacttcatacaggatctacttgtaaaaatttcgaatcaaaatttcaaagtctggtcctactagggcatttatagtatagaagctcaataaactatatttccctgatttgtaaagaaagctcactgtgaagttactgcacattaaccctggtcccaccagggcatttatagtatataagctcaataaacatcattttttctgacttgtaaagaaaactctgtgaagttactgcacattaaccctggtcccactagggcatatattgagttaccataaatgttaatttccatacctgggttgctctttgcagctgaaaagaaaaactgattgcactcgtgcatttatcttgtaaccttcgtcagaatgatgtgctgtgttccccctcccaggatcgttatcctcgtcccgggaatatggggacaatcttatccctgccttgttaaaacctttcaaaagtagtgtcactcatgaacctgggagctttggtgacatgtaactacaaaggaaaaaagaaatgtaccaagaaaaatgcatttaatatggatctgtagcatcggacttgttcaaaagaatagctctttactttattctgtactgttgctcgtggactaacagttctgttacacaaaacataattgtggttattacaatgaagatgaactattcacagaagtgctttgttctacttgaattaaaaaagaagagaaaaatcacatgctgattacatttgacattcctattaaagttcttacgcagatgattaagtgaagaaattctcttagtaatcgctaatgtagaagttatacgtagaggtctcatcgtctaaatttcttctgggttctcatcaactgttcttcttcttttcctttttggagtgcgagcatcgcctgctgtgtttttttgcccaatgatcggtacattggaacctgctcatgaaaaaaaaaaactgaaatatagtctggtacatgcactgctgaccttggctatcatgggccacaaacacatgtggtaaggatagtgtggttattgcaagctatgagcagcgagagatgcaaatttcacatttcttgggtggatctaaaatggtagtttctggagttccatattgatgttgtaactgatttacatcaacttttttttttcaatatgtcaattgcagatttgtggttgaaaattttacgaattaggggtccctattgtaatgcataactactacaaatattagcttttcaaactaccaaacagtgttttttgcaaaaaatttctatatggaagttgttttaaaaatcatattaatccatttttcaaaaaacaaattagttaatacttaattaatcatgcagtagtacatatttcgttttgcgtgccggggaggaggggttctcctcctcctgaacgcagccttagtaaacaccggacattgaggaatgcaacgtttttagtagacagtcatgtgcatttcctaaccataagggtttgattttgcaggttcttgagagagagaaaataatgaagtctttccaggatattactgcaaggcttgaacaagccttaggtttaatctcatttgatgaacttgacatatcagatgaagtaagagaacaggtaggctaacatattcatgagtattttttttccatttagtaaaagaactattggagtgagatatttttagtattttttttattttgttttgttcaattttgcaaacttgttaacatgtgtgtggctattgtgcaggttgaattggtacatgctcagttcaaaagagctaaagaacgatctgatccatctgatgatgatctctttaatgatttggtgtccgtctacaactcaagcaccagtgctaatgttgacccagatattctccagaggttatctgacaagttgcagcttgccactatatcagacctcaatcaagaatcattgatcttgcacgagatggctagtggcggtgatcctggtgccgttgttgagaagatgtcaatgctgctaaaaagaatcaaggattttgtgcagagtcgagatcctgaaatgggaaccccagtaaatacgacagaactttcgggaaaagacaacatggcatctctgattgttccggatgatttccgttgccccatatcgctggatttaatgaaagatccagttattgttgccactggacaggtagttgattaacctatgtctactttcaatacgcatgcctcccatttgtatttggacttacaataattccttcaatatgcacatgcagacttatgagcgaggatgcatagagagatggttggaggctgggcatgacacctgtccaaagacacagcagaagcttcccaataaatctctaaccccaaattatgtcttacgcagccttatagctcaatggtgtgaagcaaatggtatggagccaccaaaacgtgctgctcaacatcataatgcaccagcatcatgtaccgctgctgaacatagcaacgtcgttgagcttcttcagaaattattgtcacaaaacctagaagaccagcgtgaggctgcaggtatgcttcgtcagcttgccaagcgcagtcctgaaaatcgtgcttgtataggagatgctggtgctattcctattcttgttagcctgctatctataactgatgttagcactcaagagcatgtagttactgctctcttgaatctttcgatatatgaagagaacaaggcaagaataatcacctctggagctgttcctggagtagttcatgtgttgaagaggggaagcatggaggctcgggagaattcagctgccacactgttcagtctttcactagtagatgagaacaaaataacaattggggcttctggggcaattccagctcttgtgcttctgttgagtaatggaagtcaacggggtaaaagggatgcagctacagccctatttaacctgtgtatctatcagggcaacaagggcaaagctgttagagctggattgatccctgtactattaggactagtcactgagactgaaagtggtatgatggatgaggcccttgctatattggcaattctctcgagccatcctgagggcaagactgcaattagttcagccaacgccattccaatgctagttggagtaatcagaaatggatcagcaaggaacaaggaaaatgctgctgctgttctggtgcatctctgcaatggtgaacagcagcaacagcatcttgctgaagcgcaggagcagggaattgtgaccctgttggaggaactagccaaaagtggcacagacagaggaaagaggaaagcaatccagcttcttgagcgaatgaatcggtttcttatgcagcaaagtcaagcccaagcccaagcagaggccatggcacaagctcatgcgcatgcacagtctcaagctcaggttcaggctcttaacgaagctcaatctcaggtagagatgcaggtggagcaattgttgcttccaactacttcacatctttctgatagacgagacggttgataagcaggatgttattcatagttagtgggtttcttttttattcatagtcagcggcttgtttttttggctgaggctagcagttggaagatcgcctgcaatgcctagcgtggaggtgtgtggtttttgttaagcaattagaatcaggaagtgccattagcgtgattctagggccatgagcttcttgacaattgagttttgaggtcgtggaactgttaacctgtgtgccgtttgtacaatgcacccagtgatgaatgttgggaccctcgagttttagggaggtgccattctacttgtacccggtgcctattacaggactggtctgtggcttccaaggttgataattttacttgcctgactcacagtttcagtgaattgtttgttcactttgttaagccaagatttccctacatagctatccataatctattgcatggctggagcatggagggcttttcatatggaatgctctttcttcagttggtttaagcttcaggtctgatctacatttctcagctatcatgtacaccctctattctcaaatataaatatttctagaagttttagcagaaattaagattaaggtcagaataattgtgattggttgggatgagaaaaaaaaatataacttatatattataatagaagtttaaaatcttagaaatgtttatattttaggcggcagtatttacgtttctcccacaccgctacgtatatgccaacacctcggactggagggcaacttcgtctgttcgattgtgcttgcaacaatcctccccgggaatactgtcgcctggccaggaatctacctgaacatca

SEQ ID NO: 26653 - DNA, 19194 bp, Oryza sativa
ggggggtttcgatgaacgcgtcgatcgtacgcgcgaacacggcgacgacaagctgcgccgaggacagcaagacgacgacgtcacatcgtgggcgcctggctgcgcggtgcacggagcgtgcaggcgcaggcaaggggcgcggcagcggcagaagcaggccctgacgacgacgacgacgccgatcgatcggtgtcacggccggccctgaccccgatctgggaggcatcgttcggtgagtttgccttagccagttaggccatgacactaccttctgtcgtctcaagacactctctggttagacacgcccatgcctcggtccgcatgcgtgttccttactctctccgtctcagaatatagcaatataatactagatgagatgagacatcacctagtatgatgtatatggacatggggtatgtctagatgcattgtactagatgatgtcccatctagttatagttataggttgctatattctgggacgaagggagtaccttttccatcgtcaacgtgagagagagagagagagcgagagtgtgttactgtgctaggacgtactactgctgctgatttgcttgcttgatcgagcctttatggtggagaaatctggttatggaggtgacgatcgatgctgccaaagagtcaaagcctgatgtgaccggatgagataaaaaggtggagtaataacaacgtttgttgccacaggcgggggcccaacataatgcaagcgccatgcgatgggccattccgtcatcgctagcaacagtgtatggcattgtaggctatcatccaaactagttgtattgcacaattgtttctcaagaaaatctcacatgtacaggagagtgatgtggaaaaattcaaaggataaaccatcatctcagttttcgagttatgatattaacggtaaagaagaaacacacaagtcgaggaattggctagtgattatccagctgatgagaatatgaataataaggggttattcagcttcctgctactaatttattttttcaattacatactactcctactttggaggtacttcctccgtcccataatataatcaattttgagttttttcttacactgtttgatcagtcgtcttattcaaaaaaattgtgcaaatataaaaaacgaaagttgtgcttaaagtaatttggataataaagtaagtcacaaaaacaataaataataattctaattttttttgaataagacgagtggtcaaacagtgcaagcaaaaactcaaaatctcttatattatgggacagagagagtatattattccatccgtcccaaaataagtgtacttttgcattattcacgttcaacgtttgaccgtttgttttatttgaaaattttttatgattagtatttttattgctactggatgataaaatatgaatagtactttatgtgtgactaaatatttttaattttttcacaaatttttcaaataagacgaatggtcaaacgttgagcacggatatgtacagctgcacttattttggggcggaggtagtatatagtagtctgaattgtttggtggacctgcattttttatggtggctagagccgacagaagatctctaaacaggcatcagctagcggccgtgtgcgtacgtgcctttccaacgggaacccaccagcggatgtcgctcgcgctctcgcaactctctcggctgcattatttgatgatccacgatggcacgactcacatcaggtcgcgtcgcattattgacacatcttgatcgcacaaggcgggccggctagcgacaaattaacctaccaaattaatagcggaatataagaatagccctgcaggttaatcatctgaaaaatcttgattaaagcaggtcatacatgctgagcagtgagctacagcaagcatgcggtgatctcatatgctgattgattagttaattagttagtacgatatgatccatggacgtacaatctagcgacaaatgatcactcagatgtcaggtcagaagcagcctacaaagagaaagccatcatgatctctgttgttatccgatttggcgtcgttaactactatcatgcattattgatgatttgtcatccagttggccacttgagctcggttggaatcgcttcaagagtagaaaatacgggccctacctttgacaatgctagcaatcttagagagagaacgagagaacgcgaagaaacacaccggaaagggtggaaaccgacgttaacgttacgacaaactagtgtaaacatcagacaactacaaatacagaggctaaattatcatcaacatcaacttactaattagattatcctaacaattacaaataaaattatcacaaaactacaactttattacaacttgtacgttactgacacattggacctatatgtaacttagagataattctcgacacggatgaaacattgccaacttagcacgcgtggaaagaaaaccaacaccttacggtccagctacacaccatcgcagcatagtatagctccagacaggggcggagctagagcgagatggaggggggtgccacttgtttaatttatctgctttatatcaagtttaagctaatgcgggtgtctaaatttgtattgaggtggtgcatacatagtgaaaataggtcaagtatagctacaaaattttcttgaccgggttcctgggcacccccctcaaacactctagctccgtccctggctccagagcaacttagtactagggttgaaactggttcggatagtttccgtccgtccggaccatttttcggatttggatagtttcggtcggaactatccgaaaattctcggattcggaaacgaattcggattttttttctcggaaacgatataaatgttggagatgttgaactaaaataataagcgatatctcttcctcgatcaagtaactcaatttgaggggttttttatataccggtaaatattcgctaccgtattcgttccgtctcgtattcgctccgtatctgtattcgataatattcgatttcatttccgtatccgagttttcgattccgattccgatttcgaaaaaaaaatgaaaacggatatgataaagctagtttccgatccgttttcatccctacttagtatgtcctgtcataactcataacccagtcaagtcggctgaggtgggcactgcacacattgtttccatccctttcccgctaattgatctgtaatacgaatcaaactgctaacaagattatcgttagattattttaaattttattatatttattagatgcctcataagtaatctaccttaccatatgatgtgaagaatatctgatattattctgcataggaagggaggggggaggtggttctaattggaggcaaaccatgcatgtcgatttcctcatctcgggtgatgagatgttaatcaacatggcatgctgtgagaccactacacaataaatgcgatgatgttgagtgttgatgtgtctcaccatttcagtgtgccaaaagacacatgtatgacatgtgggtctactgtatccgtaagttaagagttgtaaccgaattatagatttatgataattttttccgtaatggttgtaacaatctaaaatgtgtctctaatgttgtactaattaagttgatagtttagtcaataaaatggtagttctctcaaatttacttgaaagactaaggttgcagacttgcagttgcttcattagtttcacaatgaaatatcttagatccctatttagaataaacaattaatgtactaggtatgcagctagctagaactggttagacttagactgtgtttagttcacaccaaaattgaaagtttggttgaaattggaacgatgtgactcaaaaattggaagtttgtgtgtgtaggaaagttttgatgtgatagaaaagttggaagtttgaagaattattttggaactaaacacggcgttagccagtacaatttttctctgtttgccattcaatatatcttgacaaatctgagatcattattaatcaaccactagaaaattgaagtgctatatatgtatctaggttacaatcagcaacttcatgtcacgcgagcttaattttgcgcttttctttaaatgggacggtattccatttttatgtaaatgatgaattgaagtacaggagacagattgaccctatgaaagaacgcaaactagtgtgtgattaatgatgatgctacacaaacatggaagctgtcactaactcttcctagctccaaaaaatggtaaacagaagtacaagtgacacgacattactggtctggtagtatgagagtatcattttgctatacacctatgggagggaaaattgccaacatacatctcttcaaacaattacacacaataataatgtgcactactggaaaactgatctttgctcggtcgccccaaaaccacagtagtcccggttataaaaagaacccgatttaaaaccccatagccattctacgatctttagtcccgattggtaacaccaacctggacgaaagatgatctttagtcccggttcatcccctgtcagttcattgtcagaggggcggggatctttagtccggttggtgtcacaaaccgggactaaagatcaccactttagtcccggttggtattactaaccgggattaaagatctcctagatctttactcccagttggtattaccaaccgggactaaaatcacgcgtagtatataatccatattccctatcatctcccccacaaccggcctctactctcctcagatccatctccctcttctcctccccttcctcctcccatcccggccctctcctccccctcctcccttccgatccgatgcttagcgagcgtcgcctcctccccctcctcacttcccgcacgcgtcaggcggggccacacgcggtaggcggccggcggggccgcgcccggcgagtagcgagcggcggcaggcggcgctacccgcattcattctttttttctttttttttacaatttgtgattcactgagatgtataattttgtgatttgttgtatggatctgatatgtataatatgtgatgtatttggtttgtgtgtaatttttttaagatttgtgatatatttgatttttgtgtacaagtaacttaagatttgtgatgtgaatgttttaggatgttactttgatttggggtttgatttgggaatatgcatcccactcgatttgggagaaaatacagggattaaactctagctaaaaaataatgaaaaaaaaggagacataataggactgccgctaccctctgttaccaaccgggattaatctttagtcccgattatttcacccggactaaagatagcgatctttagtcccggattcatagttccggttagataaccggtactaaagagggggttacgaaccgggagtacagagggtttctccaccagtggtgcattcgtaaaaaactaatcaaatgtctactaatttgctactgataaaacaacaatgaatcatacatgtagtctagtattcactactacggaattattaaactaataaaaaataataattgcactggtttttgggtcaagcctgtctctcaacttgtattgaatcgatgatgtgaatacaaataagagcattatcaagagattatgaataatctttcctaaactgaagataggaagtaaagaaactgatctctctaagaaagcctaaattttatcctaaaaattaaaagtggaccattttgttaaattaccaatatttttttcctccaagcgcgtggtcctcctggcgtgcgagaaacagattgggagtaggaagggaacatacgttctcactcaaattgatggagtgagaaatacggagaagggaactccagttttgaaaataatataagtacttcatctatccctaaatataagaaattttggttagatatgacttatcctatgattctgtccagatttattggactaaaatatataatatctaaccaaaatcctttatatttaaagatggagtgagtagaacactgttggttgctgctctaagagagcaagttcaatagctaaagcaaattgaacgaagtcgtcgttgctcccctcacacatatgcatgtgcccttgccatgcacgcatgcatgccatcaaattaaaggcggctgcattctattgctatatgctaccacagggtacttactacttacgtaccccccgacacgatcattacggctttgattcgtttcgatcgatcgattagcaacaccggccgcggccggtagtctcgctcatactgtagtcatgtggtcaccattgcatgccgtccgatcgattgatcgatccatcgatgccgtgcatgtgacgtgctaacgcttgcgcagcccagcgcactcgatcataagagccatgcagctctgctgcttgctgcctgcatgcatgcatgggtgtaccaattactaattaaacgcagatgctctcgctttctggctgatctgatgcccactaaaataagctggctttgctgctttagagggcaaacagtgaacttgccatcctgataatgatgatgcatgtcatgtgatgagtgcctgagtcactactgaaaaactgatttttgctggatcatgcaaaatctatattagtcttggttcaactaggaaccggaactaaagaatatctttagtcccggtttaaaatgttacaatctttaccaaccggaactaaagatcatttttagtcccggttcaaaataggtcagacgtcccactatttttattcccggttggtaccaatcgggactaaagattgatgcaccatatataatccctcgcacttttcctcacctcctctccacaaactcctcctcctcatctgtaactacctttccttctcattatcctctctatcttatctctatcctctcatcctcttttttttttccagcatcctctccttttttttccagcggcgaggagccgcgctgggcggcggcggccaatgcggcgctaggcggggagcagcgccgggcggcggcgggctgcgcggatgcaaatttgtgaatttgtttcctgtgaattttttatttgtgatgtaaatctgtgatgtgaatttgttcatactatggatctgtgaatttgtgatgccaatttgagtatgtatattcgatctgtgaatttgtggatgattttgtgatgttttgtgaatggggatgattttgtggttgagatcggtttgaaatcaatataagtagcaaaaaaaattattaaaaataaaagaaaaaagactacagatgggaacttcagccacgtggcgctccggtctttagttctagttatttcaaccgggactaaagatacccatctttactctcggattcacggtcccggttatataatcgggactaaagggagttacaaaccgtaagtgaataccctttcttcaacattgagtggcagtgcaggagccatcggtcaaatggatgacgaacttagttggattttttttctccgtaaagtaacccactaatcaaccacccagatgtaagaataataagaatcttaatcccatttggtagatctcccgagcattattcttccgcgtgatttcaaaggtgtctttttctaaaccgacaccgatgattcatctctatcagcgtcgcttgtgtggtgctggggttgggaatccggcacatctacgtggagttcccaatcagcacccatgagaaatgtttttgtgctagtgtgtcaggattgaagacgtgtttagctagcagctaacgtgggttggctatatataaattggggggaaaccacggaaatcgatagcaatctctcgagaattaatggatcctcatataaccttaattttctcttaaatacaatgcaaatgatcctgaaatattcaggaaagcatttagaaattagtgcatcgagatatattgatcctctcaatcgattcttaggccgcgcgcgttcgagtgatggtttggagccatctcttcggaacgaaaacgaaatatctcattagcgcatgataaaataagtactaaattaaaataaattaaaataaatttttaaaataaacttttctatataaaatttttgaaaaaaaaagtttcgtttaaggattgggaaagcgtgtttacgagaaacgagagagtagaagatggaaataggtattttccgaacacaaacctaaaagagtttcgcaaatatatgagagtgggtgtacaatctcaaccggattttgtttctctctattttggttgtagctcaagagttgtgcatttagggccggtgtctgtagaaactctcattttttttttcatcttaatgcaacgaggttttgcgtttccaaggtaaaaagtactatgtaagaaatagtcttttcgttccaaaatattattagtatttctaacttattatatatctggacagggaagtaattaagtgagttcgatggagctttaggtatacaagggagctcaggaagtactcttaacaaacattggctaataagttgcagatatccctgactaataattactcctacttaattactatttcccagtattagaacaaatttcgtaccttgacagtacgtcgagccctccatgcttggttcgacgaccaaaggggatcggaaaagggaacaggaaacactcaaacacacgtaaaatggctgaaacaacatgtggcacggcacaccacagcggacgtgccatgcaacgagacacaggcaggccggccggggtacagatcgacagaatggcccgttttgcccgcgctctaacgaccgacgaccaactgatatatcaacggatcgaagtgcgcatcgatctactggggcgaagcgaagcgacaagcggcgaaggcgcgcgcgtggaaagctatagcagagcgcagagcggtgaactcgcggtgtcgccgggacgcgaaggcaccaccctccctgccaccacgcacggccctagctccatcgatcctcgatcgatcacgacgtgatccgccgtattatctcccgcagcggcaggcgccggccgcgctccgtgcaccatcgcggacaggccgggggcgggcctggaggtgcacggcgcatgtcggcatgcatgcctgacgcagctagctcccgcactaaactagctagctagggagagaacgaaagacgatggatatatagatccagggatggatatgtgtcgtcgcgcaccgaatctttcttaaggctgactgctggctgctggcgctggcgctggcgcgctgctgtgtttcaaggatgactgctgttcaccaattaatgttgctcgctgccgcaagcccggcgcgatgtccggcttctgtcccctctctcgtacgctagttgcatcagcatcaataccgccaggcgccagcatgtgggttccggttccgccaggcgtttgctgctgcacggataggtgtgggttaatttgtgattttgacccaccaggtaatatataggtcgagtttgataagatactaccctactgaaattttgttattagtgctaccaaaacatgccaatggttaatttgatacttattgttatatagttggatttagtcatacctcggtaattgatgatgagtaagcacgacttaaaaggtagggtttctcacctatcagaccggtcttttgggttgtataaacccataacctaaagtcgtggttttaattggatccgtggtggagcaggtccaccgtgaccttggtggttcatggttggtgccttggtggccggccgggctacgcactagtataaattttgtaaaagttgtcaaatatttgcgtcggttaccctacaaattatcagttgcatgaataaactcaattttgttaatgagatacaaaatcaacaaatcacaaagggaaaacactattctttttttatttctcctatgtttctcatttttatatctcacaaatgaagttgagtttatccttgcaactttacatggttgtctaatactacattagctatttgtgagattttttcccaatttttttaaaaacttttatatagttgtttgagatataaaattgagaaacagaagataaacttcctctatgatttgaaaaattctacatgactagctaccacataatttctaaaaaaatgttaaggccttgttacttcagttctaggcatatgattttcttggctccaccactgaaactatcacataaatttagggagagggtggcagtggggttattgagggaacatttgcggctgggattattattagatggaaatcttatcatccattcgtagttaacacaacatccctacaatcaatttccctaccaactaggaatccccctcttttcctatatgtcgccctttcttcctctacatgatcctaggcgcctctagctagatttgcccccagtggccttccccaccactaacctccgatgacgagctctattcaaattttatctgtagacctatccttcatttgacattgcacatgctttttcatgtgctgatgacacacatgttttcattgccaccatgaccgccccattggcatctacaaatcgtgattgtggcattaacatgtggcccctacatcacccatcctagtagttggttgcaacagctaaagccaatgcccctaatctagtttgactttgagtttttatatatacatttttttatggcacacggttccaacattatttggtaatacactctctgtcctacaataagtttatttatccttcctcctatttattccagaataaattcatttttgagtaatcgttgtatcaaagtttgtgaaagtatggaataaatgtattgcaagtagataaagtgaggaataatggcattgaaattcgataaagtcggggcattatagtctcttgggtttggtattggtatacatgagatgggtaaaataaacttattttgggatgacgggagtattagataagcgttttaccacaatgagaggtgcttgtattatgtgttgcagttattttccctagtaaattttaaaacttaatggagtactccctccaggttgaaaatacttatcgttttgaacaagggtgaggtcaaactttaaaatcattgaatataaatatgaataatttctaaaatatttgccgtagaagtatggagaccatatgtatagattagtcttaaaaagtacttcaaataaaccgtgtatttgttgattattttatttatactataatagaaaataacgatcaaaactgcttttaaaaaaccgtgtccttgtctaaaatattaggcaaaatttgctacagggcatcgaaaaaacgtgtaattagctcgtggacaccacaagaacgagaatttgctgatgggcatcacaaaaaatgtgtaattagctcttggacactcgaggccttattttattgtttcctgtggatttggatagagaaacactggtgagagtacgattttgcccctgccctcatatccagcaagtgattcttgcacggctcgccggcgatgtggcgccaccgccgccgccgtgatctgcagatcgcgtacacccacccgacgagcttctccatcctgcgacgcacacccaggacgtcggcgggccatgagtccatgccgccacggccggcgacgtcggcgttgtgcctttgcaggatctccctcgtatgcaacctgcagcggcagaagcgcatctgcgtgcgtgtgatccggacaacattccatcctgcagaagccgtcgcgtaaccccacccccctccaccggccattgctattgtttgccttctacgttcactgaccccgtacgcatggttcaccaactggaaaagaaaaaagaaagaatacaaagctctgcagacaagatgagaggaatgagagattgcaatggagaagaggacgagaattggtgcctgtttttttggttgatttgaatcgagatgaatcgatttgaaccatacatatacaaaattggaaatttgattaagaagagaaggagaagaatcgaatctcttcccggacatggcgcgcaccagcgcacacaccgccgcggcgccacccccggcgtccgcgatcaccgcgtcgtgcccgccctccgtccggcacagccgctccaccgcggccagcgcgctccggctcccctacgccgcctccctccgcgacgcgacgcgcgaacgccgccgcggctccggcggcgacagcgcgggggtggttctccttagcaaggcagagcatgaaaatgccacggatcccgatgcggatggcgcgggcgtgggccttctcctcgagaagcgtaacgaggccctcctgcccctccatgaccccctctgccgcgcccagcaccgccctagcatctgccccggacaccaccgccgcggcttaacgccagccaagccacccctacggtccccaaatttaagggcaaacttgtctttatttagtgtttctctctctaaatacacaagaaataataaaataaggccacgagtgtccaggagctaattacacgttttttgatgcccgacaacaaattcttgttcttgcagtgtccacgagctaattacacgttttttcgatttcctatagcaaattttgccaaaatgttaagtactatcaatccagagggagtattttgtatccgtgtgaatccatatttcacttgtcataactttaattgtacaaccttattggagtatgagagcataagtgtactcccttgcatgccccgaaagaaaaaaaaaatgtatagttgactctctagacatcactacacacaatggaaaaatcatagaaaaatttccatgctgattaccaggccatgcatgtcttgtgctcattgtagtcaaaatgcacgtcctacaactaaacattttgagggcgaaaaagaggaaacaaggaatcgagaaattattgctgctagttccaaggggtagaaaaaaaatcccaaaatatagtgtgaaagggtagtatcgataaaacacgcagaataaatatatatttaaacataaacttcataatgcatactactccatctatccatactaaaatataagaaatccttgatgtatccgaagttaaactattctaactttgaccaacattttagaaagagaattaatatccacctcaccaaacaagtaaattatgaaacaatattcgataatggatctaacaatgcacatttgacatcgtaaatatttttattcgtttctataattttggtaaaatttaaaacaaaatgatttaaaactaatattagataacttatttttaagagggatggattagtaattcatagtaacaatgataatatatatgcacagggccaccatattagcaggaatccgcactaccacagaacacgtgaatagtgccagttagaaaacccctttccgtgtcggttttcccaatcgacactatggaggcagcattgcagagtaaaccggcaccaatcccattttaaaaaccgtcacctttgataccactcgtgagccaaaaaaaaggctcgatgcatcggctcaaatcgagccgatgcatcaagctcatccaccccgcatcacggaactccaaatcaatcaaaatccccaatccccaatcaaacaacatcacagaacaagaaacattgaagaacatcacagaaatcatttcactaacattggaggcatcacggaaatcatcacagaaagccaccactgcctctcgtccagccgtcgcatctccctcccttccgccgctgccgggccgctcctccgtggccgccgctgggttgcccctcctcggatttggcgaagggcagggcacggtcgccactgccgcttccgccggctagccaccggccgtggacaacgagagagagtcgagaggggagggcgccactgccaggccgccgctgcctctcatcccgccgccgcatcccccctcccctccgccgccgcatgccgcctcccgctgttgccgccgatgggccggccctccccggatctagcggaggggagggcgtggccgccgccgccgcctccgctggccgggagaggagaaagagaagagaagagaagagagcggagagaacgagaggagacgagcggagagaacgatagagagactgataggagacgagcgctacggaccttatctcctcgaagcttcgtggtgaggcccgccggctcggctcaattcgtaagttctggtttattataggtgccggttttaaatattaaaggttctgatttttttaataacagacacaaaatagaataggtgtcggtttttatttataaccgatatctataattacttaaaggtgtcagtttttttgcgatttcaactcacggaggtgggaaaaggcctatagcaaccggttttagcactatcaaccatatttgctttggttttagcattttggagttgccatcaatactagctcttagatgcgacctagtttatctagatttttctccaatgaatgcaaattatcctaaatacccgcagtgaaaacttttcggtaggtacgatcttaattaatttatagctagtcgtcctacattcactgtaagcctgtaacgtacgtgcagtgaaaacttttcagtagggatcgacgacacatgaaccttaaccactgtagcttgaatccattggcccattggaactcggcacactcgcactcgctctgactagtatacgttgcatccgccggcgtggcgcgtgatcttggtagcaagccacgcctagctagccaagctcttgcatgtgtcgagccgtaacgtgccctgccccggcgtacgtactctcatgggccatggatcccgtatacaaacttaagctggtgaggctgaccacacacgcataaacagtcacgtatagctactctaggcggcagcttgtggtgcgcgcctttcccccttgccactgtgctcattatgtttgtgtacgactgagcttgcacagaaacatatgggcatcgatcccatttgatgtgcgtgcgtgctgcctttattattctctcctctcctctctctctgatcatctaccgcatccatccctagctatacttgcatcgatgagagagagagaggaagcaagctgcctcggtactcgggaaagaagggtctcttcttcagctaccactgcttgcaaggtgatcgaccgatcgatcatctatcgataggccagcatgcagcagcagcagtgcagcagtgtgtggcagcagctagccccctccacagattcccttggcaagcaatgacacaaaacctttgcaaagcggccgcggccagcgagccattgcgcgcacgcacactcacgcgcacacaatgacacaaaacctttgcaaaattacacgggaaatggtcctcgccgagagcttttggcatctcgcttcgctttacccgcgacgacgcagcctgtgccggccgagactcatgtcactcctatccctgtctttttcccgcgctgcttttgattgttgctagtgcatgcatatgcgctgctactactactacctcctcatcatgcatgcgtcgttggatttgttttttggcgcctatcaacgcatcacagttgtaaaggaccagggtatagagagatagctaagctagagaggcatgcaaaagctttagctaaacccatcagcgccgtgtacctggaccatgcaaagcatacaatagcttttcctaccactgttgtctccctctcccacacccccctgttggctatagctagctgttgtgtctgtgtcactcactcactgtgtggatcagcatgttgatgtgtatatactactactactacaactactactacgtaccagtccactgatgtggctagatgaattgcatttgccgacagatttgcgtgcgtggatttacgtttctttttagtacgtggtttgtgaatctggtaggattgattgcgccggaaatagacaattcatagcaaaggtagtagctttatttacaagtgagagcactgaccggcccatccctctttcagatcaatatggaggcaaaggatatataatgccatcgaacttcaatttgagtaatctgattggcatggaagaaataaataaagttagtcgcatatgcatatatgtcaaatcggtcgacatcgtggcttgttaacaaaagctagtaatccaggagaaaatggatattgttgtatatccataggtagagaactttacatgggcaatatattcaagaggggttattatagctccatctagtaaaaaaacatgttgttgcgtatgaattgtccgtgcaactataaattaaggggtacacttgctaaatgattattaaaaattccgacatatatgatcgatactggtacaaaaggatataaaacagtcctaataggacatgatcacctaattaagtaacatggcaaggcatcaaaacctactcagacaaagttattaagagatactagtgtataccagttttatgtatttcgtaccagttctatggaattttaggtaaatatagaaacactactacgaaacaagccatctttgccgccccattagtgtcggttagctaaaacccaacactgatatgtaggagttttcctatcccctactactagaaaaatcgttttccgggaggccaaaaatagtttttcctagacgggagaaaggaccgtctgtacgcaaaggcatgtgaaaatcatttttgcaggcggcatcttcatcttcacaggcggtagattcactcgcctgcgaaaatcatttcagcgaacaaagaaaagatccacaccacccctacccgccggcaacgccgccggcctccccctctggctggcggctcttctcctctgtccgctgccactgctcgaggggagcgtcccctctttcatccagatttgggaggggaggggccgacgctgtttgcagtagttgtcgtcgtcggctcctcctcttaagtggtccctgaaaaaattgatttttgcgagagaggttaaatttggaggctctttagctattattcacaaacgattaaaagggtttttttttgtccgcctggaaaaataaatggctaacatcggtaaaaatcgtttttctagcattgccctgaacccatgcgcaccatgagagagaaaaaacccgacactgatgtgtggtcatcagtgccggtaatttaaataaaccggcactgatgtatttacagtacattagtatcaggtttttttaataacccaacactaatataaggtcatttgtgctggttattcatgtaaccggtactgaaacaaccggccaagccgagctataagtgagtcagaaaataaaaacaacagataaaatcgaccatacgttctgagacgatcctacccatagagtctaaatcgatccaatccatccaccctcacgctccatccctcgcccgccggatccaagatgttcttgatttgtgatttgattgttctcatctttggcctgtggatgtggagttcttgttcctattctctaatagtggatgtgaatttgtggccaatatggatgtgatttggacatttggtggcgtgtgattcctctccgcctccttggagaagagtcgcaccctggtgcacggcagcggtggtggccaccgccctcctcaaggcgtcatagcggaggcggcctcctcacggtgcacggcagggcagtggcaccctcagccctcctcatggcgccatggttgcggcgccctcccgtcggtggcgccgccttcctcatgtacggtgcacaacggcagtgtcgctccctcccatcagcagtggcagcctccccatggcggcagtgctccccttctccaacctcttgtacacctctagcatccgttcaaccctcctatgatgtgcatcgcctgcatcatctcattgttggacggccagatctagccaccacaactcggggcagctagatccggtcgccatgagtaacggtatccctctgcctccgatgagaagtggcaccggcgtggccttgaagcactagctcgaatcgagcagatgcatcgagtcagctttttttcattcttgaacttcaaaggtgccggttcctaaaccaacacatttgattatcctcgttggtgccgtctaccgggcactggttgggaaatccggcactaatagagatttttgcagtagtgacaaccagcactgatgacatattttgtagtagtgaaagaccgtgaggttaggatgggccagatccttccatgttcctctataagctgatatcgaggagcttgtcgatcagacctcaaccctagagaaatcgtcaagagatgtactttagccgtagccagccataccctattcatccatgcatgtaccacataggtagtactgttcccgtacatatacgaatgcagacaaacccaatggaatcaccctagctaaagggatcttgaacttgtataaaatctctctatgtgtatatgaggatttacgaattcttgccgttacatacaaatgatcctaggtcgtatggtaaaaacactagctgcgaagataattgatgttcaaacactgtaatgtttggcatgaaacatctcatgactaaaatgatgttttccgtgatcgtccggaaggagcactgttgtctgatgcgggtgtgcaatttccttctatgccgtagggttccgtttaatttcctcaaatatggatatgatctattctggagtttggactgcactacagtcaacatccatgcatgtggctctaacattaggtgttttcgtcccatccttttaattttttgtattttgataaaagcagcttaattaattacaatattggctagtgctataattaaatcatacataactgggtcatagtactccaacagtagaatagccataaatgggtcatcagttgtaaagcaccgattctctctcctggcacaagagagtagctcaccttaactttaatttgatactgccatgccataagctgcatatataattgcccgtctgacaccgtacgtgtatcttcatatgcatgcatttagctttgtgtacctagcttgggctagaatcatatgcatatgtacacactagtacacgcagatgacacgcagaagcgcatgcagagctccaagtaccaagtaccaacctgcagtccaaggaacaaaactacgtggtgggcaaccagatgtataaattaaagatcaaaagcgagacgaaaaaggtaggatcataataatcaaacagtgcagatctctgtacaggcaattaaggttcatt

SEQ ID NO: 26654 - DNA, 771 bp, Oryza sativa
cttgcaggagacgccgcgctgcagcggcagcggcagccgcagcccagcctctcgccttttatctcacacgctttcgtctcgtctccaccatcccagcaaccgagccgagagccctccagattttttcttttttaccccgattaaattcgtattctaggcgttactactagtagctcgtacggctccggcgagccgccgcgaacgaatgccggtgatgctctagcggctccctcgccgacgcgcgcggggcggcggaagcaggacggacatgaggaagcagccgcagccgcaggggaaccgccggctgaggtggctccgggcgctgctgctggcgctcccgctcctatcggtgcccgtcctctacgccgcgctcggggcggcgcgccccgcggcgccgccgcggcgcggggcggcgccgcaccagctgccgccgaggctggcgtacctcgtatccggcggcgccggggacggcccgcggatccggcggatgctgcgggcgctgtaccacccctggaacttctacctcgtcggggtcgccggggaggaggagcgcgcggatctcgaggcgttcgtgcgcggcgaggaggcgccccggcggtacggcaacgtgcgggtcgccgcggcgggggagtggggaccggtctcgcggcgcgggcccaccgagctcgcgcgacgctccacgccgccgccgtgatgctccgggagttcgatgggtggagctggttcatcaatctcagcgcctccgattacccgctcatgcctcaggatggt

SEQ ID NO: 26655 - DNA, 10358 bp, Oryza sativa
  unsure (1)..(10358): unsure at all n locations
gtacatattttcgtttgcttcacagtatacagtccctgttagtcgttgtggataacgtcctaattaaccgagtcaaatataactagtcaacgactcgtagcaagcagccaatcagccagctggctcgcaatatctgcagaaactagtgcatcgacattgccatgtccgactcagcaatagttaagctcgtagtagtctccatatacgaccgtcaacatcaaccattgcatgcaaccaattaaagagtcaaaaaaaggctgcaatcacatcgctcctaacccatatccaactcatctttataagatccaaccattcctccccagtgaacccaagccccccacacacacttctaactagctaggtgtgatacacagcagtgacagtgagagtgagagtgagcttgagtgatcatagccatggcattcagtagcaaagcttgccgttgcttggtgctcatgtcatttgccttgctcccactgagcatggccatggactccattggcagctactgttcagggaacagcttggccggcaacagcaaggccgtggcaagcatcaactccgtcctcaccgacctcgtcgccaagggctccaccggcggcggcttcgccacgtcctccgccgggaaagccaacaacgtcatctacggtctcgcgcaatgccgcggcgacgtctccaccagcgactgccaggcctgcctcgcctccgccgccaaccagatcctcaccagctgcaactaccaatccgactcaagaatatggtatatatgccaagtgtgatgaccacaaacatacgaaaaaacaatgaattcaggcgactgataaacttcaaaactataattattctacgtgcaggtatgactactgcttcatgcggttcgagaacgagaacttcatcgggcagacggacacagatgccggggtgattcttgtgaacgtgcaggcgatggataacggcaaggcgttccagaaggcggtagggaaggttatgggcaaggcaacgtcgcaggcatcacaggctgggagtggtgggctgggtaggacgaaggatcagtacacgccgttcatcaacatctacgggctggcacagtgcacacaggacttgtcaccgctggcttgcgcacagtgtctgtcaacggcggtgtcaaggttcggtcaatactgcggcgcacaacagggatgtcagattaactacagtagctgcagggtgcgctacgagatctatcccttctacttcccgctcgccaccagcgcacgcagcgccaccactgacatgaccaagtacaccaagatcgttgtgcaccgctaagcatccatggttagttgcacgtacatggtgatgtgcgcatgcaaaagttgcaaacacatcacgtacgtacgtattaatgttcaacgtattatgtgtctgtggatgtttcagcgtgcagtggatgaataatcaaggctataaaatgtagccttagcatgttataactgggaataaagatgtgagtactagctaagcaatgtacgcgcacattcgtgtggagtaataatattagagtttttaaccattgcattatgtgtgacgtataaagtacagacaattaattatataccacgttataaaatataagagattttacccatttaatcttacttatatagataaaatcttctatattttataacggagataatatccgtgatcttccacttataaggacaagcttggaaggcatttttatagcttcgacttataagtcgcatgatcatgatatagcgcacaaaattaggttatcatttattttaattacgtgcatgggtgggaagagtaataatgtcccccggcgatactatggtgtatgatctgctatacatgatggccaagccaccaaggactcaacagcttataattgtgacgataaaatgaacgaccagatattctttctctaacgcaaagggacatttttttgaaggatttcaatgagaatatagaacctaaaccggatgaaaattctatgctgtcacgttaatatatcgtttacacatgcctccctatcatgccctatcttcactttagttcttttttaaaaaagatattcagaagacactctctacatttcttctctccctagtcttaatattttctttagaaaaaaaatacatgagagatgcacgcacaccctaaactataaatcgaactgtcgctaatccctgatctcataacgttatatataagaaatcgtttaatgatcagttgatcactactcgatcggttcttgcgctctccaactgaattgatttagcagattgaaaatggcgctctagctacatcttactgtgtgtgtcaccatctgatcgatcatgcccttttgcactatgtttttatttgctgaatagatgaatggttgagtgattttgtgattactattaaggtacaaatgaatgaactaagtaatacaaagttgaaaaatgaacacataatagttttttaaaaattcatatatatatatataagtgtttttaaaaaataacaccatttagaagcttagatagtgtgtcatattaatccaccatgtatctccttagttagtctccttacggagtaataataattagatatatggctgtacgttccacaacttctgccaaaattgaacggagcatgtacaggtcatgaaaactacgggggtgaactttaaatgtactttctccgtttcacaatgtaagttattctagcatttctcatattcatatttatgttaatgaatttagatagatatatatatttagattcattaacatcaatataaatgtgggaaatgctagacttacattgtgaaacggagggagtattataacgacttcggtctggtcaaatctttacaaactgtgccttggcggttcgctctggagtcacatataatgcctgctattggcgtgtgctgggatgctttgaagatagagtttgctgcttacgtacatagccccaaagtccaaacttagtgccagatatatcggcaggacgatgaactagttgcggaaacgacgtgacatacctaacaaaatttcggagttaggagcgatccaaccggatataccgcccaatcagcaccgatttctatagcacgattggccagttgcaacttgcaacgagccaacgacgtccactatcttgacctcatcccgtcgactccatgccaatatgccatggcactatggcagcatctatctagctaggtcagatgttcacccttgcagctgcagttgaggatgctgcggcccagttgagtgtttggcaaaaagtgaaaaagggcctggatattcggcctgctaaagaaaccgttctccgagcccatacgtgacaggccttacatgtgtgggccgtgcaacctgctgcttgctcggcccgaaccggccggagacatcctcaccgatgacgatgacgatgagcaatgagcagggaaagccagaggcaaacgtacgtggaggcaggaggagtggtcaccgcgtgcatgcgcgccacctccccggtctgccgactctggcggctgcgcccgcacgcacaaatgggagctcgtgggctccaggaaagaccgaacactgcactgcacaacacaagcgtcgtcttcaggccgtacgtgacaaacctcagcaggcgagtgtcatggcctccgaaggcgccgtgagcccggcgttcgcctacaccgtcgtctacgtcaaggacgtcgccaagtcggccgccttctactccgccgcgttcggctacaccgtccgccgcctcgaccaatcccacaagtaaaccatcctcggttaatattttttttccccgtcttaaatttttaactggctgcttgaaagtacttcctgatgcgtgtgacgtgtaatgaattataaggtgggcggagctggagagcgggacgacgacgatcgcgttcacgccgctgcaccagagggagacggacgcgctgacgggcgcggtgcagctgccggactcggccggcgagcgggggcccgtggagatctgcttcgactacgcggacgtcgacgcggcgtaccggcgggccgtggacagcggcgccgtgccggtgagcccgccggagcagaagagctggggccagaaggtcgggtacgtcagggacatcgacgggatcatcgtgcgcatgggcagccacgtccgcgcgtagcggccatgcgcctgctcggttgggggattttagccgtgtatgttcaataatgtgaactgttctccactgatctgttgatatatggaataaaactgtgatctcgttggttgtggtctgtactccaaagtccaaacgagaaaaaatggccatgtttgatgtatgatgtgttcaatcatgaatcacatgggtaaggataggaataagttcactttatccctcaatttgtcgtcagtatgattttcgttcctgaaccgtaaaattagatacaacttattttccaacttacaaaactcgttcctgaaccgtaaaattagatacaacttattttccaacttacaaaactaaaacgtattttctaacttacaaaactagtacggtttagatagcggttttggctgacatgacgtctacgtggctagtttaactagtttaactaggtcttcatcctatagcattgacatgacacttacatggcaattatatatcggaaaaataataaaagccatgggcccagatatcagctacacaacaaaataaatatggtgggtgggccccacatgtcatcctcttccctcttggctctccctcctcttcctcatcgcaccgcagcgccacctcacagccatcgccgccatcgttgtcgtcgtcatcccagtccccaccgtctctgatgacgacggcggccgaagcatgccggcggaacagcggcggcagaggtagccgaaggaggaggaagagaaggaggtcgccggcgagcgcggcaactgtggcgggttatctcctcaggccgccgctcgccgctagtagctcttgaacacgcgggaggacttcacaagcgcgtcccctccgcgctgcacatcgcgcacccatgcacgctagaggacttcacggggggtgtcctctccgcgaccgagagcgcaacacctgcctcgagctccacaaggcgtgtggccggcggcgacagagcagaggggcggcggcgagaagagggacggcagcagagagggcgtcggcctggatctgcacgaaagggaagggcgggtgggcggcgaggagaatgacggagcaggcgagcgaggcgggaggtggcggagcgaaccgacggtgggcggcaacctcggcaaggtggggaggaggcggaggggagcgcggagaggtcgacggtgacagccggcgggaagaaggcgagcgtgccggagattgagcagaggaactccgccagtgggtccgtcgtgaaagacgacgatgacgaggacatcggcagcttggagggccgcgtcggcggcgaggatgggcgccaccacggccaacctctcgcctgcggcgccggcgttgttgttgtcgtcctccgtcgccttgcccctcgtctgtgccgcggccgccgcctgctggagccgcgtggagcgccgccttgcccctcgcctgctccggccgacgccgctctgccggcctgctctagctgcggcctgccccgccctgtcccaccccgctcagccggtcagccgctccgccccagtcgtcgcctgctccggctcggagagagaggaattattttttgtgtagctgatatatggtcccacgatttttattattttttgggataaaattgccatgtaagcgatacgtggatgccacgtgggacgaagacatagtcaaaggagctacgtaggcgtctcatcggccaaaaccgcccttcataccaccgagggacctcgtttgcccggttttcgtaagttgggggatggatcgtattcggttttgtagttaagggacgaaaataggactgaccgacaaatagagagactaagggccagtttgttttgtgaccaatgtttttggtaaggccaacatgtgtttggattgaagccaaattaaactaatttggctattaaaatggcctatgttatataggcatgtcaaaaacatacacaattattgttaaggttgcaaaaaaatttgacaagcctaatttaggcctgccctaagtgacgatatgcatggtcccatggccatatgctaccgtgttccggcccatgaactacagctaagggcctacataggtgatgctgtcagcctgccacaggcacagcccaacggctaaccactgtcgagcctctgcacgaacaccggactggcccggcacgcatagcacctgcgcaaacagagggaattttttttccatttttcattttttattttttaatatttacagaaatattgtaccgacgaaaatatttacagaaatagaccctaccgccctctctgagagtggcagggtgacgcgagggacggacaagttgaaaaaaaaaactagaaaatatatttttggtagggcgaaaattgcatttactcccttgcagcctttgtagagggcggcaaaggacctaagtgcaaaatgcgcacaccttgcagccctccacttggacggcaggggccattgtgtaaatattttggatggtataatatttctataaatattaaaaaaattaaaattaaaaatgaaaaaaattcctcaaacaggctcgtacaaggctccttccatctaccatctctttctatacgttccaggtggcgaaacgtaagagaaaaaggaaaaaaaaaaaagcaaaagccgtctccaagaaggcacagacgctatacataactccagcgttttccacttggcgcgggaacccgctcgagcggtcgagccggacggaccaacctcccaaaggaaaccaaaagaagatctcacgtcgtcgcacccaacccaccaaccacccgccgcacgaaacctgcgagcgaaccgagagagatcaccatccccccgcaccgttctggagacgtcccgtgcgcgcgccacaacacccgaaccctccacaagccttaagcccggccccgagccgaaaccgcctccgcctattcgcgccacccacatcacgcccctactcgaacattcgtgaacgccgcgccgctctgctcctatataagcaaatcccctccctttgcctttctcccccaccaaagtcgagagatcgaagcgaaaaaaaacagagcaaaatcgtcccagcgcgagcgaatcagaagagcaacaacacaactcgatcgttcatcagcggagagcttgatttgatttgatcggaagagaagaaagatggcgggcaacaagggagagggccctgcgatcggcatcgacctcggcacgacctactcgtgcgtcggcgtgtggcagcatgacagggtggagatcatcgccaacgaccagggcaaccgcaccacgccgtcgtacgtggccttcaccgacaccgagaggctcatcggcgacgccgccaagaaccaggtcgccatgaaccccaccaacaccgtctttggtaagtgccccgctcctttgcttccgccttcaattatttgatttttggtgtcaaaattatggaattagtttctttttctaatcaaatcaaacttggtaaatttaattaaatttattaaaaaatagcaacatctaaaacacaaaattatcactacatctaacacctaacattaagacctctattctctaccgttacattacggcttgtttggtaactcgagggaaagagattgagagtttacacgagaaaattgatgatgagattaaaatgggaatttgatttttaatcctatatcttgtttggtagaggcgatggaaattgatagggagtttagttggagattagatcattaataaaaatggatggatgagatttgcttagacaaaataaaggggatctcttccaattacctgcccctacgcaggtattaaaaaggagggagttccttcctcaattccccatcccatcccaccaaaatttccatgtctctcaaccaaacaaaacacttaatagcctcatccttctgaactcccaatcccttctaaaaactccctccaaccaaacgtgccaatgagggcttcaggccctagttaaaaaaaataaaaatctaaatctaacatgcaatgtactaaatattaaaatatatttgttcacatctatttatattattaaagaaatagaaaaaggagcctccacgtccgctctcatggcctcgttcgttctcatggcctagaaattctcacattaattggagaaaaagaaaaagcagagtacatatagaaatacaatttagaaatagctgaaatttggaattaaaaaataaggaatattagaaaaggagactagagtccatatagaaatacaatttagaaatagttgaaattcagaattaaaaaataaagaatattagaagaggagactagagtccatatagaaatacaattaggaaataactgaaattcggaattaaaaataaggaatattagatgtagagtatagagtccatatagaaatacaattaagaaaaaatagaaattcggaattaaaaaataaggaatattagaagtagagtatagaatccatatagcaatttaaaactaactaaaattaagaataaacataataaaattaaaattagagttttgagtccgtataaaaatacaatttacaaataactgaaattcgaaattaagaaaaacatgggaagaagagtttaaagtcaatataggaatcaattttggaagtaattgaaatttgaaattaaaaattgaagaatattgagagatgagtttagagtccacctagagatacaattagaaataataaaaattcagagataaaaataaatatattggaagaagagcctagagcctatatagaaatacaatttacagaaaattcggaattaaaaaaagaaatattaaaagacgagtctagagtagatataggaatatatataatttacaaataactaaaatttgatattaaaaataattaataactaacacgtatataaaatacaatatgaatactacatatttgtagttttgtaaacttattgcaaaatttaaaattatgatgttattctaatatatttgaataatataatgagaaaacatatatgctattacatgagaaaatatactgatgctagccgcgcaatctgcgcgggccaccatgctagttcaaaatatagctgtgttttttctataaacctgatcatttttttaaaaaaataaaatatttgattaaaacaatcaaaacaacagataatatgaaactgggaagtattcatgagccgtaggagttacacttgcaacacatcttgctctgtttcctctgttttggcggcagatgatgaggatcactagcatgaacttgtaatttaaattcacttcgattgccgcaacctgattactgtaagatcatgtagttgcgcacacgggggaattgaaaaataactcaaaaatccagttagtacaattttatatgggtaacaaaattttatatgggtaacaaaaataactcacaaatccagttagtacaattttatatgagtaacaataatgttcaaatgtcgtaacacgctgtgtgtgtcttgcagatgcaaagcggctgatcgggcggcgcttctcggacccgtcggtgcaggcggacatgaagatgtggccgttcaaggtggtgcctggcccagccgacaagccgatgatcgtggtgacgtacaagggcgaggagaagaagttctcggcggaggagatctcgtccatggtgctcaccaagatgaaggagatcgccgaggccttcctcagcaccaccatcaagaacgccgtcatcaccgtcccggcctacttcaacgactcccaacgccaggccaccaaggacgccggcgtcatctccggactcaacgtcatgcgcatcatcaacgagcccaccgccgccgccatcgcctacggcctcgacaagaaggccgccagcaccggcgagaagaatgtcctcatcttcgacctcggcggcggcaccttcgacgtctccatcctcaccatcgaggagggcatcttcgaggtcaaggccaccgccggcgacacccacctgggaggcgaggacttcgacaaccggatggtgaaccacttcgtgcaggagttcaagaggaagcacaagaaggacatcaccggcaacccgagggcgctccggcgctgangactgcgtgcgagagggcgaaaaggacgctgtcctccaccgnccagaccaccatcgagatcgactcgctctacgagggcatcgacttatacgccaccataacccgcgcccgcttcgaggagctcaacatggacctcttccgc

SEQ ID NO: 26656 - DNA, 5746 bp, Oryza sativa
gatcatgaacatttatgttattatatgtacatcattatctaaaaaaaatgttattatgtacatatgggtggcatgtgctttagtttttttttttactaaatcacgcgggaggggggagcttccccacctgaatttgtcattgcatttgggggagaaaacaatgttcattacattatattacatggaattgagagattgtagaggggaagagaaaattgctttccatacaggtattacatgtcgatcgtcaatcttgaaaggttttctgccgaaagggcagcctcagcagcacaccgttgtaggcaaaagcaactcggactcggacccgtcgtcgtgcgcgtggccgccaagcaccagctgcaccgccttggagtcggcgccctcccgctcccgcgcgcgtggcttccgcgaggcaaagcgccgaacaggtcgcgggcatggaggaggaggagcagcaactttgcagcgccatcccgccgacgacatggccgtcgagaagactagcgatgaactgatggctggtatttggaggtgaatccaattgaaatccatggactccatccattttagacccaaaacttatgacaaaaaccaatccaatccaatccacctccatcccacatccaagccgctccagtccattagctatctcaacccgtttacacccataccaagtgaatctaaattgaaaaccaatccattagatccattccaatccaactcattggcaggcttagctgcggcctttggtccttttcagctgttcttcgtcattgtatacgtgaaagactgtacatttgtaaagactcaaatagtatcgtgatacagctgcacggactgtacatttgtacaacactacagtcaacagtagactattgttggcacgccaacttgccaagtcatgttgttactaccttgtctctgaaaacaagtcccgatgattctacttgtaccagactgcccgcaccagtgcattctggttcgcttctgcatgcgtctcgtctcatctcctcatctctaatcttccatccaaaacttgaggtccttattaggccacaccttcactgacttattagaatggtttagctatgtgtaatgtgttggagggtcagggtggcgtctcgtttcggctgtcccttccatggttgcattatactagcatatcactacagaagcttcggcaccaaatatttagaattccatcatctaccacatctcacatgcaggctgttgttggagtcctctcctgcttttcgggtcaaaatggaaaatgcatcaagcgtacaaagacgtagcagcagcaggcagcagcaaaacaatgggcagaacatcatgcatcatatttacgtggaaaccattgacactgcaatatgattactcggtagctgaaagcctgaaaggcatttcacagaacaatttaatagggttaaagactgagggccccagataacaaaaaggcgagagtatattccatacaggttcttcagcaaagaaacactcgtcgttatatccaagtttgatagtactaataaatcggattaggccggttctcgtctttcccagtcttacttaaaaaaaaaatcttttccaaggacaatacatcagcaagccaaaaaattgggtagagtactaatatgacgacattgtatatagacgaaagtgaccgtaaccaatttctgctgcaaaaagatcctttttggttctaattggtactataatcgccccaaaaacaatctcatacggtacggtacagatccagcgaaagcaaaatgcagtccatgagaaaatgcaggcacgccgacatgtcaatggcagcaaagctgataaggcaccaagaacatttatggtgggctggtgaatgtccaaaccataccaaaccaaaccaagaatctttttgcaagtctaataaaaacttttctcttgctcctttctccggtcacgagttatagttgctcgcacacaaggataaccagataacacaagctggacccttaattgcttatccagttcagacagcaaccaaagaaacaccaactactcctattatttatagacactagtgatcctgggcctcctggaaatggccctgtgcaaaagcgagctagtataagcggcgcttccacgatctgaaaacccagcttatcacaagagagagtaggatgtgatcatcatcatcataagaccgaggtcagggccccgttccgtcggcgagagcgagacacccgcggcatcacgccaacttgcgctacgatacgcggagcggagagcgtcctttgggcgagcgaaaggccggcttatcgaaacggtgagacgcagatacgtgggcaacggccaacggggccaaggtgccgcttcgcaatcgctttcagatttcagatcctctactactactactactccccatctctctatctcttgcaggtcaacaaggatcgaattaacaagggttatccgcttgtaagcatcgtgtgatcgtgtttatatcggataggagtagatagcggtgatgaacatgaagatcctcgagtgggaacgtcatggaaagggagggcttaaaatgatgaaggcttggagccagaaatgacgatgcttgcaccgtgttttgatcccaattttttcttcaaaatctcaactttttccatcacatcatacttttttactcacataaactttcaacttttctatcatatcgttccaatttcaacaaaacttccaattttgacatttcaactaaaattttaattttgatgtgaactaaacacagtggtgcattatgctcgtgagatcaatcagctgagatggtatcacaagaggcaagagaaatccagggtggccagctgtatggtatagccaggagccagatgtgaagtattccaaacaattgtcactttcaggaaaagcattactacaaagccgatgggtcagctttcacccagacatttcgttagggtaaacaatttgcaatgtgcttgtctgaaacatggtacaccgataataatcaaacctatccaaacggcgtttcgacacataaatatcgtaaggaaggcgtgagattcagtcaaacgatctaatccatgcaaactgttacgcattcgagagaaatattcaggcagaaattttctgaggttgaaccgaacaaccatactgaatgatatcagatgaaaactgaagtactcgtaactgataggtgctgatcatttctataatgataacatatataggcacattggcaccatcaatcacttacacttgccttccagcgattaatggaaaacgttcacaagtgctaaaaagctcccactaattccaactaaacattggcaaatcctagaaagcactgataagtactccttttcctagtttccatcaaataaatgagatgaaatttccaagaatgctcacaagaacaagcttctcacctatctatggaatgcctatacagttcttcaggagtcaattttgtagaatcaaaccgctcgagacaataatgcacatacggaagcacatcgagcgggcaacaaactatgcatacacagaaattctaatgaaaacaaaagataatacataaggtattcccaaacaaatatactgaaacgaagatcgaattaatccagatatgttccttgtgatatgtagcatggtcctacaaatgtttcaaatgccaaataccagaatgcttcaatcaattacgattgtttccctttccctttccaattagcaaaaatgagagcaattttcttgtatgctatgtctctgaacgtctccttgcgagctgagggttagcagacagcaaaacatcagtcaacagaagttgacaataatcgatttctaccagctacaagggcatgcaccacacaccttgaacatgttaagactggcaccatgacgaggggggcctcatggacacatgaacttcatgttcttcaggaccaacacggtattttggaacaataatctctaggcctgttcctgattcatcacagtatgcttctaaagtagcatcttccgggatccgagtagggagtggaatttcccgaataaactctcctggtggacaatgctcaggtgtaggatcgactaacttgaaggtccggtcatgtctcttcaagaatggcatccggccaacactagtgcatgataccttaactatcccatttgtaagagtattcttccatgaaaccttcaccctttgtatatcagcaaacggtaggctaatgatgatcaagtaccccttgctatcttcatagattgtttttgctgcagtcactggaccagaagcatggcgcatcacaccagtgaagtcattcatccatgacggctcgaacgtgtggctcacttccatgtcctggaccttgtctgaatttgaattgctgcaatcttcttccatcgctgtgggggaggaatccttccggcgcttgttgcaaatatttgggatgtccagaccatccccagagctgtgattcgatggctgtgttgacaggttaaggccagaaccgttgagcaacttcttgtgatggccatgtgagctagtcttcgtggcagcagtagttgctggcctctcaagctcaaaatctgtgctaggaagatttctccatgactcataatcactcgcctcagcatcaatcgagaagttagcgtcccttccggtgagctctgtccacctcttcaaatcagcttcgggcacaccagccaagtttggtgcccggacgatctcgatcccgtgcaggcactgcgggttggacagcccccggtagtgcttgcgctgcatgcggtgtgagcgcacgaaccctttctccgcgctgaacgggaactgaggctccccaaggcgcgagtgcccgttcatgaagctccttagctgcatcttccccagggcattctctggccgctccttgaacacccacatgtacatgttctccatgtcgtgctgcactaggaaagcatccagcgtagcattattaccgttcccaccggcggtgggggccttcgccttgccgttcttgtcagccgacatgaccggcttgaagtagtgggtgaagaagaaccacgcgccccatatggtatcgttcctcttcacgcacttgcgggcagcgctggaattggagcccttggcatgtgatacggcgaccgtggtggtcgcggcggccggggcaggggacacgccggtggtggcagcaggtgagtccgagtcgtaaagctgcgggccgccgaggccgacatcaagcatgtcgacgttggggtcgtggagggcgccggactgcagagccggaggcggaggggaggggtcggcgtcgagggggaggttgatgtcagggggggcggcggccgcggcatggaggcagcggcggaacggccccggcggcggcgggaggaagaggtcgaagtcgtcgtgggaggcggtgtccatggagaggaacgtggaggggccctggtgcgggtggtgggccgtggtggtgtccatggagagcgcggtgagcagcgactcccccatgacggcgtcggccggcggcggaggcggagggggaggagcagccctcttcctgccctcgtcgcccgccggttgctcgtcgtccgtcgctgctgcgcttctcgccaactcgtcgccgcttccgcctccaccgcctcctcaccgcgcgctcctctcctccgaatctctccacgagcatcagcgactgggcttcacacctccctcgcgtccatcacacagccgtcgggttgatacgaaaaacgaaaatctctcctcctgcac

SEQ ID NO: 26657 - DNA, 9917 bp, Oryza sativa
gtgttaaaggcgaccacccacgggggggggcgcaggcgccctcccccagaagcgccctggacgagggggggtggggtggggggccgttacttgacggtgacgcccccctccccctgcgtcgtggtggtggtggtggtggattggcacggcccggatcgcccggccgcgcacgcggcggtagaggcagtgtgcacacgataaatctcgccgcgcggaggcggtggtagattgatggacggacggatctcctctcctcgggaggattctcgggaggattcgacctgtttggcagctccacagttcaaccacgtagtttcagtttcatctaaaatggaagcatgatcagatagagcgctctcataaataaattagagatgtggagctgggtttagacaactccacaaattcactcaagatctaactcttagggcgtgtttggataatgggttaggagaaatgggattgggaaatggaaatgaatggagggataggatgaaatggagtgagaagaatggatggctaggattgaaacttactctttgaggggtgggaaatcatatcccaaacccattatccaaacacttccttagagttaaattcaggagttttaagctctatcaaacaggtcctaaactctcgaggagatattccctcgttatttacatgctatcagaataattatgaaaaaaattaactagatatattaatatatgatagattactccgcaaacatataagttaaaataagttgtaaaaatacctaattaaattataactagttaatgtctattcacaatagttaaatttgtttttagttgcaacatgtagaagttaaatttaatcttgcatatttgtgaagtaatttataacatggttcatccgtttcatgttataagatattttgattttggtcaaaatcaagttgtttcaagttcaattaagtttatggacaaatatagtcatatttataatactaaattagtttcatcaaatcaatgattgaatatattttcataataaatttatctttggttgaaaatattactattttttttacaaacttaatcaaacttaaaagaagtttaactttgacaaagttaaaacgtctcataacattaaacggagggagtattaatctatcttattaagttttattaaaaaaaattataaccacttaaacaacgaaagcgtctcaccttcagagtttagaatagttatctgttctcctccctcccccggtcttgctctggccgcctccccctgcaactttcccctttttgttttgtttactcgctttgttttctctgtgtgccagcgagccatctctctgcttccgggtttctttgggagttggggataaaataagagggggtgattctcaactctgcatgggcagcagcaaagaagaattggttttgtgtgggggaattattatatcatcacaactgtcagtactagtaatacagtagagttttatcatataatactgctgttttggaaatgagagtacattaagtactcttacatgtaggccgtgtttagttttattttatttttttaagtatacaaacacatatttaaagtattaaatataaactaataacaaaacaaattatagatttcgcatgtaaactgcgagacaaatctattaagcctaatcaatctatcattagcaaatatttactgtagcaccatattatcagatcatgacgtaattaggctcaaaagattcatctcgcaatttacacgtaatttgtgcaattgattttttttatctatatttaatgctatgtgcatgtgttcaaatacttgatgtgatggaaaagttgaaagttttaagtgaactaaaacagccgtactcataataggagtaatagtagtacttaacccggggtatggtggttgtttgaccaaaaattcgtgactttcccatcacggctttgcaagtagcatgatgaaatgctactatcatattcagatttgcacgataacttatacaagtagtatagctggtttagcctctcgttcaggtttctgaggcctttaacaatatacaagtagtgccggaatatatcatatgcacacgatatttttcatgtatactatatgcataccaactatctaatatcacagaaacttttagaaaaaattaaacacatacttctaatagtattacacatacatatgtaattttatctttaaatccattatattttagctgtaaaaaaaacaaaattctgacagaattttacactttaaactgtcaattttttcgttttttattacggttaaaatataataaatttaaatatgagattttgcagatacgtgtaatactattaggagtaaatgtctatttttttttagattttttcgtgatttgctagttgatgtgtatgaagtgtgcataggaaactcgtatgtatacgatatattcccttacgccaccaaactaacggccccagcggcggattcaccctctggttagtatggataattgcccgggctctactgcatgatccatttaagtctactgatttcgttgtaaaagtccacccatttactaatttccaacaaagttaacatgctaaactcttaattagaagccttgaaacatccatgcttcactatgactaacgtgattgactttgagtaccaaaatcgtccatttttattataaatcattaggtttgaactgtgaaaattttgcatgcatgttaaactatgcttttactagaaaaactgttacgtgtttaatttggtatataaacgtttaataaatggataatggttttatacaatttatatggctgcgttcggagcatggtttgggaacccatccatacacgcaaaacaaagtgatcatgtaatttatgattaattaaatattagctaaaaaattttaaaacattgattaatataatttttaaagcaactctcgtatagaaaaattttataaaaacacaacttttattagtttaaaaagcgcacataaaaaaacaatggaggtgaggccatgtttagatcccaccgtaaaatttttcatcctatcacatcgaacgtttaaacacctgcataaagtattaaatataggctaaaaaaataaataattgcacagattgcgactaattcgcgagacgaatcttttaagcttaattgctccataataatgtggtgctatagtaaaatatttgctaatgacagattaattatgcttaataaattcgtctcacggtttacttacggattatgtaattagttatttttaagtgcccaaacaccccattggacaccatatataatacccgatatgacatgtcaaaactttacaccatggatataaacacccttgagttagaaaagttagggaaagaaatcagccttattaacttcttagggcccgtttagttcccaaaattttttttcccaaaaacatcacatcgaatctttgacacatgcatgaagcattaaatatagataaaaagaaaaactaattgcatagttatgggggaaatcgcgagacgaatcttttaagactaattagtccgtgattagtcataaatgctacagtaacccacatgtgctaatgacagcttaattagtctcaaaagattcgtctcgcggtttccaggcgagttctgaaattagttttttcattcgtatccgaaaaccccttccgacatccagtcaaacgttcgatgtgacacctaaaaatttcctttttcaccaactaaacacacccttattaacttgttcaggcttcacaaaatttctaacaccaccgcaccacgaccctactttgcatatcctgtaacggccacatgacgcgccctgccaacaccgcctgcacggaaaggaacatctcctccgccctgctgcactcaccccgtttttccgcccccaccccccccccccccccctgggccgtcacgtcgccccattcacgtgaatttatcctactaacgtgatacaccatgcgccctatcggtctcgcctcccccgttcctcactatcagccgcgctgatgccgcggtgttttccgcgtgatccagcgcccgcgggacgggaggctggccggtgacgcgaacgttgctggaaaaacccgcgcggtgcgccggtgtcgcggtcgcggccgaacgaacgaacgtgtggccgcgcgcgacgcagtgagagccagtcgtggcttctactcgcggtacacgaatacgaggagggatttctctcgcgtgtggcttggctggcagcgaggtgacagtcacacgggatgggaggagaaggagaggcgcgcgcgagcgatgggcctctgtttgtgtttatttacgcggagataaggtctcggtcctctcggatcgaacccaactcggggaggcgtatctgataggaggaggaggtgctaccttctcgcttcacgacagggacggataagagcaggtacaatagcatgctataagccaactataaacatattttaaggctacatatctgtagctagctgtagaacggactccaaaacgtaatgtgtgaatgatatatgggacaatgtattaatagtatagtaagcaactattatatgaattagctgttacattagctatagttgatttggagtcagtagtgggctacactattaaacttctctaataaacgcctcgtcaggcgtggctggaggtttaaaggcaggggagtaataaagtggatcaggttgctgacgccgcggaatataccgagaggacgctaagctctctctgtgtgtgggggtgattaggacgtgaggattgcccgtgatctttcgccgtaagctcggaacggctagttggccacgcatgtcagcatcgtatgattttatactgttttttttttctggttctattataaattggggatctgtggacttgtggatactccctgtctagacaagccggaacggtgttgcttctgccggatggatacgtcgatacatctacatggcgctcgtggtctcgtagaacataggggtgggttttatgatgatgattagtgacaggtcgttcgtttctgcagttgcacggctgagattgcaccaatcatggtttacttttccactaaccgaattccacggtgtcaattgtaccacactacccattaaataaaacaagaactgtaccacgctacattttcagctgttttgagtaggacttgtgagtttgagcgttgagactgctccgatcaacaggccaatgatatcgttttggcgacaaatcgccgtcatattataaattttctaacccaaaaggagcgcgatactgcaacgagcaagtttgacccggctaaaaaaaattaacgatcttgctatatttttgtcaataaatttaaattttgacagatgtaaatatagttcaatcacattataattatattataacttgtatgtaactgcaatataattttaaatcattcaatttgctttaaaatttgtgcgagggaggtaagaaaatacttaaacccacacacatgtgaggggattcgataccattataccttctttttggcaaaatagcatgttgtcatggttatggatatcacgtacctaatagtagttgactaaatctcggcaggacccaccacataccatgtcctatacggaaactgacttcagatatggaggaagttcaggataaggaaagacaaccagagttctacatggaaacgacaagaactactcggattgtatccatattggtttccttagttctacttggataaggggacacctatgggtataaatacaagcccccctaggaggagaggggggacacccaacatgagaccatggaagacacccatgacaatcaacacacacccaccagaagccacaacatacaagccaacatacgccaagacacgccgccggatatcgacttcaggataggcatggctattcccctacggatcctccggataccgtcaggagatacgaaagcgctatctctgatctcgccgggcacggatttgaggaggaagactaccctgttgtcgactacgagtcagaccttcagaccgccatgtcgacaacagttagataggctacccacatattgtactggtgtaattatggtgaataagagcaataccggtttcggccaacaggatgtagggttattaccttactactcaggggcccgaacctgtataaaaatccctgtctccatctcttttacctcagtctcgcgtatatcctagcaccaacgatcccatactgtccaaataccgtagtcgagacatcaaacgtcgacacatgtcacctaggatttttaaaaaaatacatacaaattatactatagttacatgcatcttacaatataattatatttcaattttactttatctgtttcacaatgtaagtcattctagcatttccaatattcatattaatgttaatgaatatagacataacatcaatatgaatgtggaaaatgttagaatgacttacattgtgaaacatagggagtactatatttacatttgctaaatctttttaagttaaaatttaacgataaatgtatagttagtcctaaaattaagcgagattagacggccagggtcactaaattagctcccattttctggcccaaaatagtctacacgaatcggccctggtaatgatgtggcccacggagcgagccggcccaccaccgcgcgcgagggagccggaggaccacgcgtcgcgcgcgccgcggcgccgcgcgcatcggcctcgacgacatcttcgcgggggaagcagcgagcgaccgatgcggcgatgcctctgcgctgcgcgcgcttgtcccgaccaccacctccatatataccggcgaggcgggaggcagggatcgaacgcccagcgagcggaggagaggagaggagatcagggggaggaagggtggccggcgcagcagatcggggcgggcggatttaggggaggagcgcgctagccgggagcggcggcgatggatgaggagtacgacgtgatcgtgctggggacggggctcaaggagtgcatcatcagcggcctcctctccgtcgatggcctcaaggtgaccgaatcccatctccaatctctcgaatgcaccctctgattgcaactcgacaatgcgttctactgctgctggtgcgtgcgtccgcattagtagatctcacggtgctgaaagtgagattttgtttcgtgctgctggaaaatttggatggttttacgcgtacgaatgtgaaatgtgtacctagactggatggcattgctgttgttcaggaacacaaatggcaagatcagagaaatattaggatttgctttctttctctttaaagaagaaaaactcgcacatatcttctacagattctcaacataaatctcgaccccagttaaaattataaaaaaaatggaatgatctcataagatcctactagtatattttagtggctgcccttttagacaaaaggaacaatgtacagttgtacactatcaagtcactgtttttgtctcgttcttgtgtatatacaggtccttcacatggacaggaacgattactatggaggagaatctacatcccttaatctcactaaggtgtgataacgtgatcatcttgccaacatttctttctctgtgcagtatataggaagaactgcaaagaccatgtaattttttcagcaaatctgatgttgtgttatctaatatttttctccgttcatatgatatgtatagctctggaagagattcaaaggcaacgagaccgctcctgaacatctgggtgtcagcaaggagtacaatgttgacatggttcccaaggtccgtcatcactggagcgttctctatcttccctgaatttttgcttacacgcaacttgctacaaattattcgtctgcagttcatgatggccaacggtgcactggtccgtgtactcatccacacgagtgtgacaaagtatctgaatttcaaggctgtcgacggcagcttcgtgtacaacaatggcaaggtgtggatctgatattcatatgttatgcaactgtcaaacattggtgcattttctgaattactgagtcacctttatttgtttggcgataccgacagatccacaaagttcctgcaactgatgtcgaggccttgaaatctaatctaatgggcctttttgaaaagcgccgtgctaggaaattcttcatatacgtgcaggattacgaagaggatgatccaaagtcacacgaaggcctggatctgcacaaggtcacgacgagagaagtcatctcgtaagttgactaagttgctgactgttaacaaacagaaaacaagttgtattttgccaccatttcttatgcaggcgttatgatgtttgcttgtcagcaagtatggcctcgaggatgacacagtggactttattgggcatgcattggcacttcatcgagatgataactatctcgatgaacctgcaattgacactgtgaaaaggatgaaggtactatatgccccctaactcaagaaaacatttgagtctgcgtatattctgctcactgttgaaaacaacgatgctttgatcaattctctatgcaccacaactatatagtcaaaaaaaatccgagtgttatgcacttatgctgttgatttagttaatggttagttgttcttaacctcgtggccagatgaagtgattgggtgcccttatgataatgttcagtctattttatggaataaaaaatatatgattccacatggcagatgattgcaaatatatcatcagcttatattgccgtgcatgtggaaggtggaattaacatccgatcctcacatttgtatctgtttcaatagctttacgcagaatcactcgctcgttttcaaggaggatcaccttatatctaccctctgtatgggctagcagagctccctcaggtatgctcagttcaaataatctggattctccacacagcttcagcttcattccagctgaaactctgcatattgtaataggcctttgctcgtttgagtgctgtttatggtggcacatacatgctaaacaaagcagaatgcaaggtaaccgaagcattgctcagatgctactttggtactttccaactatccagatgaatgcttataattctacggtcgttggcaggttgagtttgatgaaaatgggaaagcatacggtgtcacttccgagggggagactgcaaaatgcaagaaggttgtctgtgacccttcatacttgcctgacaaggtatttataccatttagactcattttgagatattcaggttcaatttatggtagtatatctacttaaattcctgtcaacaaatgaacaggtgaagaaggttggaagggtggcgcgtgcaatatgcataatgaagcatccgattcctgacaccaaggattctcattccgtgcagatcatcctcccaaagaaacagctgaagcgcaaatcagacatgtaagcaatttactcgtccctcagttcttgctgcaacgacagccatcaaagtctattgctccatttctgagaacttatagcgttcagatattgcataattcacactattgcatatgtttcatgtttggtttcaggtacgtgttctgttgctcatatgctcacaacgttgcaccaaaaggcaagttcatcgcctttgttctacggaagcagaggctgacaagcctgagatcgagctgaaacctgggatcgatctgctcggacctgtagaggaaacattttttgacatctatgaccgatacgaacctactaataccgctgacgaggacaactgcttcgtgacaaatgtaagttcagcaaatcagcaatttctctactcggccacactgcagtattgttgatgagcaccttcggttcttacagagttacgatgcaactactcattttgagacaacggtgaaggatgtgcttgcattgtacagcaagatcactggg

SEQ ID NO: 26658 - DNA, 25954 bp, Oryza sativa
gcttgaatggatctgatttgggggaagaaattggcgctagggttccggggagagagagacgagccggccggctggaggtggagacgcgcctgacaggcgggtcccacgtggggcgcgcgtgagggcgccgccgcgcgggggagcgcggcttgggccgggaggcggcccaggtgggatggggcggggagacttgggccggggcaggccgggaggagaagaggggcagtggccggcctggaaggagggaaaaggaggaaggaagaagagggagaggagtaggactttcggccgcgggccgaggggagagaggaagactttgggcccaaaggaaaggaagactaatttttagtttttctttttaataaactgtgacaattgtttttttttgcttaataaatattttcggtgctttgaaaattcatgtaaaatttgagggatccttttaaaccaaggagaatttaagaaaaatacgctggggcacattcaattttttttcttgtatgcattttaatgtttgccaattttttttttcaaattttaattaattatattattccttttggagaatgatttttaattcgggatgaatttatcaggacgtgacaaatcctcccccattacaagaatctcacccccgagattcgagaaggctacaataagataggtagggcggtcttctcttctttgtccggcttcttctgttgtatcttctttagcaaacttgtccagcaaaactacccaactctgaactgcttggtttggtctctcggtgcagacgaaatattctcttcgcctgatcttgaacctggttgcacctttagctgatctagactgggttgcggtacttgtagatgaggcaacctaatagttgtggcatagaagggtgctacctaaggtgatgtttgaatctcccgaagatgaagataaaaatgaagattaagtgtaacgaggtgataataacgtgtgattaattaagttttaattattacaaacttgaaaaataaattaatcttatattttagaacaactttcatatagaaagttttcgcacgaaacgtactgtttagcagtttaaaaagcgtgccactttaatctaaaattttatccacccatttcagtacattcgaacgggccccttaacacacttaaaaaactatttttttgaatactttctatctaaagtttatttaaaataaataaataaatctatttttttaagtttgcaatagtatagtgcatcgtcgagtccttaaacttgtacgatcgtgctatttaagtccctaaatactacaatatatattcaagtttgaacttatcaaagtatgccattctggttccaaaccaccatggcctctccgagatccaacctagcgacgacgtgacatcatcactactctacactcaagtagagcctcgatgtccacatgaagaagaggagaaaaggaaatgaaaaggaaaaaggataataacaaaatttctgaacagaccctacttgttagtcatcgtaacatcggtgaatatgccatgtcagcattcgtctaacgtgccatgataacgccatttaggatctcgaatagaccatgacaattttgagaccggaataacgtactttggcaagttctagacataaacatatatcttgagagtttaaacatctagattatacggttgtataaatttagggaccaatccaatactttactctctaattaattatgcgcaacctaggcatatattaacctctctaaaccgcgtaggatcgctgaaaatttagagcatcacatcagccattgttttgcaaaaaaaaatcctgtatctcaagttaattatgtatcgatcctcgctacccttcaccgatcctgggataggatcgatctgaccgtacaggtgtcctgttctacctagccatatattaaaacaaggagagcggttgagaacaagcacttccgaacgcagccttaaaatgattttcacttcaaaatgtaaatctttttttctgttacagttatgcaccacccggaattgtgaacgcgttgttgaacaactctggccatcacgtgccttgggcagaacaagtacgctcctgatgaagacccggagccccctctctcactctgatgaagacgaaggtccaaggccgcggataaagacaagaccggaagccgcggcaacccaccctctgcaaaatccccaaaatacccctacaaaaccccacaccgaaagcagcaaaacccacctgcccactgctcctccactcccaccaccaccgccaccgccggcgagatggccggagcgagacccttcttctcgccgcacgaagccttcgcccgagcctcgacggcctcctcacccgcggccgccgcgaccgtcgccgtcgcggcacctgctccggacccaagccccgccaccggccacgccgatgctgccgaggtcgccgtcttccgcctgctcctcccccaggccttctccgatgccgacgccatgcgcctctacgccgccatcgccccgctccgccgcctcttccccacgctgcaggtccgcgtcgagaccctcggagtcggagcctcgtccgatgatgccgacggcgacggcgacggcggaggtggtggtggtggtggtcgcgtcgccgtcgtcctcggccccgcctccccggcgcgccgcgtcgaggcctcctcgtcctccggggagcccctcgagctctcccccgcgcaggaggccctcgtcgccttgctcgacagcggctgggtcgtccacctcaacggcgaggcgtggggagcggagcggatgacgtgcctcgtcctggtcgaggccgggcgcctcgaggcggcctccgggaaggggatcctgtggacgatcgccaacgagtccggcgccgaggtgcgcgtcacgccgtggggtggtgagggcggggcggcgtacgcggcgcagccgcccgaggaggtcgtcgaggtataccactctcactgcgcgtaatgccccctgttgcttcgattgttatcatacactgttgcaaaattgaacctacgttggtttctgcggcaattgggcaagtagagattaaacaatgtgtgggcgtgcttgtttacgtcaagggcttagggggaatttggaagatagcgagtgcagcatgttctacaggtgccatttcagggtgaaaacgcaaaaggatgacacttttttaggggaggatgagcagctgcatactgtggagcctgaacaatcatgtggagacatgcatgatgatttatttgtgtaatgtttagggcactctcatgaatgcattctaagcaagagcttggcacacttagcaatgcttggcatgtgatgtgcatgttccttatgtgatatccccatctgtgaaaaagtatgttcgagtatttccctagtgcactgtttactgtcttgaactcaatccttttttgagttcttgtttcatgcgtatgctttggatttattgtgatataggacggtgaagtttgacaagagtccatttctgtttttgtttcaacagctgtatggaatatatgaaataattaacttattaaaggattgtgtgtggataggttatctacacaactgataaaccatatgcttcacaaacacgctcatccatgtctcatggtctcatctgtgaaccacttcagcagtgactttatctaagtggcttctgattccttatttgtgatctgactggtgaagtagagtataaaattattgatgtgcgttatcagtaagtccaaaatgaataataaggacctttttttattttatcatgttctaattaatatttactgaactgctgttaatggaagtcatgtaaatcattcgactaatttttttgatgagtgaactgcgtactggagacggttaagaagtaacaaacaaaaatgttgctagggattaactgtcttttccctgttctatgtattttaaaaaataggttatttttacctcctttgtgtactgacaaaattttatgttgtttatgttaatctacagttataattcattgcttcttgatgtaacttcagataacaggagatggaaccactgtaaggagagctcttgtttctgtgtctagctgtcttcaaggtgatgggccacttggcagctcaacttctgctcattcagtgaacccaattctcacacaaacatttccaaaagtgcctgagcctgaaatgggatctttgtattcagatatgtcaactgagcgtgcaaacaccagcattcctcatattgattgtccacagggtgctacaggaattgaacaaactgaatgtgtcatgcaattttcatttagactactctgccctgtaactcttgctggaggtttgataggaaagaatggcatggttatcaaagcaattgaagttaactctggtgcttctgttgatgtcggtggacctgttcatcggtgcatggaacgtgcgataacagtatcagccttggaggtttgaacatttccccataaatgtttttatgcaccatgtttcattgcgtgatgtacatagcataattttgcagcttttatgatggatgtttaatgtagaaactcttttgattttatattaattcttgtgagctttgttgtgcatttgattcattataactatggtttcttttcactcatgtagaaaccaggacagaaattctccatggtggagaatgcggtacttcgtatatttgacagaatgcaggtggtggaaagcaatatgcattcgagacccaataatccattgcattgctctgccagggttctaattctgaaaggccaatttggttatttagttggtccaggtggttcactaatcaagcatatgaataacacaacaagaacaaaaatgaaaattttagaagagactgctgttccagcttgtgcctcacaatacgaactagttctgcaggcaagcacttttctggtataatacaaaacagtttttgttgtacttgtttctgctttcatgctaagtagagatgtgagaagacggtgacagtatttagggttaacctgatgcatctaatcttaaccatctgatcctcttaatttttgttcaaagagtactcaatgcatagaggcatagactcagtagttcgcttcaatttttcacttctacttctcttaattcatgatcggttgatttctgatccttacactcttactatgttttgacagctcaatacttatttagtttggtattttcttttctctacagatcactggagagccaatgaatgttagagacgctttatctcttgtttgtgagaaactacgtaatcattgcttctcttctgagaaaacaacctacggcaatggtcatgttccctcatcggctattgatgaattaactacaagcagccaggttaatatctcttcaactggtcaatattcagctggcaatttgtcaagggttgatcacaggctttctcagaatgaaattgactcggtacaaaactctatcagcgccttcgacttgggatgtttgggctccccacaaattcaggttatgtattacataccttttccttgttatacatgctaaagtttctcttccttcctggatttgtgtacgatacatgcatattatgttctaaatgtttaaagagcaaaactaaatcagatgttgtacaagaaagttacatattactaacctatcaaaaactaatttgatattatgcatttggtaaagttgcaaggatcattgtagtggtctggaatgcctgtgtgaagtgtttctacttctgttgaattcttatattatcaaatttacataatttctatcttttgctgctgtgactgtgagcaacataagttgcagtaaagagatccctggctgtgttcttttggctgtgttgggaacaaatctcctgtgcacggaaaacaaagtgatccattagcgtgtgattaattaattatctattattttttttgaaaatggatcaatatgattttttaaagcaactaccgtacagaaaagttttgcaaaaaaacacaccatttagcagtttgaaaagcgcgtgcgcggaaaacgagagaggtgagttgggaaagttggggaaagaactcagccaaaactggatatttaagatatctgtcatttttttactgcaagtgcaaaccaagtcctagcctaggtgctaatcaaacttatcctctgctaatgttttgctcattataaaactgtcatatatttgagtcattcttttatagaggacgagtgtttggaaattttagtttcactcagagctcactgctaaatagatcgcatagagcactcatgcaaatatttgcaaagtgactagtaccttttattgctgaataggacacaatgaaatatttttgtccaattatgtatcctcctgtcactttgcagcctattataaattttgatgcacggtttttctgtggaagtactaaacaaatatttggatgcagaaacctaccattgggtgtggcactgagatcaacaacccaattaatgaggtggagaaaccagctaatggaaatggcactggaattaacaatttgaatactgggatgcagaatgaaaatggaattgacgtttcaaatcatggagctacatctctggaggaaaaaaaacttttgaggtaatagtcatatttgtttgtaacccatttctacccttgtccctttagaagtggtcattgcgtaagattattttataacagatcctgtctatggcacttcaatttttttcttgtatgtcaaatcacaaaaaccaatatcgtcttgggttcttattccattttagcataattgtcagctatttagtatcatagatctttctatttagagcccaagacgctactagcaccctgccatttacgtgagggatgcactttactgcttagaatgttgtatgtacagtcacaggaatgcatttagggttgctggatgcatgtactacttcatgggtaatgtgtttacagtctcaagcgcaggcctggattatcagcaaactcactgtttatccagaaattaatgcttagagcagcaccaaactgttgtattcaaatttggtcttatattaatagtttgtactattttattatgtcttgttcttcaagtcctgtacaggaaacatcccatggcaaacttcaaacagaatatctattttggtccaatggaaaacaatgaatagcaacaagtattgctgtgcacgattaatcttctgtgctctagcacccttgtagttgtgattgaactttagcaattcaatgtattatatatgcgtcacacaagtggttccaccagttatgtgcctaatactatatatttttataatattttgttcttgatgaagtaatgaatttgcaattggtactgtacatgttttgaatatagcatgcatgtcttagttaataactagaagggatcaacaaagggcaaataacatcagctgtataaacttccattcctatatgtcacattcctttggttattttacataatggtttgtgcatttattgatgctatgctttagtgacctgtaaatggcactaactacaattacaatgatttctgcttctggccacagaggaatcaagactgccaccataactaggatcacatatgaggttgctgtttgcggagataatggaaacgacttcactatgattagagaggtattaacggagaattatgtgatcgtgtatgcttattttgattgcctttgagaatttacttcaaataaatgctggtgtttctgagttttatttttttaaaaaaaattgattaaatgcttcctggattgggaaaaagaaactggttaagtcattacgttttgaactcagaactgaccttgctgatcatgtgtgttttcaaaatgctgtactggtctggtttagtaaagacacctagttcttcattctagaccatttaaatggtgtgcagctttaggtgttccttgatttggaaaatctgaagaaatttacatttccagcctctacatctatgatgcattgatgcatatgatgtacgtagccattaagtttgagattaaacaagggacagaacctcccaagagattaaataagcaaaacacgagattaaatttacactgttagggcctgtttgatatggatgaaaggcgctctaccatgatgattaaatattgtatattataaacctaacaaatactagcttaaaacaagtggtgtaaacaatgctgatgtagaaagtttttggagatatcatacttttggaagcataccacgaataattgcaaccattaatctaagcatgaagcctgttactagcttgttgtccaaagagggtgaataagcccctagaggatgacgatagactgttgtccaaagagggtgaataagcccctagaggatgacgatagactctaagagtgtggctgcgataagcataatatttttgttctctttgatactgcctcgaacaccatacacagagctagctgatattactaggaaagtatttacttcaattatcctttgtgtttttgccagttctatttttctgtgtttctatcccaactctttcattatatgtccgcgcaatcttttttctttttggaccagtaagttcaaaatttattgattgccttcgaagttacattgctgattttctactctgattggtattgaactttatggagctaatctaccattttttattttgtgaatactcagatgtctggtgcagacgttactgcccactacccgcttccagagacgagtgacggtatgatcgtgatatctggaacgccagatgaggcgcaatcggctctggccatgttccttgaccttgtcaaagaggggcagtgatcatcatcagatcttcatgcattagccctgattctgctaacatagatcactgttgggatggatctgctaacattttgctgacaccacgagatgttcttgaggttaactgacaacattttatgtgtaactatgtccagtaacgacaccacgagactagggttcatcacgggacaccacgaggcagacgcattcctctgtttgctgaatgtagcagcagagcaggcgcgtgatttatttatgtttctttttctttttacttaatccttttgtgctcttgctgctgggggaggccttaattgagatggatatctgcctatttttttgcatgccatttttcccttgttgacggtgttgagttttgtcgcgcccgtccaggctggggtattacagttggtaacttgatggtgagttatgtagtagcacacgggggtattacaaccttttgcctggatctttcggaagatcggagtaagggtaatatttggaggttggagcaatgagcaatccatcgatacatcgcaggctaaggggttcgggtcgattacctgcttagagaatcaaattacccctagctaagcggcatgaaaattattcagcctcttgtgctcgagcgtttgtcctgcaaacggtgagtgaaagatatcacgaaatctttcataattatatcatcgagtatttaattatggtgatatgtgatggtatcaccaaggtatcagggcacctcatgacatcccatggaatcatgaattcatgataacacaaaaaaaatatgatgggagaattctcctttgccactcattgcaattgtactctcttcctcatccaaatctttccttccgtttctttacctttattttgttagtgtgctcttttgttttgccatggctgttaggtcaatagtaattcgatctttaacttaattcttaaaagaccattatgtcctcctagtccttgtagatgttcagtagcacttgaattttagcaaacaccaagaaaaggccaagaaatccaaatatcggccactacaaaaagattattagaaaatatataaaaatgggcattacgacgtaattatttttatcctaaaatatagcaacctagtcctgtattgaacacaacctagttgacgagttgttctgtgtctgcctaccaccacgccatcatcgccatgggaacactggctgctgcccaaacgcccctctgcatgagggtgcccatgcacaccccctcactaccacataaactaccacataaacagatattattgtcggctcatcactgttggttttatgataagtggatgccagatcaaaagattaatttttggaaatgaactggaagtgatgctagtatccctaccaattcaactttcaatgtcagttcatcacattaatcggtagtgataagtgaccgttacatctaaattaaagggttaggattcactgctctaatttatataaattggacaaattgccagtctcactgttccatcctcctctctcccctctcatcactcctctcaccctcatatcccctcccgtcactcctctcccccctgatttggtcggcggcacccgccaactcccatcgtgccacccactgccatcccctctatcagagaaatgagaactagggttcccacttcctcggctgctcgaggtactgcggagtagttaacgttaaaatttggtacggttctttagtgaattcagttaaggaaagaagtccttaatcaagattgaagtagatggaaattaatcgagatcaagctgaattcaaagatgactcgtgaagaccacgacaagtcagtttcatatttagtatatctcttaataggcaggttaaattattttccttttcttgctaggagtcatatctcgtgtccgatcataacttgtatcaacccgagggtatactatgtacaaccagggtctttgtaaactatctccatagatcaatacaattacttttggcgcattgccaccttttactctcaacgagttcttagtttcgagttggactacatctgtttcgatctcctgcgatgaagtaagtttcgtcaaattcgcttgtatcggcatgtttagaactttttcggttaagtccgatattctattcaggttgacgcaagcgttgcctatatcatatattgattctatctttaattgtaccattgtttagagtcgtatcggcttagatagaactttctcagttaggttcgatattctgattaagttggtatttctctaaatcgtactactattttaaatacacttattatatcctttacatttgtgtggatctatcggctaaatagttttttcttattatcttcaatcttatactgtgtcagttagatccgatctattagattgctattaaaagtttatttctagtaagccgatatatttttatgcaatgttcaatgagttatcttgttactttctctaagtgttctattgtcttatactcaaatttgtatagtcactagttaaacatctctatatcaactttaatcttattctgtctcggttaggtccaatctatcaagattgtctttgataaagaataaattactaataattatgcattttttaattcaagccgatgataacatgaatctccatcgagcctatagccgattgatcaaaaccttgttgagctggccttgctacatcacattagcctattggccgatcggctcttggttcttatactgtcaatccatctatcttgttagttgcaggatcaaactaactagtatgtcttaaacccaattgattgaacctacactataaacccaattgattgaacctacactgaagctaaaaacatctctcgggctttcatgtgtggcgacgtaattgcatgtcaacaggagttcaccaacagccactacagacttttgtgggggcccaggaaaactgcgtcgagacaagcaaggtgactgaggacgtttcagctcgggcccgagtcgccatctgctcggggccatgacggctgcttcaactgctgcaagtgggccacattcctctttactgttgcatcaagattacatcttggcaacggattatggcctttggccgttgcagtattaccccgtctatacacccaaccagatatgtgtggtcatttaaattgggaacttagccctataaataatctaatctgaaattcactcttatgaagatttgcactcaggattttgagatactactaaggtcactgcaatcactagactacatgccctttcgcaaaattgtgatttacgcctggggtagtcatgcatgatcatttgatttatcagctctcttttttttacatggcccttttcccttgctgataatgtttattgagttgtcttgtgttgccatacagggggttttcccaaatttacatggatattattctttgagaaggtcagtttggtttcacttacataatagagagtccagctcagagtttggacgaatacatccaaaagatcactaacagagggtattttcaggaagtttaattagttgaggggatgcggttacttctcacacgcattgtccgctctcaacattgtgaaatgcatttcgaagctaacccacatgaaggatgaaaatgctttctattgtgtgggctatctaccaacacatcacatatatttaggaaaaattctatatacacccctaaatattagattgaagtccgtacacaggggcgaagctacattgatgagggggttcctaggcacctggttcagaaaaacttttaacctgtaattagcccacactcaccataagtgcacccacctcggaacaatagtgtgtaccctttcacaaaataatcagccaagcaagacaacaagcaagtagccaacacaagcgtatatgctcacagacgtagccataacaaatgtcgccgccaccgcatgtgttgatcaaatcacaggggggccatgcgtgatgcccagcagccaacctcatcaagcctataccttaattacctcatcaaatcttttttgtcactgaacatactaaccaatattatcatttgggttttccgttttggtaagcactttcatcgctagaattttatttcctacatcactcttcttgcttatgtgaaactatcgatgctaaaaaataatactgtgctggtattgttatagtgttgtatgttgtatatataataaaaacatacaccctccgtcccatacaaagcactggtttagttccaaaatttttcttgaaacttccaactttttcatcacatcaaaacttttctatacacacaaacttccaacttttccttcgcatcgttccaatttcaaccaaacttttaattttagcgtgaactaaacacacctaaaacaaagttctagccagtaagctagacataccctatatctaaattcgtagtcagaagttgatttttttaaagaataaagcaagtataccactaaaaatagtggtgcacccccctccattttgcgctggcttcaccactgtccgtacagtaccctaaactttaaaaccagagatttaaccccccaccccccaccccccccccccaaaaaaacattgcaatgccatttatattaccccattagatactttcggatgatggttttgtgcaattgaaagcttaaaagagcagttttaaatagctagtttatcgtattttacgtatcattgatcaccggtcatcaatttatattctcccatgatgtcatattaatattatatcgacatcgtttgtaaatgagagctaaaaatattaggtaaaaaaaaggtttaggtggagattttattatatatgtcaatacatatgtcatatcgataaactcatccgacgtatatgcaaattagataaaaaccactttttcctaagaatcgttaagccaaataagaaatgaagatagacatatcattcataatattcataatattgttgtttggtaccatggcatattccaggcgcacaaggtacgtaccaaagtttatggcaaatccttaaattagtccatcataataaaaattcctaacccgctatagaattcctaacaacaaagaaagcaagaagtccaacccctgacaaagagtacatcagtgcaaatttgcttgtgctgcgttctgaaacctaaagatcatcccattaacatggaatcgtcgcgccgtgtttggggtactgtacaagtaaagtctagctgatgcgctaggacaaatttgatttgctgttcaaaataaagaaaaaacgagttaattttagctttgccaaacactagttagatcgccgtcgagcccactcaatggccaataggatccgcattttggggagaccctcattcacatcctccttgtctatcacctgattctaaaatgaacttgtcacatcatttcgcttattcgcgagtaagcgaaacggtatatttgtaaacgaaaagtaatttatgaataaaacttttatatacgtgttcttagtgatctagcaacaaaggctgaaaaataaacttcgatgaaaaaacctcaaaatcacctccaaatttaaggttaaaaatttaatttttagctgataagcataatgatgagcgaaaagatgaggtccgattcttttagtgaaccagtttgctgacaatatgattgaatacaagataccaaatgaattttccaataaaagataacacagtagtgtatttgtttttcttgttacccggccgtgacatcagtatcgccactacgaggtaaaagcttaataaggtcatgttgacttcgaattaaatttagaaatatactgttcattcattttatttttagaaatattcggaatttaaaactttttaaaaaatataccgtcgatctcgcacaaccattacgcgaaagtgacgtggacgtgatatcatgggcggtatcacgctgggaaagagcgagaccgcgcggtctcgcgaaatggaagagcgagaccgttcggtctcgcttaaccaatcaacgataccggatttcaaaatggttgattagtgattaattaccataattaatgattaattaattattaattaatcgctaattattattagttaaataattaattaggtcgttagtcactaacctaatgcagtttaggacggtgtcgctctctgcttgagcgagaccgctcgtccttcccgcgctctcgccccgtcgccgcgcgagaccgtgcggtctcacgccctagcagcgcgagtccgcggggtcttacgctttctccgcgcgataccgtcctcaacgtcacctctgcgtcattttcgctcaacggtagagcgagatcgatggtatatttctacaataaaatttacatcccgaatatttttgaaaataaattgaataaataatatattttcaaatttaattatgttgacttcaaacttacctgggtatagacttcaaacttgtcctcttttaaggctgccttagttctggaaaaaaaaagaggctgccttctaattttgtgaagaacctgacgattctcaaattgatgaactcggcacaatgttttgaaaagttgaagcaaaaacagtcaaagtggaacaagccaaaccttcagataattctgtatcgaacagtttcgtaattttgaaaaaaaaaactaaaaatgaaaaagaagagaatatgtattttcgttgagttagattataatgaattgagatgcatatgtggttaaacctcacacgcttaaatgcatttcgaaactgacgcagctgaagaataaaaatgcatgctacctgccaacactccacatgcattatatatgtttactttttggatggttgcaaacatataaacttgttggtggcatgaaacagcaaagacaagaaaattaattctctgatgcgaggaaggttaggagtgcgtatcagatttaacaatagacatatatggttgattcagttcttacatacctaagattggtaacattcagagggtatagatagcagattgacattttctttagtgaagatttgttttgcaatgtgagttgaatggtaactgcacagaaaattatcacctaatcttagtaaatttggctaacaccccaaatagttacactataaaccaataaaaattacatccaattataacatgtaattttagtgacaacgggtttaatttgctcacactctcaatggaaattccatgagagcacacaaatcaagaagagaaaaagactggtgtctgcacatagtactgcagtttttattaagaagcaatcaattttccaccatgatgtgtatagcatgcatcttaaccgaataacttttttttaatttgaggcagttgaatagcaaactaaaaagcattcatttatgattaaagaaagcatatgataatatttatttatttattaattgaaataaatcttgtatgagagtacaaataaggtagacaaccctaccatttgagcaaagtgtagcaaataaacctaatagggagtgaggataaaaaagacatccatctacaaattaggtgttcactaactttaatttgttattggaaatacaatggtaataagaacaatagatacaagggtaaattgaatctataccattgcaaatttaccatattagataaatgctattaccattcgcgatatcggttgcgtgccactaaaattttgtaaaattttaatcataccactaccatccaattttgtatcatcgccatctatttctatccgttctctcctttctctatcgacattacggcgcacgttgtgcgccctatcgatgagcagatagcacaacgataaaaaaaagctctcagacaaaccaaatgatccgaggcaagttctatcgagattagataaatcgatgtaacgaagcaatgggagatagacataacctgcgattttctatcatagaatgataaaaacaaaagataatgagagggaaactcataaacaaattatcttatatttcactgaacaacattacacagggcacactggcaagatgaccagtaattatcaacagccaaatatacagagattgaaccgtcacactggatggcctcttttatttattcatcacttcatcccagataggcacgttggtgcttgctacagtcaataatctcttaacattagcagttgcaccggttgcacttgtagcaggagacatgggcaacatcataggagccagcagccacctccaacgctgcttcgccgtgcctgcaaaattaagcagacaaattcaggcctagaaaaaatgttatctgattcataagtttcttcagctcagtttctttttaagatgaaatatatgcgaattatcccttttcaggtgcaacaaaggaacatgttagctgaggtggttgtggtgttcttctccaccagatcagtgtactgtgtacatcttcctgaaccaataaaaaaagcatggcataaataaatgtaaagtaaccgatagtactgaataaaatgtcttttcatcttcatgcagctttatctgaagaaactttgaagcaaagggaattaacacacaacatatagtatatctttgaagcaatggaaataacattattttttatcatggaaaatatgaaatcacacatctctgaaagcttgtgtcagtttattttgacaaatcaatatctaaaaggcttacccgcagccattgccacagttgaacaaaaagatggatcagcagactactcactgaggtgattacagcaaagttataggcacacatatactacctgtgtagaagctggatcttcttgttctacctgcatagaatgaagcacatgcaagcacaggcgaggcaaatccactgcaggagagtgcaccccacattgtaaggcgagtgcttacccaatgtacatgcaacaataaaactaacggaaaattgcaacgtcgtaatcatagtttggttataaaaattaggcctttagctaaaatgctgaatgaatagcagaacacaaaacagcaaggttttgagaaatctaatgatatatatttattttgaacaaaggttttccttccctatgcatcactcttttccttcctgaaattaaactacattgctactatccactattcatcagctagcacaaaatcactacaatgtcacaggttgataagaactaatatttaggttctttatagtcgagcactcaggcaatggaagacaacttctattaaatgagtagcaagccagaacaaaagcttcaggaatattatcaataattcttatagcttatgaaatttggatccatattatgagaattttttaaaaaaagaggttatgtgtacacatagatcacagactacaggcttatattcatctactctgcaaaagaacagagttatcacaaaaagcaaagctctaaccaaaaactgcaaaactaacatagttataagccgacaaaataagctatgtttgtctttgctttatgcggatgtatctggcttctctatactggttttcttgcattatggagcattcagtgcggcaacaattcttgctccatctctgatatgacgccaccaccgctacagagcatgacaaagtgagcatagaggaggggaggaggagccaatgaatggcccaactgattctgacaatccagtataatatgagtaaggtagcaccattatactttgtcctaaactcctactaatttgagaagaggacctagcatgtgctaaattgcatcaaaccataaatccataaatttaaatggttgttatatgcctagtttacattattttagtccattgactgacaaacagacaactaaatctcacgtccaaaaagaacaacgcgtgtataataaaatgacagaaatgctaaccttgttcctactctaaaaacctacaatctttattagctcaagccatagacttaagtttcctcgctcttataaggcatatatccagatgttcagtattaataagctatcaaaaatctcccttcaaaaaaaaaagctatcaaaaatatacaccaattagccaagatcttgtgttgctcagatgaatctgatcccaagatcatgtggctcatccccagagagcatattgatgtgtactctcatccatagaatcctgagatcatactgatgcgtactttgatgtgatgcgaatttgcaacatacaaagaaaaacaaagacaaagcaactactctgccttgttccagcactgcaaccctggattgggcaccgaactgtcaaactcgaactccacgccactgcatcggttgtctttgctgctcaacttgctgcttacaatctgttctccctcctcccctcgtggctaggagaggagagaaacactaatctggccaagaaaaacatcatcctttatagttgggaactcgaagagccaaattcgaacaaattctctgtcgatagccaatgattcacatcggaaggggcagaacagattaaagggtcagacttgtgcaccaaattcaaccaatgggagcagctggaatagagaaccaacaccaaatccagccccgcaagaggaaagcatcacctggtagggaggaggagaaagatgcaccgccacttgaatggaatagcagtagtataccaggatgccacggtgcgccgacgctacgctgggctgccgcgcctgcacgcgttgcatccacgctgccattcgcccttgctctcgcacccagctgctgcgccgccgccaagcacccgcgtcctgctgcaagcctcaactcatctccaaccctagcctccgaatggatagtgatgctgctagccaccgctagatctgaaggtggctcgttctctgtcggggcagcgacgtactgggagaggggcaaggagatggaagaaggaaggtgagggcatgtgggagaggtcgtcgccggcggggaggcaaggtggcggccgtcgtgatggcaaaggagagagagcgagagcggggaatcgtgacggctagggttccgggaggtgagagttagggatacttttttgcaaaaagacaccctgcttttcatttttcagagcgcacttctattttctgaattttctctcctttgcataagatattgttggttatggagggcctttacgtgagaatacaaaactaaggaacccaagatgagggacctacaacaaattaagaataaaattaagggtgtttttgcaaaatagccagcttacgaaagtcccacgctccaagcgcgcgaggcgacgtggatagcgtgggaggcgagcacgcagcctcaaatcgctgtgggagcagcaactcagggcaggttttaatataaccgatgctgtcgcgcgcgcgctctctctctcttgtcctctgcttccaatccagcgccggcgagatgggccagtaggtagcgacacggacggccacctctcacattggccatgtacatgtattgcctgttataattgatcgaaggcgagtagtactctattgaaaatttggtcataattcggcgtattttaattcaaaaaaacaagataataaacatgatatttacaatgggatttgatctagtgatagtggtgaatgtaatcaacatgagcatgcttaacgtagaataagcatcaacaatcacataataacgcaatgttgacattgcgatgaacattaatagtaaaatttctaattgaaataatgtaagaaggttataccccaggaatggtcctccgctggagtttgagacagtattgcctccgttggtgttgacggaagcctccttctccttgtctctagtgttgccgttgtctccagtgtttgacatgttggtgaagacgaagtagacgttgacgaacagtgagtagtcgtgccttgcgctccccaaaaacctgatcgtccgcccgtccgtgcaaacgtcgcagcagtgcgtggtttcggaggcctactctcccaacgcgtgtacacacactcatcgggatgggattactgtagcagcaacagccttggaaatggatgaaagtgtgtctatcttctccttagggagatcaaatccattctcattttatatgaggaatggaagatgaagagtaagagtcatggaataagaagaggaatagagtaactaattctcatcaattagccatgaaccatcctccactgtacaaccatcaaccaaccatcaattaggagtaattgctgtaggttatcaatggaataggaagaggaatagagcaactaattatcatcaactagccatgaaccatcctccactatacaaccatcaaccatccatcaattaggagtaattgatataagttaccaattccctaatcaaattgattaattctcaaaactcctcatcccattgatatcccataagagaatgaatacacatgaattcctagtataatgagccttgaaatttatttgacttaattgatttaaatggatcaattacccaattaaatctaacactctcaccttcaatctttcatcaacaatcgatccggcgggcaaggcaggcaggacagggaatggctaactcgatcgatcagatcagtactgattgaaagcagcaaacgcaaacgtgtcatccctgcagttttccgctagccgctcgatgtcgtcagtggagccgcaggggagcgcccaaagcccgcccatggcgccggcgtaggcgtgccccatctcggagaggaccaccaccgccatcttccggaggactgaccatggagctccgcagcacgaacggcaccgaacacctgcagggcgagcttctccgctagcaagaggtgttgaataaaccccggcgtgttctagttaggatagttagttgagtttccttgttttcagctgagcccgagttttgggcgcgtcttgtacagaggctcgacgtgtgcacgttcacgcgggagtctggtagtcgtgagcgagtctcgcggcacgctcgagctgtgggatggcgcagttcgtgaagagcgtggcgtgcggtgcgcgcgtcatggccggcatggccatatgttttttttctcctataaatagcaagagctacagaaaacgcggtgattttttttggccgcaccaattccctgtccacgttcgtgtgtgttctgtgttgtgttgcagctcccggcgttgtcttcctcaactccggcgaccgctccgactccggcgagggtcggaacaagaggcgagtcgaacgggttcatggacaccaagaatccgctgccgcgcatttgcaccgtcgtcccagggcccggccccgagtctggcacaactggcaccgatgtcttcttctccgacttgcttctcgatcgccgtcatggcctgcttcagcttccctacgtacccttgtcgttgtctacctcaagcttccatagaaactccactgtcaccatccccttcaaccgcgtcgaggcactactgcagaagcatcttctttggtgagctcgagtgggagccagggtttgaaatttcagttcgaaatttccgaaatttcggtaatttcgcccgtcaccggcatactcaaatctcgcccgaaatttttggctttttacaatttttttgtgaatttggttaaattttattcaaattcattcaaattaagtcaaattttcaaataatttcagccagaaatttccgaaattaccaaaatttcagaaatttcgcccccccccctctcccacctgcataaaatctaatttcgaaattgaaaaccctagtgggagcagcgcttccctcgctaacgccctccttgccatccactgcatttggctcaacaaggtggagagagatgagaggaggggaggatgaaggaagaaaatagaactgacatgttggtcccatatctagggttattttggtatatatgataacagaaaatgatttgatcataactactattgatataaccgttactcacatcattgttcaactagaagacatcaaagatcaaacagcagaaactgtggaatccaattcggtgacctgcaacaatattgacttcaaatggccgccaaatgtgcatacgatctccattttttgcccatgagtacttgatggaaaactttctgagtcctcttttcaacggatccagcttcatcttcaaattccatctcagtcggccacaatcacataaataagatgttgcgttagctataatatgcctatgggcttgtaactttatctgggaccccggcccaagtggggcccatgtgggatgcgccccaactaagtggaacacgaccctagtgacccctatattgttctcccacctccttaaatagctaggtaccccttcagggtttctctgattttgtttagattaaagtttagccattactatttgcttgcagcgcgcatgtcggctagaccgcccatctgtttgtcttcgaaaccccaacttatcatttgtatttaattcctgttcgcaattcagattgtttttatcttattcttgtctgtttctttgatttgcttacaggaacaaggttgatctacaccagctagttcaacaacccacggagaggtgtatcaatcgctaaggcgcaacacaacaacgtcttgtactgttgtagtgggattgtcaatgtttctttgaaatcgtagttatcccaactcaccgaaagatcgggccaatcaaagccgtgagcgtatcgactggagctaagagtttatcagaaaacatgatggcaatggcatgatttcaatttgtacatattcaaatggcatggatacgaatatacgaataataatagcatttatctaaaatgatacattcgtagtggatgaatctaattaaccctaaatataaaaatataaaaggtttctgttgaattggtacaacataaatccaattaagaaagagacaaatattttcatttagataaatttaactgaaagttctttctttttctttaaagaattccatcttccttaaaatatcataaagtcttgaagcatccacctccttgttgtatgcacgggaaaatgtgtagtgcaaatcttggattgaaaaatagacatacgaggttcgttcacgtcattaaatgtaaaaattttactaataggtttactcataagtaaattttttactcatggtgacgtggacgaatctcagacgtttatttttcaatctaacggtagttttcaagtttgcactgcatatatatatatatatatatatatatatatatatatatatatatatatatatatatagttttcaccgtatggttttcctgaatgcactgctgaccgagcatcatctgaaggcacttcccttgctcctctttacatccttattattttcaaaaattgctatacggcaataatgttctgttgacgttatgtcgaagagtagaggcagagctagctgatattattacgtatgtactgtattacttaaaaatttaattatcattttgtgttattaccaattgtatttttctgtgtttctatccagctactgcactataggttcgcagttttttttgttctttaaccgagtaagttcatggtttcttgattctgttttcgaagcgacgatgatgatttttctggtctatatttggtttgattaccaaaacattaatcacaggtcatagccgctggtgtcgtgttaacaaaataaccgtgatctacttaagagttttttcccgcgcagataatcattaagccaaatagaacatgaaggtaaacatatcatattgttgtttggtaccatttacatgttccaggcgcacaaggtaccaaagattatggcaatttcttgaattagttcatcataatcaaattcctaatccatgctatccagtccctaacaacaaagaaagcaagaagtcaaaccacctgacaaagagtacatcagtgcaaatttgcttgtgctgccttctgaaacctaaagatcatcccattaacacggaatcgtcgctgccgtgtttggggtactgtacaactaaagtctagctacaagcgctggggcaagctttgatatgctgttcacaacaatgttctgttccccgtgaaaaggcaaaaacgatttaattttagctttgccaaacatcagtcagatagccatcgagcccattcaatggccacttgggtccacatcttggagagaccctcatcacatcctcattatctgtcacctgattctgaaacaaaaatttaaggatcatcaattatctcaatctcaacattattaagctggtatcagcagcatgaatatgactttaatggattctcatgcctgtttgtttggctattccgttctgactgttctctggaacatccttcacggcagaagattctggaagatcagaagatggctttgttccttctgctgaggttgaagcatccaccgccttgtctgtcccaggtatgcactgctgctcgagcatcatctgaaggcacttcccttgctcctcaattctcagctgcaaacttctttggatctgcagagcaaataagcattgaaccaaaagggttaatttcagaaagttcaacaccctgcagtcaacagcttggggaaatgagaagttcactttgatgttggtctagcttccttcataatccatgttaatcaactaggtaaggaatttggttacttcacttttaacgcatctcatagacaaaaacatctaaagcagacttagcagattttcaatgccctggcccctgttatggcagacctagctaatccatgaaactagtttttctaggaatgtctagtaaaaaggagcagagacaatgttcaacaacaggtttagccgactgttgatatgaaaggataagaaaaacagatgaaaacaatacaaatatggcaaaaaagtactagaaattaacagctaagttcatattttcctaatgagctgtgatgccctctattgcaagaacctacatgtacggaaaaaaaactaaaccctgaacaaaataataactgcatccatatgctaattttaacggttggtcttggtttgaaatacttttggattttttttcctaaggcatcctttttcacctaatactccaatcaatttgcttaccacatatgatgttaatggtcggttatataattcacaatagaaagaactccataaagcgctaattcgttctttgctttatatgcatggagctcaaacaagtcagcttacactagtactatatgatagcttgaagcttgcctactttattctgaacttcataccaaagcccttcccc

SEQ ID NO: 26659 - DNA, 1949 bp, Oryza sativa
  unsure (1)..(1949): unsure at all n locations
cacttcaatatagaacacagtgctgtaacgagtattgttgtcctattacaaaaaaacagtttgctgatcaacaaaatatcttaagcatttgatcaacaaattattccttttgttataccaagaaagccccttttaatggagaatctttcactgaaccagttttgctaatatatgattgaatacaggattccaaatgaataaaagagaacacagcagtgagatcgcaaggtagaagcataatgaagtcatgaagatttcaaacttaccctcctttcagatctattgatggtatgtcctcttttgaggctgccttcttttctgaagaacctgaaaaatctcaaattgatgaacatggcaataaaataaataatacatggcaacaaaataaataaataaaagaatgcagcaaaacacagaaaaagtggaacgtggcagaccttcagacaattctggtctgtatcgagctgttctgtatttctgcaaaataaattaactcaaaatgaaaagataagaataattttttttcacaaaaatatcatgcaatagggacaactaacagacctgaaggtgacttttaacatgataaatggtcaaattgtctgcttcattagctttaacacacccttgggagtagcttctgcaacaattcacaataaatgtcaatatgcataattagttcaatcataggagatgtaacatttcttaaagcaatacacactttcactgccaccaagtagattgacagatctacaaagcgctcatgaagttcangagtccatctcattcgtgtcttggagttggaggtattggaggcaccagagggcgagggtatagcaactgcagaaggttctcctgattgagatgaaactgattgttgggcagctgattggtgaactgcgacagatgattgcgcagctggtcccacctatatngaagataaatagagcaccactcaattacatgtggatgcgtctaaaagactaggaactaaagatttgcagtagtcatcaacaatgaatagcatagggcacttagggataactacatgtgacacatcccacagtcttaattcaagctcaactggaaactggcagcacccacccaaacaagcctaagcttatcctgatgatatcaaccagaaagaaatttagatatcatctcagggttaaaaaaaaaattcttggttaagctcaaaacttcacaagtatgtcaatattatacccttttctttgtttaaaaaagagagagagagagagagagagttccctggcaaccaagccgtcaagcaacttggtcgtataaattttagtttaaacaacactatgctattttagctgatctgaagtttggttatgatatgttattaaacctgttgagcttctcttgagcaaacatggagcctatttgagcttctgtcaagaaaatccctataattcatacttatacataataagagcagaaacctacatgcagttcaaaccaagtcaagcctgcccaagctcattcaagatgactctccacaattctacatacagtaaagtcatcatgttttttgcttggttatatggagccaggaaaactacaaggttgcagcaactgcatccttttatcttgagcataatcgcattttttaactatctaggtgtcaaatgcatcatggctaagcatgcccaattgaaaacatccaatctatagtaaacatttgttaaacaaagcaaagtgtagacgttttgcttgcatgtcacatataagaataattgcatttgtcaacgcaaacatgtaaatcttattggggtcgctagactgccataatgctaaagataatttattaagtggcagttttgagctggagatacgaagaacgaaatatactaatctgataaacacatcgtacataatatgcatcaaacacggtaatgtcacggacaattggatgttgcagaaacaaa

SEQ ID NO: 26660 - DNA, 16172 bp, Oryza sativa
caccatccaaatgttgtggccttctatggtgttgtgaaagatggccctggtggtaccttggcaaccgtaactgagttcatggttaatggttctcttcggcatgtcttgcagcgcaaggacaagtaactgcttcctgtgcttttttttaaaagaaaattaatttgctcgttttgggtgagtaacagtgtgctttgttttcttactgagcaggtaccttgatcgtcgtaagcggcttatcatagcaatggatgcagcatttgggctggagtatttgcactcgaaaaatatcgtgcactttgatctgaagtgtgataacttgctggtgaatcttaaagatcaatctcgtcctatatgtaaagtgagccacacttcatttctagtgttatagcactgttttataccatttattaaatagttgctttgctttttgatcactcagtggatttatcatctcgatttctgttcactgttcaggttggttgattttggcctatccaaaataaaaaggaacaccctggtttcaggtggtgtgagggggactctcccatggcatggcacccgaattactcaatggtagcagcaataaggtgtctgaaaaggtaaaaacatttttcttggttttcttttttcttcaattctttctagccatgttcttaatgttccttatgggtaatgaatcctctatcatcaatatgtgctagcacttaaaacaattccaggttgcagatttatatgcaattaattcaactatagcaatatttttagagttatgtttagggtactcagtcatatatttgtctacaggttgatgtattttcctttggcattgttatgtgggaaatacttactggagaagaaccctatgccaatatgcattatggcgcaattattggtatgcaattcatccctcattttctaggaattgtttgttctaatatgagaatatttcatgtgtttttctttccttactgagaaaactaaatattcgcctcctcctgtgaatcattgaacctaccccatgcttgtgcaaatttatattttttccttgaggtttgattcacctatgctactatctattcatagctgttcacggctccattctgacatatctacaagcttatggctcctgtcaccttatgtacaacaaagaagacaattttcccccatcttttgcaaactgtattagcttttctagtgtgggctaaatagtacacaaactatttaagtattaaaaaaacttcttccttttctgggcaataaagttaatcagaaaatagtgtatgatactagtattctataaaacaatcaattttgcatgcttcctttgctaattaggcagtcctgaaccctgctgtcttaaattccaagtcacaccagtattgtgctctggtactcaacaattcaacatgactaaataagtcttttgcggagcattgtacttccttgaattcagtcctttttgatgaccctagaactccccgttcttgaaatgttctcttcgtccagcaacttataatacgacatcttgaaactccggttgcagggggaattgtaaacaacacattgaggccacctgtgccagcgtcatgtgatccagagtggagaaggcttatggagcagtgctgggccccagatccatcacaacgcccagcattcacagagatagctggacgactccgtgccatgtcagttgcggcaaatcaggcaaaggcggcatccaaataaacggcgcaggtgggaatacttatgggttccagtttgtatattattatttttggttgagaatgtaatacatacatgtatttggttggaaagtaatacatacatgtgtgccctatagagagtggtttgaaagttaattgcttctcatgggcaaggctgcatccagttatataccgttttatttggggggttttatgatgtacaaagccttatttggatttggagaaacgttatcattgaaagctcctcgctcatatactgaaagctgtgctatagtgtactcaaatgtgaataagaaaaactatacaggacatttaaattctgttagcctcttccttttttatgaagatatatgcgagtttttgtgttctcattatcctttttaggtggttaactaagcgctcacatcatgtactttcaattgtttggcatttcattctcactgcagggtaactgggtaaggtggcctttccccagttttgagaagtacctctaattgtcgtcagctgttggttttcaatgtgtgatcttcacccaccttatttgacgccaaaaaggaaactacgaaatgagattcaatctgacagttgccattagtttgagactgagtgaatgagctgaccttggtgtcttcccaagaatagtgtattgagattggatttgcatcagtgcaattttttatttcgtctatgaaagtcaacattttaaggtactcctactccgttttttttcaagagattgaccagtgctattcgcaaaccgagatgatcaagtgactaatcttgttctgcccaaaaagaaaaaaaaaactaactagagcatgtgcccaatttattagaggcttatctcttccttttctcttttcatgtaaattgaatcatgaaatgagcctcgctaataattgggcacatgcttgcctaacaggctaacactaccaagttgcactgtccgagttcatcttgtagagtagaggcttatccacgcaaaaagagccaaagaagactcctagggttccaatctgtgcatctagccagactgcaacaaatggtgtaaggctcctgttttcactggtttccaccgaaattaggcagatgaaacaagcaaccaatatgtgatggcgatcatactagcggatctttaaattatcacatgccggcgtaaaacagtttttagtcgcatgtttggaaaggtggaaatgccacattgccagtattggaggacactttgctaccgatcgatatgttacagtaaattttgcccgtgctctttgtagatttactacctttggacttgacctagagatagaagtttatttacccttcagcgaaaagtaactttaattattctaatttactactctctttatttcaaaatataattttatatgattcaaaatttatacagcaaaataagtctttctccatctatacttctttatctcaataaattacaacaatttctcgtctcaaccttagtttctattaaaactctcagaaatgctcatatttttattgaaacagaggaagtaatttatattgcataccaaaaatgtaaacaaaatacccatcgacatagagggttgaagctgagatggacaagtctgtaatataatttaatctagaatttaataaaatggatttataggccatacacatatttcactccactccattcatatctagtactctactacgataaggacagtactacagacatagttaatgacagcatacccattcttattcgttgttataattaatctagtcaaggccataagctcactcaaatcttcaaaagacgaaaagaagttcactactctgattccgtattttccatgggtggtagcacactagtactactttttaaaactgatagccacataaaaacaaataccaaacaattggcgccatattttggagtgagcatatcaacctctctctgtgctatataagcaaccatcgcttccctcatcctccttcccgccacaagcaaccaagaaatcaagaaaccgtttcagacaacccactgcgctgcccgccgccgccgtctccggccgaggataccaacgacaacgatgaatcacccgtcctccgccgcgaccgccaccgtactcctcctcctcgccctcctcggcgtcgccgctggcggcggcgaggacggccagaagcgcgccgccggcgtgtacatcgtcatcgtgcagcccccggccgacggcgccgacaccgtcgcctaccacacgtgcatcctcgccgccgcgctcggcaggtagcctagcttagctagctgcgagcaccaaatcacccccaagataacggaaagacaaaaattgcaaaaaaaaaaaaaatcgcatcaccgatcgatgtgcatgctctgtttcaactttcaccgagtgattttaattaccctgtttttctcttaatttctctgcaattgcaaaagcgaggagagggcgaaggaggcgttgctgtacagctaccgggcggtcgccagcgggttcgccgccaagctcacgccgccggagctctccgccctgcagagtgagttaattagtttttgctgctttccgtataatccatcctgtattcctgttcctcccaactatgatgaactgatcagtaaactttatgtcggctgcagtagaatcttctccatctctcgctagtagtaaaatcttcccgatggtcttcacatgttcatcatattatactacacacgtaattaagcgcagttgttaatagttaattgcggcgaggtttttctgggattagtggactaatttttttgtcagaggaaagggccaaggcccaaggggatcctcttggcaattccgaggtcaatgttaggcttggttcagtagtggctctggctcacagctttgctgatgatgcactgcactcttccgagtgtttgaccttacctagaaggccgagaaaggtataacttcgttgagggtgtaatcgtgtaaattttcccggttttatcttttaactgaggttagggatcatgctcaccaatgcaaagaataaagtgcatgcaaaccaaactttgtggtctcttttcatgtttcctccttttcttttgctctttgcttgttatcccgttcctaaataaactttttgtgtgctactcattagcccaagtggataaaattattctttcctttgctgcatgtatatgctattaaaatccttggaaccttacaagattcactctttcattttattctatttcttttgttcagagcatcctgcagttcttcaggtgcgccctgatcagatgtatcatgctgtggacaacctcaactgaaagcttcttccctttgtgagagagagagagagagagagagagagagagagaggatgatacaaagtatagtgcaatactgaaatgttcttcatgcttctccgatgttggtgattatgctaatcgacaatctaattaggcagtaaagaaggctataggctctgttgtgaaagagtttcatgttattctttattgatcttctctactatacatacatcgaaatatatacagccaatgtattactaattgagggaataacaattacttacaatgttgttgtaattcctactttacaatgttgttgtaattcctacacatctagtgatatacaatctgtatgttagaacctataatggaatataatcttatgatggattgggtcttatttggcaacttaatccacaatattgacctgtggaatgatttgcacactagattactcatgatgtggcaattgtggctaatgcaacgagaggtgataagttgataacatttaagaacataatatacaaaagtaatgcagagtattcaattcacttgtttttattctccttgcaagaaagatgcatacactaagtttgtttttcttgttacaagcacgagttatccgtagagcaaaagaaaacatctttggaaaccatacgcacacaacaccacatgtataccatatgaaaacattcacctccacatgcattgttctctagcttgagaatcatgcatgatatcgttgatcgtctggacctttaacttctaccaaacctagtcccaatccatcatcggctatactcccatggactcaagaaacacctgcatatgaacaacaaagaaattttatatccgagtataaatttgcaccaacttgtctcacatcatcacacaatagtatcacataagaatagaaaaccatctagaagtcgtaaacatgaagcaatctagaaattctacgaaaacaatatgaaactgactccctcccggaatctgccggtttgaccgtcgagctacccggtctgaccgcccggatactttcggtctgaccggcatgcaccacccagtctaaccggtcacctagcgccaacctacactgctcatcgtctgaaaacactatgcaccatgttttccaaaatactcacctttgacaatttgttcatcacatggattgaatcatcacatgattctagaatcagacacatctgaacattcaattagatgatagggaaaattttgtgaacatcttaaattcttgttataatacactctcatgcgtaaatagaaatcatgattgcatctactagtatttttaacgagcattttgaatatgtacacgtttcgatgacatgacttgaacataataaatgatccaatattaacacagttcttctcgcaacgaagaagaagaagaagaagaagaagaagaagaagaagaagaagaagaagaagaagaagaagaagaagaagaagaagaagaataggtcaatcacacaagggaacttgataaattgtgtatcatttcaaattgagcatcaatctacaactaattgtattataaacaacatgggtgcagtgcatctattatctattatattattattaaaggaatagaaaaaggagcctccacgtcgctctcatggcctagaaattctcacattaatcggagaaaaaaaaagcagagtccatatagaaatacaatttagaaatagctgaaattcggaattaaaaaataagaaatattagaagaggagactagagtccatatagaaatacaattaggaaataactgaaattcggaattaaaaataaggaatattagaagtagagtatagagtccatatagaaatacaattagaaaataatagaaatttggaattaaaaataaggaatattaaaagtagagtatagagtctatatagaaatacaattaagaaaaaaatagaaattcggaattaaaaaaataagaaatattagaagtagagtatagagttcatataggaatttaaaactaactaaaattcggaataaacataataaaattaaaagtagagtttagagtctgtataaaaatacaatttacaaatgactaaaattcgaaattaagaaaaacatgggaagaagagtttaaagtcaatatagtaatacaatttagaagtatctgaaattttaaattaaaaattaaagaatattgaaagatgagtttatatagaaatacaatttagaaatagctgaaaatcggaatttaaaaattaggaatattaggagagtagattagagtccatatagaaatacaatttagaaatagtagaaattcggaatttaaaaataaggaatattagaagagcatattagagtctatatagaaatacaattaggaaataactgaaatttagaattaaaaataaggaatattggaagtaaagtatagagtccatatagaaaaacaattaggaaataatagaaattcggaattaaaaataagaaatattagaagtatagtatagagtccatatagaaatacaattaagaaaaaaatagaaatttagaattaaaaaataaggaatattagaagtagtgtatagagtccatactaaaattcagaataaacatactaaaattaaaggtagtgtttagagtcagtataaaaatacaattcacaaataactaaaattcgaaaataagaaaaacatgggaagaagagtttaaagtcaatatatgaatacaatttaaaagtaactgaaatttgaaattaaaaattaaagaatattgaaagatgagtttagagtccacatagaaatacaattagaaataataaaaattcagaattaaaaaaaaaattaaaagacggatctagagtccatataggagtatatataatttagaaataattaaaatctgatattaaaaataattaataactaacacgtatataaaatacaatatgaatattatacattagtagtttcgtaaatttattacaaaatttaaaattatgctatcattatttgaataatacaatgagaaaacacatatgctattatatgagagaaaatataataatactagccgcgcaatctgcgcgggtcaccatgctttatatataattatccaaataatatgtggagcggtgggcctaataacaaaagaatataaatatttaccatgaatatgtttcccttggggggaagtatcaggtgcaatagcacaatttagtgtaatcgtgcaacttccatctttcaccgttggatctagcagactagcatgaacgtgcaagatcaatcccctcctccctcaccgtgcattttgcagaaaaccgcccaccaccaaagaaagttttgcattttagtccctctggcaatctggcttcctcaccctctctccttaccatcttcatccgagttgggaatttgtgagcgaaaaaataactcagtgtcaaatttgagaataaaaaaattactgcaattaatgaattcgagtaaagaaattacattgagcacaaaaaaatgaaaggtaaaaagaaatgtgcacgatgggatatctattcacagccggcgaggggaggttggcggcaccgagcagatctgacgcccatgacgagtgcgagcatggccccgtcgtccccgatcggcaggagcgaggagagagggaggacgacgccggcagttgcgaggagaaagagggggaagaaaggggaccggtcgagattcacgcgcgctgctcgtcgtcgaccccggaccggctgctccctcccgttgtcgtcgcctccttcgctgtgtctgctcgcgctcctgcccgtcgttgtgctgccgcatccctccgcctctatccccgacctcgccgcatcgggacatacgccgcagccgcccctttgccgtcgccacttttcctttttttttctttttttgctgtataattttttttactctttaattcatggataaatattggttgtaatttttttactgataggatacaacatttgtaatatttttaccttcaaaatccacaaagagtgatttttttactcttggttttaagcatgagtaaaattttcactcccaactttaaacgtgagtaaatttttttactttgattatagatatgagtaaatctttggttttaagcatgagtaaaattttcactcccgactttaagcgtgattatttttttactcccgtttataggtgtgtaaatcttttactcggtgaggtgaggaaagtggaacgatataaagagaaaggaagatgagttcaaggaccaaaataaaaaaaatataacgagagataggtgttttttctttttttgcaaaatgtgcgatagggatgagattgtacacaaaggaggttgcatgattacactgaattgtgctattgcacttgatacttctccatttcccttgtggaccctgttgggccaacataaattcacctatgtctgtccaagtgtctacgtggtttccagtttccaccatccagctatggtcgccactagtcaagagaagggctaaggtagtaagtgcaaatgaaataaaatggataacgttcttatttatagggataaatttgtatgttataaatctcataaataacttagaagaagtcatctaaaaagtacaatagggaaaaagagtttttaataaatcgtattttaaaatacattgagcaagtaatccatgataataaactaatgaccctcatgtgagcgctcagggcgactgtggataccttaagatcataaaattattatcttttatccgagcaagtgaagttgccatacaaaacaaaaataaatttgacacaaatctaaaacgaaaatgaatgtgacacggatactattatagcaatgtgatgtctatagggaccagtggtagtgacttgccactcctaccatcatcaatttcacgatgagatggatgaaataggatagatgttattagtacggccgggtttacttctcaactttttcttttaacttttaacttttccatcacatcaaaactttcctacacacataaatttttaacttttttcttcaaactttcaattttagtcaaacttccaattttagcgtggaactaaacatattattacttacatttatatttaggacatgtttagatcccctagcaaaatttttcatcctgtcacatcgaatgtttggacacatgcatgaagtattaaatataaacgaaaaaaatatctaattacacagattgcatgtaaattgcgagaagaatcttttaagcctaattgccccatgatttaacaatgtggtgctacagtaaacatttgctaatgacggattaattaggcttcataaatttatctcgcagtttacatgtgaaatctgtaatttattttgttattagtctacgtttagtactttaaatgtgtgtctgtatatccgatgtaacacgccaaaactttttacccctgatctaaacacaaccaattgcatttgagtgacatcgcgacggaactacggaagagctgaggtccatgctgaggcatttggaggtgaattggatattgtatatgggaacgtatcgtatacacataaattcttcatgtgtacatggactttcaatagtattgtattcacgtgtagaaattagaaaaaaaaatgtacatggacttttcaaattcatcatgcataaaagagtgaaaagaaaagataaagatctgatagacttgtagtttaaaattttcagaacttttttttcacggctaaaatataatgaatttgggttaagattttacatgtagttataatatacctttttctatatttttgtgacattttttaattattgtgcatgcaaaacttgtgtgcatagaatatggtctcatcttaccctacgtcctaccgacccctagcttctatgctcctattatttggcatatatctaaggtctgtttagatcccacctcaaaatttttcaccctgtcacatcgaacatttaaacacctacatgaaatattaaatatatgttaaaaaaataactaattatatagatagcgactaatttgtgagacaaatcttttaagcctaattgcttcatgatttgataatgtggtgctacagtaaatatttgctaatgacggactaattaggcttaatgaattcgtctcgcaatttacagacggattatgtaatttgttttgttattaggctatgttaaatacttgaaatgtgtatccgtatatccaatgtgacacggtaaaaaaatttacccctgatctaaatacagactgattatatgttgtgatggataatctgtgagtaaaacgtatttacaccacactatttgaaaattcaataaaaaataaactacgatggaaaaatgtttaaaaccaactccaaagttaaatttctaaaaatacaaattttgacagctgcttataagctgaaagtaaaaaaatcagctccaaaataaaattccaaaatttcaaattcagattcgcacattgattatcattccccttgggttcgttctagcgtgtcttggctggcgaccgttacagtcagccagtcaccgaccgaccgcgacgacgcctcctcctcctcctcgtgtcgtgtcgtgtcgtgcggtgcggtccagccaaacttttcttatgcctattatgtgaaaccaaaaaccaaaccaaaccacatttcgccttcgcctctttccctctccgctgcatcgccaccaccacgcaaagccaccgcctccgccgcggccgccaagagcagcagccgcctccgccgccgccaccgccgccgcgcggtcgacgcaagggtaagggtaagggtaagggtagggcagagcggaccgcggcggcgatgctcgcttggaaggagaaggtggcggacaggctcgcccgcctcctcgccgactcccccgcctccccctcctccgccgccgccgccgccgctgccgttgagccgcaggtgagatccgcgtccctccctcccttcccgcgcgggcacgctgtgccggatccacattttccatttctctttttttttaacctcgcacaagaatttggtggcggttggtgtggggtcgcctcgcattcgcatccaacccggtggttctggaaggcagagaagcgggatcctcggagggtgacccatgtcgaatcggaatcgaagaattgtttctcttcctttgtagaacgtgtaattcttcgatgtagaaaattgcattgcggcgtagatatgtatgtgttcctcgtgttcatttggatctgggggctgatttgaaaggcgccgccatgtaggggaggtgagtcacacgaggagagttctttgaggaacgctggcctcgtttgctcattgcctgtcccttctctgtgatcaatttgatatattagtatgtatatagttactttgtcgctgtgaaagctcaggtgcagattggtgcttaataagttgatgttgtgttgtctaatgattttgtcttctcccaaggcattgatgttctttctacatgtgaattttctcacatttgatagttgagagttgacgctttagccaggagagactattcttcggttttcaggataaaaaggttgtgttttggcaacaaacctgagtgccggtaactgcctaacccattaacgatggaggcaatgttgcaacgtatataggtgtacagaaaaaaaatactaagtttgagctgactcaatactgatgtagtgcctatttgtgatgcacagtcttagtctttgaaacattaatgacttgtttagttcatagaaagaaacattttaaatattttcatggcttgtgtcagcttaagcagcagtacctcataatttttacaagtttaagctgtggtacgtcataactttttgttactatagttttactagttcaaagatgttgctttcttgcatatatcatgttttgtttgtttgctgtacttctgtattaatacttaatagcaatgtgtttattcaggcaacgccttttccagtggagcattttacttcccctaagaaaggatcattatcttcttacgtgatgtcccttctaccaacctcaaatccgggacatgaaaggacttcaccgagttcacagcatatgaaaccactgcctcctgaatcgcttcctaaacgatggagggggaatgatttcttgtggcatgatccgcccctggcattaagtgaggaatctggatctgaaagtgagagagacgaaaggaatggaaattctaataacgagcagatcctgcagtcacacaggcccatcgataactcaaatggaaatgaagaaacatcaacatcagactgcacagactctctttattatttaactgaaaagtctacatttatatctccaaaattgtttggattctttcaatcttctctccctgggaccttaaagggttgtcactgggttttgctatataggtaagcagtaaatcaacatgccatggttgaaatttttatttaatcatgccttgtgtagtattaccttttgatttcttcattctttgttgttttggcaaatgaagtgcagcacttggaagcatggaacatcgctaagaacacttttccgtaggagtgaaaatctccagggtccatgcctattggtatgtccaactatgatttatttaccattttgaggtgttatgtgtcattacaattcaacttgtttctagaagctgggtttcaacggacaatatttctcacctttctcatgttagattgtcggagacatgcggggggctgtgtttggtggcttgttaaatggtcctctcaggcctacagagaaaagaaaataccaggtcagccattagatagcttttcgtgctacttatgcttatgaagtcatgctatgagggcatgagccctagttcaccaaggcactagaaactagtcaggtggcaagccagtgcctagggcctaatttgtaattaggcttgcctaggcaggagaatgcccttcagtgcctagtattgccttagcaggctaggttactgccttttagaccatcctttattaggtttttccctagtttgtgtaatgattgtatttatattcctgatgaagcagggaactaatcagacatttgtattcacaacgatttatggtgaacctaggcttttcagaccaaccggtaagcattttattttggtatacctttttggcgtcggagaacaattttttgttttggcacattcttcataaattacacatcttctgccattatagttttgaacttctacagttgtcacatcaaactggttgatgtgacaagaaaatttggttccacttctcttgatgattggtcaggaatattgcaatgcattttcatgaaagtagccagaatgatatggtgatggattgtgattttatggtgaaaattccaaatgatcgcataactttataatttacatgttaatgttgtatgtaatattcaccttttgcattttgcataatgccacttttgttgatccattggtcaggaaaattgcaatgcattttaatgaaagtagccaggatgatatgctgatggatgtaatttgtggtgaaagttataaatgaatgcataaatctataatctaccatgttaatgttctatgtaatattcaagaaatataaaatgaaatttatgtaccgcttgattcattttaatagtagtacaaatgttctgtatcaacatagagaatatactgttaaaattgaagttgtacttgtcggaacaaaaatattcaggtgccaacaggtactactacttatgcttgaatgatgctttggcatttggaggaggtgggagtttcgcgttgtgcctcgatgaagatttgtaagttgctattgtggcatacaatttcctcgatttgcggaaaacaatcatagttagtattatatcttgatttatggagtaggttacatggaaccagtggatcatgtcagacatttgggaactcatgcttggctcatagtccagattttgaactgaagaatgttgaggtaagatgatgtttttttacattcaagtctaaagacttctttggactttaagtcatattatctcacaagttagtagaatgctcaagtactctagtgtgatcatgatgaaaaatgtgcaccatgctgggccacgactagcataatctcgacatttataaattttaacttctgttacttttgggacagtatttgatcatttgtttgctacatggaatatgcacgggaattttttaagtataatattatttttaccataatatttctaatattatcaacaccagatcctttttacaaatagtttgatatctctataaaatgaaagtagctagtagtaggtggtgtttgaatctcctgaagatgaagataaagataaagattaagtgtttcacgcaaaacgaggtggtataacgtgtgattaattgagttttaattattacaaacttgaaaaaggattaatcttatattttagaacaactttcatatagaaagttttcgtacaaaacgtgcagtttagaagtttgaaaagcgtgccgcgagtatccaaaattcaatccaacttttgttggagaaaagaacagggtcaggtggttggtggttgtgagtataccccatcccacaactgacccctcgagttgtgggatcttccaagaatgaggatatgcatttgtccgtatggcttctaggcaatgttcgatcgtgctgaagagactgggattattgatttattgcggcatggaaaacatggcagatcattaattaagaaaaatgttttaaaatttgaaaaatgggtttatttgatttttaaaaaaatctgcacagaaacttttcttaaaaaaaatgttttgcagcttgggaggcgtgcctgcgataatctactaaccagtagctgaatcaaacagggctttttgtggcaacattatttgcggattgatgtttgattgcggattttgtatgttttctcctaaaaatgatgcaactttactagtttgaaaagtatgatatacttctatttgaagtctgttgcaatgcatggttacttggctagtcaggaaagatataaccagtcataaatgatcacagatcaaagataggaagttcatatgcacttctcccaatgacatgttatttgcatctgaaatactactactacttttagattgccttctatgatggagttaatccgcatatgtttccgct

SEQ ID NO: 26661 - DNA, 21027 bp, Oryza sativa
gggtatgtcttagcattggaacgtgacagaatatccttgcctgaggttaattgggtatctaaaagatcactgcgaagtgctccctggtatgcttttgcgctggctttttcctgggaaagaactggcagatggggctgagggtgttggttgagtgacaaggtctgtggctatatgtcgaagtgtgttgtggatggaggaggtggctgagatatgtgtagaggcagtagtgggaggggagtccaatgagtctggtagcagtgatgacagtgactttgaagatgaattggaggacatgtctcctgctgatgatgaatgggatgatttaaatgatgatgctgtgtttgaattacctactgcgaagcctattcttcttattcagtcaacaccagagaagacaaaaagtgatttagatagattgagagcttggagtaccccaagcccaaaggataaggggaaagctgtggtactatgtgaagagagggtgaagagtgcagacttgtctggttctcacagtgattacgttggtggggactcttgttcatcaggagaagatcaagaggttgaggaaattaggaaggcatacaaggagtttaagaagaagctaaaggatggtgaggtaggaaatttagatgatgtgatctatatggggtcttcaagacagattaatgatggagtcttggttcagattcagggtgaggaagataatagcccatatgagaacagcagtgcagatggtgattcatatgaagaggatagtgatggatagtttgtcagaaagaagtccaaataccccagatttaatgccaaccagccccatgttaggcttgctcttaggatgaaatttgatgggaaaaaagagtttaaggaggtagtggtccagctagccttgcagaacaaaagattcataaggttccccaaagatgaaggttgcaggacaagggcaaagtgtgactgggcaacctatccatggagttttttgctatcaaggaacagcaggacaaatagctggcaaatagcaagtcttgttaatgagcacaattgtcctccaaggaaggataacaacctggtcacatacaagagaattgctcagaaatatgagaagataatcacagataacccaacttggagtattcagagcatgcagtcaactgtctctgagcaaatgtttgcaaatgtcagtgcatctcagtgcaagagagcaaaagcatatgtcctgaagaagatatatgagtctagaagggatgaatactccagaatttttgactatcaattggaattgttgaggagtaatcctgggagtacagttgttgtcaagcttgatactgaccagccaagcccagtgttcaaaaggatatatgtttgcctagctgcttgtaagaatgggttcttattgggatgtagaaaggttgttggtttggatggctgctttttcaaaggttcaaacaatggggagctattatgtgctgttggcagagatgccaacaactccatgtacccaattgcatgggctgtggtggaaaaggaaacaaatgactcatgggattggttctgtgatttgctatgcaaggacttgggagttggtgaaggtgatggttgggtgtttatttcagactagcagaaggtatactcttctaacatattttgttcagtgttatttactgtatttcttgatgtgttgttgttattaaatggcttctatgtggttgattgcagggaattgtaaatgcagttcagcactgggctccaagtgctgagcacagaaattgtgcaaggcatatttatgctaactggaagaagaaattcagcaagaaggagtggcagaagaagttttggaggtgtgccaaagctccaaatgtcatgctattcaacctagcaaagccaagactggcacaagagactgttgaaggtgcaagggctatcatgaacacagatcctagccactggagcagggcttggttcaggtttggctcaaactgtgattctgtagacaataatatttgtgagacattcaacaagtggatagttcaggctaggttcctacccattattagcatgttggaagctattagaaggaaggtgatggttaggatacatgagaaaagaaccttgatggacaagtggctagaatcaatttgtccaaacatacataagaaacttaatgcatacatcatcgattaaggaaactgtcatgcaatctgcaatgggatggacaagtttgaagttaagcatcagaatcataggtttactgttgatcttgagaggaaaacttgttcatgcagatattgggagttggctgggttgctatgttgccatgctatagcctgcattcactttaaaaccaactgccttgacagttatattgcaccttgctactctatttattccttcaaaaagacctaaagctgttgtttggaacctgttgagggaatggaaagctggcctacatctgataggccaaggccaaaggctccaggttatgttagaatgctaggaaggccttccaagaaggaaaggagaagagagccacatgaaaagcccaaagcaacaagggtgtcaagggtagggtcagtgatgacttgaaggttgtgcaaactccctgggcacaacaaggcttcatgtcacaagaggagacagcaatagcagggcaatgtgcaggtactaacttgttcatgcagattttgcttcaatttattactagcacagcatcataactgatattttctctcaaccttacaggctcaaggatctcagccaagctctacacaggattaggcacatgttgcagccaaggtaataatggcttgcttcctgtttgcacttgcttcagtcatatgtctaactgctaccacttgctgttgaaagcttcatcatctcgaaagaggcagctaaaagcttcaacatctgcaagggcagctggaatggttggggttgagcagccaagaaagaagttggaagttaggagatctcctcggctaaacagaggatgaataggatattaggttcataatacttttggacatgcttactggattagcaataggcagaagatcaccaccttttgtagagtaacatgtggtatgaaacttctgtaatatgatatctgtggcatctaataggccatcttttgtgtagtaactgaaggaattacagtgctctaaagtttgaagcaacctgtgacatttactgccaccactcttgtttacttgctgatgtaatcagatacaatgggttccagatgtggcaatatatgtcattattcatcatcacttttgctgtttccattatctccaattgccataacatgcattgattcccagtcacccaatatggctggtccatttgccagtacaggtcatcaaatcagctgatttttaactgtcatctcaaacaaaaccacaattttgcattcattccaatttgcaattacagattctagtagaacagctgacaacacaacaattccattcattccagtacccattacagattataatagaacacctgacattttcttaactccacactgaccacctaaaccctaactttcatcacaacctacaattttagatacatagttccaaccaagagaacaacaacagctactaaaacatacaccaacatcatgatacatgtctgttgtttgttaatcctatcaactaaaacacaatttgcagcttccatcttctctacagcagctcttagaccctgaacctcattgctttctttcttgggggtagactgcaagttgtgctgggctactgtcctgtcccaaagtgcagcctccaggccattcacctgctcacgtgcagaccacacagcattcctcaaatcaagcaacagttgcttcatatatggttttgcctcaacagttgcttcatatatggttctgcctcatcatcacaccactcccaaaatccgcagcccccagacttcacaaaaaaaggggaagtgaaagagtcaatcccttgaaaacaaatctaaaatgcaaaatcaatttaaaaggcacaaaatttaactcacacgcgcattgtagcatgtaaaatatctcctcccggggttatggggactccaagaaatccaccgagctgccttcactttacaatcacagaacacgggaagctcataatcaagaagcccctgcctgtatggcaccggcggctgacgccttcctcgctcaccacctccatcccaagaagacaatggcgagccacgcgatgtacctgagctcggcatgcccacattcatatagatgttaatgaatctagacatatgtgtacctagattcattaacatatatatgaatatgggcaatcttttttaaaaataaccaatttaatcggtatatatgatagaaaaatgtttaagtatttataataataatataatagcccgtgaaacgtacgggatgatgactagtagtcataattcatgatattttaatccagatatatagcataattctgagaggtactaatcccataacattaattgtgggcccatggaatttactagcattaagaaaatattgtgatagacaatcatccatgtttagcaatgttagtaaaatacataagataagattatccacttactaattaacacaattcatttaacacaaacttagacagacatttaagataagccttaatttatttgtcacagaatggccagacatttcatacaagatttaaggttgtaagctattatttcgtgctaaaattatacatgagagatggagtattggtttaaaatagcaagtatttggtacctaacgaaaaagattagtatagatagccagacgttcgggataagtcttatgtttggatgccattaatttcacaaaaatacaaatgtttgtgagatatatatatatatatatagcttcatacagcataaccaaatgggcaagcagatgaggtcccgtagcctactcttggttctgttcgtggttcatcttgctatgcctgcacgcatatatggtaatttgctaactgatattcattctcaaagggacttccaatattttcgttcatttaagtgttattttattcttctagagtagtcaggatgcactaagagaacatatcttataggttccattttgtttttttttttgtcttgttctccctattcacctatccgtgcatcacatttgttttatttttatttctttgtttcattctaaaagtgttcgttttgtttgtaaggtaaaaacatggtttacactgctagcgaaaccaggaacgaaggaaggtacaaagtcggtatcaatggtttggaccagtgaaatgcaccatttcccaagatggatactgctgttatgaccaaaaatcaaaagcttacaagacgtgctaccctaacgcatcagaatgctggagcaattgccataaacttgaggctcgtgtttgatcggctgacaatgcttgtaattctaaggaatttataataatactgtcgcaaacctacgtgatgcatgggttattattgtaaatattactccctccatctcatcttagcacatagaccaaggataagtaatcctacttatcatccatttaaatatgctactagtcattcctcgtaaacaagtgattcattaatatttacatttctcaatgcccatatagccaatcatgtgtggaagaatggagagtcatgtattaaaatccgagaaagtcattaagatgatatgttgttggattgaaatatgcctatcaaaaataaattttttagatttggaaatatgactatcaaaagtagatggagcgagtacttaataaagatgcattagttgttttctaaaattgcagtgatttagagtcctttgtcaattacaatatgctaattataattctggatttcaaaacataatacaatttcatatgtattaattaattccaaagttaaaataaaaaaaccaaagtatcgaacgatagtatgatagtataaactaaaggctcatcggccttggccctccccttatggtcctggcgggggtaccatattggtcctcacttacgcatgggccctacgagagaattagaaatctaacatcttttcataggcagacaaatgaggccctcgctgggctttcccaagaaagcgacttgaacttgaattcactaattcgatgtccatctagttggaaataaattttgactactctgtgccctgggactagtatatacgttcagagttgttctggttttagaaaggggcaccttagtggagtacaagaattgttggtttgaactttatttcgtcaagacaagatgccgactactataaatcctccgactagtctcttttactcggaccaattgctctaatctcctatacaaattgggcactttctacgagctttgtcgtaaaccaaaaaatatgaccatttattatgttattcgaacaatcatgaccttagattaatagatcttacattacaggcatagtacgtacatatatcaatccatgtgcagcatagtacgtacgcaacaaccaaaacctctcagatatatctcctaatctcgatcagccacagtacataacaaaaaagtctgtcaaatagatctccatatcaatctgatattacgacttccacgacttcaatctgatattacgacttccacgacttccactagtatgactatgccaggagcagctcttggaatagagacaacagggtacatcatgcatatgacgtccataattctccagtgtagggcatgacgggatttttttcagttccaattatactttattaactagaaaggtctggttaaaacttagaagcatgttgcaaccatgatacctctcttttcaatgaaagatccaaatagaattttataattttaattatgttgtttaattaaacgtttcctatctgaaaataggtcgaccaagtttcagatcctatctgatgcacgatgcaaagcacattgatacatgcctacatggtactacaaagaaatttcagtccattagtctcacaggaacaactttcgagatttcttcagttggacagcatcgtccagttgacaatgacgagaaaaaaattacaagttttcttaaacgttagcaacgttcctaaatcagaacatgcggagtccattaaacatagcaaaactggggacctatatgaattttcaagcattgatgtttttttccaagagaataaatagcaaaacatacttatcaggtaagatgttgtttgctagactatttcctgccagcaaaattaattacttcagttgcttcatattaactccatgtttttgtttttagatgtcattggcttcgcaccatatgtagtaggacatatggaagaaatatgataagtcatggaataaggaaactcagtgacactatactctgaattttgtgagttaaattaaaaccagttatagctgcaatttttttactctcaacatatgtagtgattaattagagatcaatgaaaaggatatgatgcaactctctttgaaaaaatatgcttcagaaaacactattgtaagcgaataaggagagttgttaaaagctgggaacgattgaagagttgatgctatattggcaagaacacaagaagtatatgtgagttttatgtttcttattattggttccttatgcttaactttttttactgaagaagtttcctaattatgttgccgtaatccagaacaatagtatagagtgtagtagtctaacgtaaaattttagtaattaagaaattggataaaaattaaaatatactcaaccttgcctacaacagttttggtactaaaatttgtcccagtgttaactgatgtaatatttaatagttatttttattatttaaattctagaaaatatatgtagtcatttgaatagatcatttttaaaaataaccaatttaatcagcatatatgatagaaaaatgtttaagtatttataatattaatataatagcccgtgaaatgcacagattgacgactagtagtcacaattcagcatattttaatccagatatataggataatactgagaggtactaatcccttaacaataattgtgggcccatggaatttactagcattaagaggatgttgtgatagacaatcatccatgtttagcaatatcaataaaatacagaagattatccacttactaattaacatcagacatttaacacaaacttagacagacgtttaggataagtcttaatttatttgtcatagaatggccagaagtatcatacaagatttaaggttgcacggtattatttcatgctaaaattatacatgagagacggagtattggtttaaaacagcaagtatttggtacctaacgtaaaagattagtatagatagccagacatccgggagaagtcttatgtttggatgccattatatatatatatatatatatatatatatatatatatatatatatatatatattatagtaaatttgtttggtgctccatggtgcccgggcaccattgttgaaattgagtatatacccaattcaaatgagtatgaatctttttcaattacttaggtattaatattaaccactttactaactagttcaaagcaagtttgaactgaatttgaacttgtttttgttagattttgattctaggtatatagcatccatacatataattagttaggtatgtaatcatggattgtgaaataaagttaaatttgagttgttttgttgataggtatatgtatgaatcgaattattataactagatatatactcacaatttgaaaattttgaaaaatttgagtgattttgtgcatttgataccatggtgcccgggcaccatggtgccccatatgagtgtcatatatatatatatatatatatatatatatatatatatatatatttataatcatggagcaacaaaaaaggtacacaatccatagcttcatacagcataaccaaatgggcaagcagatgaggtcccgtagcctactcttggttctgttcgtggttcttcttgctatgcctgcacgcatatatggtaatttgctaactgatattcattctcatagggacttccaatcttttcgttcatttaagtgttattttattcttctagagtaatcaggatgcactaagagaacatatcttataggttccattttgttttttttggtcttgttctccctatttaccaatccgtgcaccacaaaacaaccatacacatatcacacacatgcacattcttgatcaaagagtatgacttgctatctccttgggtctggtattttggctttgcaaaatatgtgatgcaggtatgccccaattgatccctatcgagctccacctatacagcctaatagaatagggacaattcggcaaacatgccttggtgaggatccacaaatcaaaccacatgagtgatctaagagaaggtcatttgaggagtaaagctactttgcgaaaatatatgaaaaccccaagaaattcataggaggaacaagaaagacttgagttatgactgttccattcatcaattacccaagatggtaagttagacactgcaaaagtgcaaaagttcacaggtacaggtatggcttggaataatttgtgtacttgtatagtatcttagaaaaatttattccacattaatccttaacctttactcgggacgagtaaagagctaagtgtgggggggggggtttgttgacgactattaagtaccaaaataacaccatcaatacctgcataaaaccataaatgtgaaacatccaacatagtgacaggatttatttctaacaatttccacgattgttggtgtatatttgtatgcaagtgatcaaccacaaaagttgggagagaataggcataaagaatggaaatatatcttgcgttgatggacttgcttggttttgagatacaacatataaaatgtgcaatcattcggagccaaaacatggagtaggataaagtagggcatacatgtcagcatcctgaagaaagatgtgagccaggggagcaaaccagggttcggtcgaacccccagctggcctaaccaggcccatcttttaccaggcaatagttattcttatcccaataacggttgtgagcgttgtacctgaagaaaccgtcatggacacatgacaagaggagatgaaatatgctctttggatgcttgagtatgccacttgtcatgaggagagcaaagatgctcataagatgcttggagcatctccactctcccaaggcacctctccacctataaatacccctctcctccctcattcttacacacaccaaagcatgagctgaattacaagaggctctagtgtactttattgtatattagaatagggagagagtaaggtggaaggaatcggaggaatcccggagttgtcggtaatctcctcttactattgtatcttgttaattactctacttttaataaaaatatcattctgagtaattaaggtttgcttagtgagaattacttcttggttagttcctaattagcatacgggatcattgttcactatagtccatttatctatagtgattgtgttagtgtttgatcggcactagagtagttattaattgcgcagacgcggtgtttgggtaattaatttccagtggttgctgcgtttcccacagtacatttgaggtgggtgtagaggtggtgacagccctcaagagcacttaagtcctccctgtccgggtatgtagtagagcaacatcttggaatagcgggttgctagtgcatgaagtattgcattaggattaaagttaagctttctctagacactgtttctcattagaaatcatctctgccctctgcacatattagctttgtgtccttgcatgaacctgatgaggagataatcacacacgttcccttggattcgatacccttggaatactctgtaggggaagtgctacatcagtatatccgtgcgcttgcggattctatctgtgagtgtaagaaataccaacactactcgtagcacaaaattgggggacatatactagatagatgaaaagtatggattttaaaaactttttgtaacagttgatgtgttgatgcatcgccttgagatgggcgatattcatatcgcccttagacaaaaccaaatacaaacaacaagtgttgcaaaagtattatcggcttgatggccgatacagatacatatttatatataggatgtttttgttacaggagttaagtatgaagccaagattgttcatgtctatctattacatcaacccaggaaggtatggattgcctctattgcacggagatgaagactatcgatctcttctattatctttttgtcttcggcgtcagttccttgccattgctgcaagattgaggaagactaatagagagcaggggagaacgccgccggaagactggatcgccggagatgaaggggtttttgcaacaagaaggcttgtgaaggatttaaccggagaaaggagattttgaaggagtgggcctctgcttataagcttaacagtgaaggcagaaatacttagtttttcgcgggttcgaatagagcaaattccaccgcattatataatacagcggaagtggggggcatgtgttaacaacggaattttgcatcaggttcagagaagaaggaagaagatcgaagtggatttgatttcggatcgagttggatttggagtcgggctgcgcatcggctggatgtcatatcggctaaaatagagtgtgagttgatcaaggttgatgaggatggtagccgatatagccgatatgggacagctttggttcggtttgggcctaaatcatgataaccatcattgccaattggaggtagagctcaattaaggcaattgtatctattaattaggttagtttaagtcgattttgttagatttggtaagagaccgccgtatgttgtcttgtttgtatcttatctttaggaaggtttgagtcatgtccataatggactaagtctgtatttggggtacaaatatgaaccccctaccactgtaatatgggagacaatccaatacaacttcgacgcatcgccacccttttttgttcttattttcagcgagttctctcgacaagaggtaacccgtctcgatggcttgtgctatcggggctatcatgttgttttagatgtttaagtccttttctcatgaccatctgtcatcatatgtcctagttaatctagccttagtatcacaatttagccttatcggctggttctcgctttagggttcccgccggcatcagctacattgccatactatagattagttaacgcatccgccatcttgaaaagtggttaattccttgattgtttagattttaggtttttttacttactttgagatgcatcaccccgagtcttgtctagaacactaaaaactaacctggaattaatcataattagagatagcatcggagtttcagccgatcttacctaatatacatgctttttactagttttatgtatatttgccacttatatagacagatcatcccatataatcatatcaagttagatcagtatcggctgggtatttgaattactaactgattgtcacgaccgaaaaaatgcctttttccaatcgctagtgcattgatccccatcctaggaaaagccggggtacacattaacaatcatgatacaaaagacatgtctttattgcatcgataatatttacattattacaaaggtgcttaaggcctgacaaataaaaataaacaacaatgggctagcaggcatatggctccatcttcataggcgctcagctggagtataagccaagactccacctaggactttttcaccaaagctttctcttactaaagggagaaagattgagcaagaatgagtacaaccacaatactcagcaagtcacaccagaagatgcatgattaatgcaaggggtacaaggagtaataatataaggggttaagttttgcagcaaacaagcatttcaaaccacttagttgctcaaagctatttgctaaattcgatcctgagtctacacaatattattaatcaaggccgtgaacccacacgaccctgccttagcccaaggcctacgatgagtcagaccaaattggcaaccctgacccggatcccagctcgtcccaagccaacccaggccaaccattccaggttttagttggttaaccaaattttagggctatagggctgcttcaggatgcaaagataacagttcgctaaggtacaagcttctgatggttgggtattgcatgggtcggcttgctatcaactgggtttctcagtttggggcacttgtcggtgtaatgacctagttcttgacaattgaaacaacatatatctttccgaactcaggatttgtttttcccatctcgattcttctgtcctggcactgggttaggagaaaactgttgtcttggtggggaatcgcgttgccttcatgcttctctccattggagctggtgggttagttgccatcttcttcatcagcagaaaactgaattgacaatcttttggtacatgatcagttccttcgcacaagaaacaagtgatcttccttgtaggacattcgcctagtggatgctcttatccacaataagggcagtgagcaacacacgtgttagcaatatgtccaatttcaccacagcgagagcatgccttgagttcccttccacacgtggaagtacggtagtgctttgcaataggcaatagaggcccaaagaccggtccttatggtggccgatgtgcttctatcaaaacaatgcaacttgagcccagcttaaaaccattttgggggttttgaatagagggggaggtgtatgtccaattccaacataagccaaccattccataatgtccaagtgaaatgatataattcccaaagtctaagattatgaaaccacctagggttgcctagttaaccagcaaagtatctacctaaattcatactagtggaaccatggatagagtacccgctagttggggttttattttcctagggtgagcaaggtgataataacaatagcaatgataaggctataacaaggaataataggaaagctaaatataacagtgataacgcgggagtttaaataaagcggtaatccaataatttaaaataaaataattttataaactggaattcaatatactcaatgtaacaccctaaaaaaaaggcaagcaggcgtgcaggccctgggccttggcctacccatgcatgcggcccagcagcagcacagcacgcagagcaacgagtagtagcaactgggtactgtagctggaatgatcccacctcgctagttgagagtgatcaacactagcttataaggatgtttgcctgggtagtgttaactccgattccggaatttttgtgttaaagcgaggacgaaaagctaagagaagacgtgttcctggtcatttgggaaagcacgtacggtcgtacactaagagaagacgtgttcctggtcatttgggaaagcacaggtatagattagttcgatggggacgtcgaacctttgagggtgggtgtatgtaaaaccctataagaaaaaaagggcaagcaggcgtgcaggccatgggccttggcctacccatgcatgcggcctagcagcagcacagcacgcagagcaacgagtagtagcagctgggtactgtagctggaatgatcccacctcgctagttgagagtgatcaacaccagcttataaggatatttgcctgggtagtgttaactccgattccggaatttttacgttaaagtgaggacgaaaaacacagagagttgcaatgttaggtgtggttttcggccctgggctatcacaaggatgatgcgacttgcctctctcagagagaatggtgtggacccccgtttttataacaggaatcaatcgtgtaaacagtactatttccctggatcaagtagtctggtacacacgaattcatagctgaaataccaagtgcacatacacgagtgtctagtacggcttattacatcataagcccgcaggcatagttcttaaatcatcgaaccgagcggtccggaatacattccaaaagcagaaatagataaggcagcggaatttaggcagcggcacgccattgccacaggcaacgaccgtaactaagacctactgggcgccttcgtcttcatcaccctcctggtagtacgcgtaaggatcctccaaagcttcatctccaacctctgattaagtttgtatattgcaagggtgagtaccaaccgtactcagcaaaccaccacagcaataatgcacatgacaggggaatccaaaggatggctatggttcttttgcgcaaagcaagttttgtaattcttttcacaagcctaagacctagcatagactgatcaagttttaataccagtgttcacattaaacaacgacggttctgtccactatctattgtgatcccaaggatagcttcccgccattgagtcgtcatggttttctgagaacgtccatattcccgcctctcaggaagtggctccatcagcatagaaatcatcatgcaatatcccatctgtcggtgtcatggggccgggggtatcgtgactagaggcttgggtagccgcggtcacccacgtggcctgaccccctcgggggggggggtcgggcccgagggtgacgtggccacccctccctctgtctccccgaggggtcgggccgctcccgtgtcggccccgagggatcgggcgcccccgtttcggccccgagggctggggcgccccgaccccctatggttttggcgccacgtgtgtgggttaggtgagcacagcggggctcacctaaccgcatttataacaggttggacgagcgcgccacgccgcatttaatgcggcgcagcgcacgctcgttcggtccgtgaccggtcgcggtgtgtgaccggtcacagaccggtcagatcgcgggttaggtggcaacaggcggcctgtcacacgcctcgccccgtcccgtcggaatgatgagagcttcctggctctcgtccctagccagagccggcgtgctaactcctggagttggtatgtcagtcccggtcagatccattccaggcttcagcacaagcatggcaaggaagtcgctggccattgaatgaaggttgaaatgggcgtccaccgggaaagctggcgagcggggcaggaggcgtgtgctctgcttgtcagaggtcacttccggctgtagactagccctcattgtaaaaagcatgtttcctttcttaggcagctagaggcccctgtggtgacccctgaccagataaaaaggaggcccaggcctaggagagagagggaggaaaaaaaagaagaagaggggtgctagagcctgaactctctctggctctgcggctctctgtattccttcacatacagatccaccagaacacaggagtagggtgttacgcttctcagcggcccgaacctgtccaagtgtaatacatgtcccggtgctcaataaccgcgagcacggctattcgaatagatttggtttactcacactacagtggatgtacactttacccgcactccgtgactgcccaacacatgagcctcgtcctaacacataagacgcgtcacggcaaagcctttcgataaccttgcattggcagtacccgctccatgaactttagccctcatgcactctaggcgtcatacgcttctagcagtgagaggagttctggcgctcccgggaagggaaaaacacacacattcctacgttgcttcttgtcgttgaacccagtccatcatgattgttctcttatgggtattctcatgtagtattgccaagccagcctctgaccatccggaacgggcatccgccatccacctggccatccaaaccgggcatccgccagcagactacttgccgcatcacacacctaaaagaagaccactacgcatggatactgcctccgctcagctatctactccgctaggtctatacccatacgagaagtgcggttgtacgggggtcgtttcatgcttaacttcatggctcggtccttaactgaccagggacggcactagccttttccggacaccacccaaatcctccagccgccccagtcgaaaacagttgtttcactttattttcctttcacaaatcatgtcatcaatatcatggcaatgtggcgctcatgtctccacatgccgcatctcaattaccttcccaaaggtaattgcccaagcatataacatttgataaatatgagtatgcatgattctagaatagcatttctaagcaaaggtcatagttgactagggactcatacgtaatcatggttacaaagatttaagggtaaacaataatcaaggcatggcataatcacaagtaggatgttcatcattgcatgcaattttatttgtaaacaaaacaatttcgcaattgggatcaacatgttcaaggaatagtgatgacttgccttgctcaaagtcttgcgggtcttgaccttcgcttggatccgcaactccctcgggctctatagctacgtgctaaaattgatttgaattcggttagaattcaaatagaaatccaaataaatccaaatgaaagtcgaatgcgaaagtcgatttctttatattaactttactattcgcgaactaaggcaaacccaatttcgattcaaactattttgcgggtataaatattttgttgtcataagtttttaatttaatctacccgagcattatatccatataataggttagaaatttctatcgcgagctaaatatcggacgaaatcctagaaatattatacgaattaatttagtctatgactaaatgattaaatataatacacgggtaaaatccctagtaattaaatccgaatttcaaccgtgaatcgattacttacagggattacccaaaataataatctataagaatctataagaattcatctatttgtttagttattaactacatctaaattattaccgcgaattgatctcttatagaaattgccaagaataatccataatttatattaaattttgcaattctacgactataattaatccataattaaattctaatcattttaaattttctaaacttccctaatcttcctctaatttctatttatttttttcttttctttttctctcttcttttctctcttttcttttctttttctgtctttttctctcttttctctcctcccagctcctttctttctttttccttctcttcctctcttctcttttcttcttcctccctaccggcctctcctttcctctctctctctcggctcttgtccacccgagcagcggcggtagtggacgcgagggggggaaagacggctcaccggcggcggcggcggcgacgacggcggcagcgcggcggtggcgactatggcggcgcaaggcgacggcgacacccggcgcggcacacgatgtggcgcggcggcaccgagggcagcggcgcggcggcacgaggacggcggcgcggtggagggagagaggggaggaagaggaaaatggagtgggggaaatggagtgggggagtatttataaggaagagggggagaaggagagggggaggggcggcggcctgatgcgacggcggcgcggggctcggggcggcgcgcggggctcggcgcacggtgatgggacggcgatggaacgcgcgcggcgacgggacgggcggtgacggggcggcagcggtggcgcgcggcgcgaggcgggacgcgacggcgacggcgacagcgcggcagcggcggcacagggcgcaaggcgacgcgacgggcggtgacggggcggtagcggtggtgcgcggcgcgaggcgggacgcgacggcaacggcgacggcgacgcggcagcgacggcgacggcgtgcggcggtacgaggcgcgaggcgcgacggcgacggccgagcggcgcgcggcggcaggcgacagcggcacggcggcaggcggcgatggcgatggctcggggcgcgaggcgcgcatggcaggggaggggaagaggctaggtaacctcgtcgaacacctagagtgcaatgaacagtgtctttttcctatttatcccgattttagtttatttcccatataaatttgattctataatttctaaatcttgcataaatgaagtttactcaatatttgtgttatctcaactaatgaattcaccctagattattattactcataatttatttgaatttttaattagggttaattcttgttccattgcatttaaatctaattaatacaaatatggccgcgatgatattttatttattcctatccttacataatctttattttaaattataatttatttatttctttaaccaaatctaatttcagggttaattcctaattaattttcccctatttgtgatcgatgaattccgaaatcaaaatccaataaaatcatcgaataaaattggcatgatgcaatttatttaaaaagtttttgaaggcccatatttttagagtttagatttttgtcggtcgaattttcagggtgttacaaatggccttccaaacttccaaaccttcggcgatgacagcgaaccatgcttcgggaacctccggaacaagaggagctacgcgaaagcacactagcaaacctaaaaccctagaaagaagtaataacaatacataaaaagaaaggcacggggttctttagattataacaaaagttctttagattataaaaaaaattaagaaacttggacgggtcaattcggagtttgtataacaagatatggttatccaaagtttaatgctgttatatggagatttacggttgttgtgattaattttgcaactataaaacatgtgtaagtgcaagcctggaaaagaaaggatggttgcaccgttgacatgcagcgtgcacatgtcaacctaagggaccatggtggaccgggtgcacagagacaatccacgggtcgacagaagcgcaccccgtgtgtcaaccgagacgagtggccgacaaacggactccactagacaccacgtgggttacgcacatggaaactacacggctaccgagtgggcatactaacacggtcaccacacgtgcacacgaacaaccgccgacaccggtacacgggtaccggggttgacaacggcacgacgtgcacagtgacaaacaccgagaggacgaggagggggaagcgaggggaggggtcctcaccacaaataggacgagaagcagaacgacgacgatgaacgggcacggcggagacggctcggggtacaccggcggcgacaaacaacgacacttcagtggcgaccctaggacgaaggcgagacgaggccggcgcaacgcttgatgacgcgaagctgaggacgaagacgacgatggggcagcagcacacttgacgaaacgcagacggcgaacgagcgcggcttgacagagggacaaacaccatgatgaggaggaagacggccgggaacaatgatagaacaacgatgacgaccggtggcagcagcacggaggcgaggacagcgtggaactagggatgcaagtgagtagtcctgctacccgcataaaaacccgcttgctagttcattttccacatggtagtataaattttagaaaaaaatgaactagaaatgagataagtggactaaaaaaacccgcttacctgtcccgcttgcatccctacgtggaacacgctgctgcgatgctgacggcggtggcggtatagcgagacgacgagccaacgtagaggaacggccaaacgaaggggacgctgacaaggatgaacagtgacgacggcgatgaacaccggcggggttcggccgaaagggaggcgaggctgaggacgaccttgcccatgcaatgcctgaggtggtggtggttcggccgagcggcgcacgggcgaggaggaagggccgaccaaaagaactccggcgaggcggatgaagaggccggtgcggttgcctccgggcaaaggcgggcagcggccagagtggagagcgatgctgcggtgtcggaggaggagacggcgacgtcagccggtgctatggcgccgcggcgggggcggctggaggcggtgcagtggcggcaacgccactggttgccggtgggggcg

SEQ ID NO: 26662 - DNA, 574 bp, Oryza sativa
atcaccagctgcatagaactgtttcagtcaaattgttcccagcagggacatcatctgtatatccaagcaagccatcaactggatcaggacaccacgtcggcccagcatctcttggaaaatcagtcaaggaaggttcaaagcctccatattgtgatccataattgagcgttgaagaactcccactactcggcggttgagaattgtaaggattggcatttgtatattgctcattgcttgaaactgaagagaaccttatcgcctgggacgaacgcagaggcccaacagacccggtactggactgaaaatgcccatgaagaggagcaacagtactctgattctgatgaggtggcataggtgtgcttctcaattctctctcccgcggaacattctgcccatctggaatcctgggaatgttttcatccagggtagctggtatagcaggcagaggcgatggcacagtcaccggaattccagaattgtagagctgattggtgcttattctctccatttacaaacactcaagccagaattatccttcactgtgttaattggcaagaccttttgttgactcgat

SEQ ID NO: 26663 - DNA, 3017 bp, Oryza sativa
accgcgagccgtgaggctgcgtgtgggcccgccgcatccgcgtccaccgcgaaccacgcgcatgcaccgcgccccgctccacaccctagcgccgcgccgcgtgctccctccgcacggtgagccgagccgctgacaagcaggtcccaccccggaccacgcaagatggactcggtccaccggcggcctctctctcccctccccgcgccctattgggccgtgtcctcttgggccggccggcccatttaactcggccgagccgccccttttctctcgggccgcgccctagccgcccgagggaagtctacttcccctccctcttccttttctttttccaaaagggtttaattaaatcctttttcctttagaccaaaaatccaataatcttagaaattcaatatcttcccaactgtaaatccgtttgactccgttcaacttccaaaattcctcaaatctcgagatctatctaatggcacgcttagaggtcattaatagggctttattttcgccgtttgttgagttgtcccgttttgcgtgtagtttcggagcccgaagaccggcagtgcgaggatttcgaggatcaagctcaagatcttgagcaaggcaagccacctttgaacatcttgagcctatatttgaacttaattatgttgcttgaaaaatattatgcattgataggattgcacttagtctgtttgtcccgtctgcaaggcagattggcggacctacctaatttgttgcatttgatccttccattgttaattgttatatcatgttcccttgtaaccacctagttgcgcctcgatattcgtgcactctatgcgagtatcgacggtcgccttcaaacttaaaatctgagtaacttctcgggtaaaacttgggttttacaaaagacttggaaaacccgacacctgggtcggtgcttgcgaactaaatgaatttcaaacaccgcggaccggggaacgtaccgggtgtacggtttcccgctcttgcactaaggaccgtttccttggaatttcatccgaacataagacaagtactaccacatgggtggaatgggacacccctggctgagtaactagcttatcgggggagccttgatgccgagagacatgtggattcaacggggtggtgccggggaggacccctgggcttcctggcatatgatggctgggacctaacctgatgttggtctgggacccctcttattgacatatggtgaacctgtgtcggcttttaaaatgtctcggcatgaaagcctcaaggtctccagacgtggccgttctgtacgggctgggtgatccgggttagtaatgtcgtgtgggtaaagtgtaccccctctgcagaggttattaaactgttcgaacagccgtgcccacggtcatgggcagatgtgaggtgattcctagcgtagttttgtttgactactactttgtgaaattgctgttgtggaatgggatcgatgtttagaaaatctgcggctgatgggatcagctaggcccgggtggccatttgaaagctgttggccgggtgccaaccttgatcaattcaaagactgatacactgcacatactccgaccggacgagacgcactgtctcattcgtgtcgtttgagaagcactcgcttagttgtttcaaaaaggagtttaaataaaatcaattgcaaaaacaacagcctttcctttgaagcctgcattaaacacttaattcccatggcttgctgagtactcctatactcacccttgctctatataaataatacccccctccagttgctggagaagatggagtggatcccgctgatgaggagttcttccaggagtaagtcagctatgatgagttttagggtttcggtctattcccaagtcacgcatgtgatgattggtctaagtcttggcttccgctttcgcttttgtaatgcagttgtgagctcgggatctgtccgcagcccaacatgactgtactcctactctgtaataaagagacctctgttgctgtgatattctgtcttcctgtgataccagcactgtttcctaggactggtatcgattaacaggttaatttagagtgtcacgagctagttccgttcgggactagttcggggcgtgacacaataattgttggtcaaatacttttgtagttgaatcttgaaatatgtcacgccttatattatgggatagagagggtagaggcttatttttaaatttttattagaggaaggttcaatttttttaaaaaaatatagataccaatatcactgacgtttgaatggtacgttcgttcaccatggtgctgtttcgatggtttctgataatttcctacctggctagctccatgcatgaacagattcagtcttttttcttttggatggaaacgttaatgaatattgaaatggagatgatgactccatgaaggctcaaatggctcatatttacactgtcaacacctattgactttgattaaaaaaaacgcctatttgacattggtgatctgatcctggttttaaactttttatacaaaccatacatcgagagcctggagttgcatggattgtgttgtgtaatctcgaggaagaagataaccatggtcattaatccactcattaatccactcactaacagtagcataatcatgggaaggctggcgccaatgcaactgctcgtgctctgcttgatctccgtgacgacgtgcgccgccgcgcacggcctccggcgaggtctagaccagcaaggcatgcgcggccggatcctcgccgacgcgacggcggcgccgccaggaggcgcggtcgtgcccctgcactggtccggtgctcactacgtggcgaacttcaccatcggcacgccgccgcaggccgtgtcggggatcgtcgacctctccggcgagctcgtctggacgcagtgcgcggcgtgcaggagcagcgggtgcttcaagcaggaactccccgtgttcgacccgtccgcgtcgaacacctaccgggcggagcagtgcggctcccccgctctgcaagtccatcccgacgc

SEQ ID NO: 26664 - DNA, 2960 bp, Oryza sativa
ttcctcggcgcctccccaaagctcgccggcgccggcaagagcaacccgccgacaccgttactcggccagcacgcgtcgaacacctccgacgatggctcggacccctactacacggtgcagctggaagggatcaaggccggtgacgtggccgtcgcggcggcatccagcggcggcggcgccatcaccgtcctgcagctcgagaccttcaggccgttgagctacctgcccgacgccgcgtaccaggcgctcgagaaggttgtcacggccgccctcggctcgccgtcgatggcgaacccgccggaacccttcgacctttgcttccagaatgcggcggtcagcggcgtgccggacctcgtgttcacgttccagggcggcgccacattgacggcgcagccgtcgaagtatcttctcggcgacgggaacgggaacggcacggtgtgcttgtccatcctgagctcgacgcggctggactcggctgatgatggcgtgagcatcctgggaagcttgctgcaggagaacgtccacttcctcttcgacctggagaaggagacgctctccttcgaacctgcagactgcagctcactcacctaatggctgcgagatttgctcctgtttcacgaaaagtacttcgaggtaccagtatctcactgtactaaatcgttttcaatcgttggatctagttggacaggatgtgcattgttaaatccaacgatcggaaacgatttggtatcgtgaagtatcagtatcttaaggttctttttattggaccagagcaaatatcaatggctgctgcttcttcctggaagcatatatatggtgattgatatatgtacacatgtatgcagtgaggtgtgtgtgtgtttgtgattattgccagaataaacgcagctatagacggcatgtgctgcggtatgttttactgtgctcttcagtgtgtgtcactcactcacctgcgtgtgcttgtcatcataggctgatatgatgtcagttatatgtgaatgtgagtgcagacaatatccagtccggatctggagttcatgtgtctaagggttcatcaaatggattcattttgtctagcatagtttcctgtggcagaaataatgctatgaatgctgttctgtaaaagtaaacataccataccagtggagtgcatacagagtatggcttcatacctcaatttcaagtggtgatacatattaacagcttcagaaacaaacaaaaaaatgattattaccgcagtcaaccctaacacacagaaatcagtaatcaaacctttaaaatcaagcaggtcaagtaccacatggtctaaaaaaattgaaacacaattgtaacttgtaagacatcttttcacggcattttcgcatattgtcaggagactttgtttaagatatataatcttgccttatgactactgcacggtaagaacaaatatgacaactggaaatcttaacagcaacataaggatatgtttgacaaagacaccttgcattctgaaacacccatgcactggtgcatggatgctcagacaaagaacttccacaaaagccgcatcacactgccctactcgaggtaaataatcacatatatgtagcatggagagtgatcacaaataaacataaaattatcatggcgacatcagacttaaaagtacaggagcagaggcattgtgaaacatggtactccctccgtccaggattataagagattattccctatttggcactcattaaggaagagaaaaaaatgcatctagtaatatgtggaagtacacattggcacattaaataagctgcagaatgtacttatttggagtaaactattgcttttggcaggaaaaagagcatctaaggacagtgacttgatctctgctgtactggataaccaaaatcccctgaatcatggacaaaccaaggcgccattatccactataattgtggccagagggagtacctttgttgctcggagaaattttcctttcaagaagactcgaaagaagaatatgtacgctttatagtgcccaggttttagcaaaatgccaagaaatttgatcaattttaatcatactgcagacatgtgaaaataccatatgggcaaaaggatagtggttcaacaattctaacacaaggatctaaaaagtaaatgaacagattcactcaaaaaagagtgctagtaaaagtatgtcaagcttgcttattactgtaccataaaaaaattgcacggatcaaagtgacaaataatcagccttcagggttcacgcagagatgggttacctttaccgcaaggttgagcaaagtgagttcaactaacagatatgctcaagagtgagcgattgccatagcgcatagaagttttatttgcaccagtttttagtttgaaaaacgactactgtaatagtgtaatttttttcaatatttttgtagtattttaaaaatatcctcataagtggagtactatatctgtccgaaaataactttattttcacccatccttaatacataccaataaaaaataaaaaaatactccctccatgccattttaagtacaaccataagtttccgtgttcaattttaatcatccgtattatttaattttaaaaaaaaataaaaaacataagtcatgtgtaaattactatttatattttatcatctaataacaataaaaatattaatcataaaaaaattcaaataaaacgatcgatcaaaattggacatataaactcatgagtataatgaagcgggatcctctaacataaggtcacccccgacgtggtcactgacaagtgggcccgagagcggggggggtctacatgtcagccactatattcctctgcctttatgtcagaggatcccaatccgcttaaaatgggatgggtgagtaccaatagatcctcaactttatcaaatcctttatctagtctaaacacacaccccaccaaaagtacagtgactgattggagaagc

SEQ ID NO: 26665 - DNA, 3543 bp, Oryza sativa
agctcgccggcggcaagagcgccgccatgacgccgctcgtcaacacctccgaagactcctccgattacatgatccatctggaagggatcaaattcggcgacgtgataatcgcgccgcctccgaacggcagcgtcgtcctggtcgacaccatctttggggtgagcttcctggtcgacgccgcgttccaggccatcaagaaggcggtgacggtcgccgtcggcgcggcgccgatggcgacgccgacgaaaccgttcgatctctgcttcccgaaagcagctgcggcggcgggggccaacagcagcttgccgttgccggacgtcgtgctcacgttccagggcgccgccgcgttgacggtgccgccgtcgaagtacatgtacgacgccgggaacggcacggtgtgcctcgccatgatgagctcggcgatgctgaacctgacgacggagctgagcatcctgggaagattgcatcaggagaacatccacttcctcttcgacctcgacaaggagacgctctccttcgaaccagcggattgcagctcactctcctaatcaatggatgatggtgcttcttctcttaggaaaaagttcgtgtgcttagctagatataggtggtgtgtgcttttgtgacttttttatgctgtgactgctttagtaatcggtgtgaggtcctggttttattagatcttgtgttttcatgtctcggtgaattgatgtaattattaactgtagcctttaagtaaaggccgggattctatctcattacctaaaagtttttagctagtaacagtagttagctttgctgttcaaattggccatatattcatgcttattgtcagaataacgctgccagtgccagtcggaatgagctgcggcatgcttatttttgctctccagtgtagcattgtccagtactccattaagtttctctgttcattaatacacgacaccattcagttttgagaatattttgattttttttttagaattacatgtacacttacaacgcatgcgcactcacccctatgaacacacgcacgcaaaccctacccctatgataccattgaaaacacaacgccgttaaatcctagaaaattcgctctcatggggagtcaaacccagaacctcaggtgctactgaagctcttgtaatcactaggttacaggctctttcgcaagaatattttgattatttgtcttaatttaaattgttatatgaatttaaaagatataaattatgcttaaaagtatctttcatgataaaataattttaagaaataaatgttaattacttattttttttaataagataaatattgaaacatatgtctaaaagtcaactgtctaatatattaaaaaaagtaagcatttttctggatgaaactctatagtgtatcggtttcacacctgctttacactggaagaattttagagcgttttggtataaattgcctacgagattttataaaatttgtgtgttccaaagaaatcctcttatattggtgcaagtaatacatggtttcacctgcgcttgatcgttcttctattttgccatataagagtattgttcttgtgttgatttggcccctataggctgacaagggcgctgactaaatgaaatgggcagggtgataagaattaagaatacaacagttggaaaagaggcaaaggaattaagaggaagcagaacataaacggcgggatctggtgttcgcgatgagtatttgtattcactggagtccgatcacaactactaccactgatcactaggcccatgttattaccaacatgcgagataaacattgcgcatgtcctaactgaactttttgttgggatcggtaaaaaaatgctcaataaatcaaccaacctcaacaaatttaaatttttattatataaaaattgggaaactgtgcgttgtagttgtagatggtcgattactagtctaaaaatgatagaattgaacgctcctttcatttgttaatttctctataatcagaactgttcaacttgagttgctaacaaacacaaatctcaaccatgtaatttttaagaaaaacaagctggttaaccggccagctcccacgagttgagtttcgttataaatttatgagttgctacgagtatttttaaccttttccaattatggtttggaaatattccagcaacttactatcgaaatttaacttttgtgacacatcactctctttttttcgcctaaacgataccactctggcactatatacaccacgcataatataagcctcgacaatggctgtggcgtggtaccaacaccatatttgccacaccgttgatttttggaaaaactattagaggtttatttttaaaatttctattagaaggttcactttttttaaaaaaaatatatccttattgcataagtgacgttagattgatgtatcagttcaggattgaagctaccatttgagtggtttctgacaatttcctatatctagcaccatgatcagatatctaacaaacgctactgaatcccattttgagttcatgaatattcaaactgatggagatgatgactaaaaagtggccagtaattacagtgtcattgtctgtcttaaatcttaattggtcctggtcattgcatgaaccagctatagcccctatataatcactattcactaccaccgatcgtgtgatcttgaggaagaacataatcacggtagctaatccttccctgtcgaagtaaccatgggaaggccagtggcaacactgttcgtgctgtgcttcatctctgtgacggcgtgctcgctctcggagcaggccacgcgcggccgcctcctcgccggcgtcgacgcgacaccgccggcggccggaggcgcagtggccgtgcccatctacctgtcgtcccaggggctctacgtcgccaacttcaccatcggcacgccgccgcagcccgtgtcggcggtcgtcgacctcaccggcgagctcgtctggacgcagtgcacgccgtgccagccctgcttcgagcaggacctgccgctgttcgacccgaccaagtcgtccaccttccgtgggctgccgtgcggctcccacctctgcgagtccatcccggagagcagccgcaactgcaccagcgacgtgtgcatctacgaggcgcccaccaaggccggcgacacgggcggcaaggccggcaccgacaccttcgccatcggggcggccaaggagaccctcggcttcggctgcgtcgtgatgactgacaaacgcctcaagaccataggcgggccctctgggatcgtcgggctagggaggacgccgtggtcgctcgtcacccagatgaacgtcacggcgttctcatactgcctggccgggaagagcagcggcgcgctgttcctcggcgccaccgcgaagcagctcgccggcggcaagaacagctcgacgccgttcgtcatcaagacctcagctggctcttccgacaacggctcgaacccgtactacatggtcaagctggcagggataaaaaccggcggcgcgccgctccaggcagcgtcgagcagcggcagcaccgtcctgct

SEQ ID NO: 26666 - DNA, 997 bp, Oryza sativa
cagatgtgtcatggtaagtgtgtagaatttctttggagtctttgaaagaatttagcttgctgaaacaggagagaaatactaagttgagccttgtcttgcagatgtgtctcaacacatttgataaagcagctgaccttgatgttctgaaccatccgattctgaatttcttttattacttggtatgtcttgattcatttatttcctacttggtatgcttttgttcgtttatattgtcaaaatgttaagcattcaacttatgcagtatgacttacgacaacttttagattttgttatgactaagcaaattatgaaggtatcgagatgagggcagaacttaacaaaggagcatggataatgtgatgttgataatatagtacagtttgcatatgaagaacaataccatatctgactcaatgcggcacgaatgccagctttgtattagagggattttgcgaatattctaaaagaaaaataaatcataccacgggatagctccagaagtatcatatatatttgtttactgttcttatatactaacaaaattctctaatttttttggcagctggttgagatcgtaccttcagctttggtgctattcatcctaaggaaactgccaccgaaacgggggatcacacaatatcatccaattcattagagcagccctggcagggacagaagaggttttcttatgagtagtctatacagcgtggtaaatacagaaaaggcaatgtgaaagataccacacttgctttcgagcttgccccagcttttgtaagaggaagcctttagaatctcagggtaccatcgtgtgtaaaaatgcaatctggtgttgttacagatttagaaagtgttaacttatatatatatatatacctttgttcttcttcacagtgttttccctctgtacacatcactgcaactgtgcctcgcatatttgtgcatttttacctggcgaaaagactgcattttcagtacttgtttcacccaagctcgagga

SEQ ID NO: 26667 - DNA, 1096 bp, Oryza sativa
tatggttgaacctaattttctagtagctccagtataaattactctgattaatgtaactggttaaaatcaaagcatcttcatgcagtgtccttctaggtttctagcgagtctctcattaaagctcttacttaccttactcgaaaaacatgtttagctgttacgtgtttttcttgcatatatattccatacaaggacaatgagctaaactgcacaataaatacacctttgatgattagaatacaaatgccatcaatgtttgtttagtttttacactagtaaagtcaaccttaacatcttgcagtattcattattaagaaaaccattgggactgggctatgtcacatgacctgattacgggtattctatctgaagcacagaaacaaatgtgcatgcattcttttattcctgaatttatttgctgaatatggttctagtttcgcagaataactttcagaaacttttcacagtggcataatcatgtatattcttcttttacttccctccactcttcctattttccccttgtatattttatatcagtctattcatgtttacctcactatagcatactgaatgttaatgtgctatcaacttttccattatgtgcagtttgctggcattaatggagttctgtactacactccacaaattcttgagcaagctggtgttggtgttcttcttgcaaacattggacttagctcctcatctgcatctattcttattagcggactgacaaccttgctgatgcttcccagcattggtattgctatgaggctcatggatatgtctggaagaaggttagacttcatattttacatttttttttgtgattacatgcatcacttctaagtgaaagtattatgctaaccattattctgcgttgtttctcattcaggtttcttctccttgcaacaatccctatcctgatagtagcactagctatcttgattctggtcaatattctggatgtggggaccatggttcatgcctcactgtccacagtcagtgtcatactctacttctgcttctgtgtcatggggttcgggcctaatccaaacattctatgtgcaccgattttcccaccaccgttcgtggc

SEQ ID NO: 26668 - DNA, 1145 bp, Oryza sativa
atatgtatttggcctaatttgagaagaattgcgccggcatggataaccagaagtcccatccctgaaatcctttattgccgtcacctcctaaaggttgccgttcaccaaggatactagtttgcctctgtgatttctccctctgaattgatccagaataaggaaacctcccattgcctgtttgaggagtactgcacatggtttcatgataacttctagtacgtgagtcctgaccagaatgatgatttggatgttctctaaacacttccagataaccataactgccacgggatggtctgttgccattgtgccaatattgattaggaggagcaacttgtgaatagtcaccactataggacttgcgttgctgaaagtgtgttctatgcatgtcctcttttgtgtgacacacatttagtcgtgaatcgtggccattgcttctccttgtgtttccagaacctggaaagtgactccatctcattggtcgactgttgccagcagcaattatgtcatgcctcgatgaccctgatgaccatcgatttgcattgtgggcactcctctgacaagtaaacaaataattgtaaggatttcaaaataagagaactttttgcaagaaatatgtcagcatgttaatcttattaacagctccaattgccaaaggtgtataaaggacattattcctaaataacatgaactgctcatgtgactgaataaaggactagaaacaacaaaataattagcttttaggaaattggggtcacaaagaacaggttctaacaagatcagaaagtatttgctactggcaccacacccagcacacttcaaggcctgcattgcttcaccaggagcagcaggacagtctctcctcacccatatgtgttggagggaaccatcgcaagcttttagtaaccatatgtccctaataaacatgataagtcctaccttccgacaaaagaaaatgttccactttattacctgttctctttggttcctctgctctccctccttggttgcatgcataattatttctgctaaattcttgtcgtcaagggcattaaagaaacatccacgtcgttttgagtcatggactaattctgcccatattgaattgcttgccagcaaagtggctccatttccaaggatccaaaggc

SEQ ID NO: 26669 - DNA, 2112 bp, Oryza sativa
ccgccttgcgcaccgtgacggcgaggcggaggccgtccatggaggccggaacgccgcggacgccggccacctcgacggacaggaggcacccgcaccggcgcttcccgatgcgagagagcacgcgcaccggcttccactcccatatcgccgccgccctcgtcttccccccaacctcggccgccgccgccgccgtaaaaccatacctcctcgactccaccgacgtctcgccgccggccggcctcctccacgacgacagcgagagccggcgcgacgaccgcgccctccgatcatccctccctccatccacaatcctcggcccatcgccaccaccggacctcacgatggcgaccgacgccgctcgccggtggatagcgtccggccgatcgaggtactcgcccaggtcaagcccagagctcgccatcgcctcgccaccggagcccgccatgtccgtccgtgtcacgacgcggagcgcgcgcactgtggcgttggcgcgaagggtgggggggttgaaaaaggaggcgcaactactccatcggacggctcagattcgcctcgttggtcggatcgacggccaggagcgctctgggcgttcctgtttcgtctccgatggccgcggctcgtccacgacggtggcgacgcacgcgaggtcgagcgagtgatcgaattgacgccacgggatttgggtcatggccgacctgtgacttggattagtagagaggaagctttacgacttgggcaaagttgatgtgatcaggtgttaatgcgagcaaagcaagcgagcgaggggaattaatgggcgttggtagaagaagaggaggaaaatgaaacgcggtggttttcgatcgccacggcgatgggagctactgggatgggagcggtgagcgtgtcgtgttgctgagcgagctcgcgtggtggtgatgactgctagctgccgaggtaaccagagacgacttacggtttcctttaccgtcggttaattaccacaatgatagtcccataatcctaccaagtttttctttaaaaatagtaatacgttgatcttggtagtcggttttattgtcgtgatacggtaaccccttcgatccgctatttctcttaataatagaataatatatggcctttgcttaaaaaaattaaatgaatcggcaagctgccactttcattgaatagagggggagtaaactttacaagtgtcagagaaaaaaatcaaggctcaggaacttcagtccgagcaacaaaaaagaaagccaactaccgacatctctcactcctgccaagaaccacgatttggcctcctatttaattttagccagaaggctaccatagctccttttgttgaaaggttttgcagtttctttcgttccagatttcccaagctaacaggggcgctagcatgcgcagggctttctttggagcgtcttttgtatttgcggtagcctcccaccccttcgacctttgcttcaaaataagttacaacgatatgttataaacattattcactcgatatagagttttatttcatatatgacaaggtaataagtttaagaacttcaacataaaacaaatgaaatacatcttatttataagtctccattcaaaattagcaaagatctacatgacagattcctagttagtttcgacattttttttttgaggggtaacgggcaagagctctgccaatttcatttaagaagaagagagaaagacaacaaaggttttgtacaaacccagattacaaaaagaatcttaaggatccttcgagagtagaaagtttggggagaaaaactaaaatttttagaaaatgtaaagaaactataatagtagctagtttcgacatgcagcatgtattacttcttaggccgagtttagttcccaacttttttttcaaacttccaactttttcaccacatcaaaacttttctatacacacaaactttaaactttttcatcacatcgtttcaatttcaatcaaacttttaagagtaaagtccatcaccggtcctaaacttgtaccgttgtgtcatctccgtccctaaactcgtaaatcgatcgttcacgtcctcaaaccttgttcgactgtgttatccccgtccctaaacttacagatcactc

SEQ ID NO: 26670 - DNA, 15264 bp, Oryza sativa
ataaagtgaaaattactgtattataatttaataaaatgggggtattctattattttttgggtatgcgtaaggtgagtaaaaaaataaatttattttggacggagggagtacgtgatatttccccttgcaggccgcggcccagaagaaacaggctagcagctgtggcccactcgggacggcgagcccactcggatcagatccccccctcggcgtcgcgtcgcgtcgccaccacgcgacgcgccgcgcgcggccgggctgctcctctcctctcccacccacaccacacaaaacgcaacgcgccgcacgcttcaccaccgcgcgcgcatccgcgtatgattttttcccccctttccccacagccacgagaagatcgagatcaacacgagcgcgcgcgcgccgacgccgacgcggcggcgagggcgccgcagcccgcccccgcggcgtgtggccgtgtgccaccgtgcgcgcggcgcggcttcgtggtggagcgggcagagcgcgccgcggcttgcggcagcatccatccaggtctcggatcatcatcctctcttcgcagcttttgatcgggtttgtcatgttttgattcttcagactttcagcgcctggcctttatatcacttctgcagttccaaaagttctggtttctgtctgaatttctgattgctgttaccaccccaaaactcttcaccatcgaagagatatgagataatcacttgcacaaaaaaaaatcacttaaaaactgcagaaaataaccacaattaacaacaccagcacagagatatatgcagaaccaagaggggttcttcgggtattattgatattattattagatagcagggtagcaaaccaaccacccaaacgaacgaacgaacgaacttatgaggttcatacatatacgatgtctttagaccacacatttatatgctattaggtactaagagagtcttcttccaccactgctatagggtgattactgataaaccatctagtcttggctctcttctctcaaatccacaactatgtgttgtgataaacagatgaaaggctcaggagaacaaactgaattcttgggggtgccaggcgacaggagttcagtatacttggggtgcctccctcagggctacattcaggctgctttccaccgtttgccacccaagtccaaagttgttgctttgcatcattgtgacaaattcagcataatcgatttgaccatcctgaaaatttaccaaaaaaaaaagaacaagaaaaacataattactgatgagatgttcagcaaggaagcaaaaataatctcaatgacaccttttctgttctgagaaaaacataacttgctttcctatgttactaagcaaatataagtattcatcttatgataattcaacagtatatgccaaataattgaggcccttttgaacatatgggaagtcttccctcagctgttcagtttatcctcaaacaaagaggacaataagttgggggtgaaagcgcaaaagtatgaaacctctaaactatacatttttaaacagcctgtaaataacatcattatagttgttcatatcggatccaggtcttccactgcagaggatccaaattggttcatatctattgctgaaggtaatactgaaagtgaaacatcatttaggaccaacttctaccacatacatgctgctattctataaccagtgccatcaaattcttcacgagtagaacaattagctactgaacagcaataactaatactagcacactgatcttatagcttgaaaaacagtacagaacttacattgttttgatcaacctccagaatcatctcttcaaggaaagtatcttccatgttacgttccatgcaagccttttgaagcttgtcaactgtgataaaaccacttccatctttgtcaaagtatgtaaaggctgccatcaagtgtttctcacgttctattttattaagagacactgctgcagcaataaactcttcccagttgatggtggaggtggtgtcatcagcctgaagtagtactcaaaaaggttaaaatatataaaacagttctgcaatgaagacagtatttcatcacagatgcatgacatactccatttcaactaaaccaatggtttaagtaatcttttgacatgaatgtgttggccccgacttttcacacacattcaaaacaatacagaattctgaaaagcagcatgatcaaaaggttgacaaacaatatccagtctatatactacagataccatgtatatggtttaagtgtgctacagtacattttgcatcgtattttgcaataacagtgaccacttactgcttccattaagtcgttaatttcagtatccttgaacatgagctgtatcttttcagtcccttaagctcaccaaatgtaaccacacttctgtttttggtgtccatagccttgaacatttctcttaacccaacaatctcctcttctgaaagacgctcagcaataatctggatgaacagcaagtaagaaacatagattactgcaatctgtaatatttttaaatatgagaaatagatagacataatagtttaagtaaaaattgatgccttaattaatctcatcctgattcctagcatctcctacttttgtatcatagcaatttatgaaattatatctgggtcaatttagaatagtaaatttaggtgcaccataaaagtctgtaactctcaacttggaagcaatgctggaacaggtacaataccgacaaaagatcttcgtatatgataacaataaacaattcaccaatgaagaaaatattactgagtcagatttaaaaacaatttcagtgctgtcaaatttttaagatcctacgaggaaaaatctgaactgcagcaaatcaatttggccatgatggcatgatgtacacaaggtagctttgtttttattcttgtagaagtagctatgcttctggaatttaaaaaggttcacacttctgttagatttagtattaaaggacagcagtaatagaataatgatttccctggaaattgtgaaagcatttaatgatgcttcaccatgatgacaaaatggaaacaaataaatgacttttctatgacaagatgaaacggtaaaaaaaaatatacctggagagacaatttctttaacctattcattgcagaaaattgcttgagacgaggaagtacacttggatccagagctcgattagtagccactccattatcacatatccatggatgctctgaacatataatagaaaaactgtaagaaactgctctttgtttactcttgagatcttactatagtttcggaacttatgaaatttcgtggataacaaaaacattggtccaaaattattctacgaggtactaaattgaataaaagtgatactaatgaacgaaatattaaatatactaacttagcacttcatgggctttcaaacgctctgatggataagggcagagcatcttttttataagatcctttgcactgtcagatatcctgggccaccggtttgatttaaaatcaatacgtccatccagtactttttcatatatcccgctttgtgtatctagtaagagtgaaagaagtccttttagcaattcactaaaaccaatgaagcagaattttgcaaatcttgtcaaatcaatcacctgcccaaaatggaggaacaccagtcagcaatacatagagaatcactccagcagtccatatatcagcctctggtccataacgcttctccaatacctctggagcaatataatatggacttcccactacctctctgaaaacctgacctgatttgtggatagatatgaatcagttaggaaaaacagccaaaggaagcatagattgtatgcaagagtaacaattacattattatttgtttttgttaaagctgcattataaggaactacaacaaactaatgtttccaagactaaattactggtagaaaatttgattgggattgtttttctactctgccatactttcaccttactcgctctttgtacggaactatttacatcataactaaataagttagcaggatatcaaacagctgattgctaacatgactaaatatagaaacaaccccattgaatatacttattgactctgacataatacctggtctgaagaacacagatagaccaaagtcaattgctttaaccgagaattcatcgtctgcgtccagtaagaggaaattttctggcttgagatcccggtgcatcactccatgtgaatggcatgtttctatgatgccaactataatttttataagctctgcagccttccgttcactgtaatgacctcgcttctgaatcttgctgaagagctcaccacctgcacagagctccatgacgatgtgcacggcctgctcatcctcatatgtgtccttgattgtcactatattcttctggcccgaaagatggtgcattatctggatttcacggcgcacgtcctcgatatctgacacacatcggagattactctttaagatagtcttgcatgcatattgacaccctgtgctaatctcagtgcagaggtatgttttcccgaactgtccctgtccaagctcccggccaagagtatagagctcccttacatttggagtcttgtatccaaggacaggggactttaggttcagcccttgccgcagagcacccgctaagctggcccttgacgagcccgagtagcaatcctcagtatcattcccatcaacgtaccgagaagcaaaacggtcattctgaaaccggttgctgttctggtaattgttcccataggttccattttgcaagaattccccattcccacaaaaatgtatatcctgcatgatacaatatgcaagttagatatctacaacacttcacagggatccggaaaagcctgctaaaaaggagaactccagcttaatttagtactcattcagaacttgtacttattgtagtaatacagtaagagtagagcaagaccttagcctaaaactggacaccccaacaaccagactctatgttatcaaaacacaaccaatcgacaagtaactaatcacctaaacaattgtgatattatccaaagtttcgagctctcctaagctcctacgagcagcaaattccccaaccttctatagctctatgcatcctacaccctcaccaaattcagtacagtttcctccaaaggcatctccctttaaaccttcctacagctcacaatccccaacccaaaggctcccagcaccaaaatctccaccaaaaatctcctcctggaagaaccacttcacttcacctcctccaatccacccaaccccaaagccatggccagccaaaaacaaacgaaatctaaatcgagacgatgaactcgctacaaaatgtatatccaagcgaatcaagaatcgccaggacggggctcacctgaagccgcttcagcctcgatcggaggagcaagggaggcaaggagagccggggggagcggcacagggaccggagccggattccctgcctccctaggggctaaattgcaaaatcgataggaggaaaaaaatggagaggagagcgctgaggagacggaggtggcaggagaccccccttttatacccccggccgggggaggagagggtggttggtcgcgccacgtcagcagggcctcgtgggggagggggctggacgcatcaacggccaggatttgtcgatcgcggatgatggaaacgttgatgagcggctgggatgtcatggtgaggaattgaggatacactcatacacgccatttggtaagcttttttttttttgggttgctggaaggcaatggtgaagtggtgaactggtgattggtgtttcttggggagtcaggcgatgcttaatataaagatggtgatctgctaccgggattttagccagatgtgtccgcggcgttgatgcggtacaatgatgtggcgtggagtgcgggaggatgcaggggttcaacgacaaaccgagtgttacgtggaaaggtaaaaggttgtaacagaacggtaaaatgacaaatgcctttctaagctggatgcactaatttggtatgtttcgtgttctaattacatcgcgacataaaatagccaggtttcggatacgttatcgttgcttttaggtacgataaaacatttatgtaaagagaagaaatcattgcgtcacggaaaaataatgatgtgtcctgataagaaattttggtccgtggtatatttgaacggatggttctagatgtttcagttaattgatatagcgtgaaagtttaataaattatatctaatacgacaagaaaccattaaccttacatagggtgtggggtttttcgttatttcagcagcttagttacatcaaaccctttctcaaatgtataaaagaaatgtctcaaacttatatagttaatggcaatcacgtcttaagctagctttctttggtatggataaattttagggtgaagtatattttcaacccttaaaccttgctcgaagttaatttatttttcgccttgaaaaaaaaacaggtaaaaaaacaccctatgatgttattttagatgttttattggaaatagaggtggtttactaattcatatgctcgtatcgtgcaaaatttgtcgatgtaaatgttatttaggtaggcccatgactatggctgtgttttttagcctaagttcacaattcacctgcctcgtttttcacgctcatgtttcccaaattgctaaacaatgtgtttttttaaaagaaatactataggaaagttgttttaaaaaatatattagttcttttttaagttttttatagctaatactatctaatcatgcattaatccattgcatagttttgcgtgtggataggaggggttcccaacaaaaaaaagtacacaccttataaaatctacctaaatggggtttctgtaagcgaaaagactttcatagagaaaatcaccttgaaatatattatagggtttcacatgtccagttttaaaagttgcaggggaaaaataatcaattttatagtttaaagtaaaaaaaacagatttgacccttatttttaccggaatggaaaaggaagtattaccctacagtatatgatgtgggtaatttttgattgatgccaaatggcgccatattgattttttgggtagttgaatagtaaaattgatagttcggtttgaagcccaatggttagtagaacatttttttaataatacatagcacaatcctaaaactttattcacccgtaatataaaattctaacatgctcatttatattgccatcgtgatcgtaccaaaacatgcatatatgacgagcatcacgatgacagtggatatcgcgatgtacgtacatgtacactgctgccatccatcgccgtgagcttacgctcacggggccgatcgaagtgacgctagctaagctccagcttgagcagcagtgagcgcgcggcttcatgccccttgcacaaggcaccaaattagatctgacatgcattacaccatgccgcctgccgactgccgtgtgtcacgctgcatgcgagatggtacgtactggctagctcgatctcttcgtttcgtcgtcactcgcgataaaatatcgatcgtctccgctgatttccgaacaccgtacgtacccaagcttgggtgagctctcgctagcttagagcagatacagtagcaaattataaatcaactataattataaatcaactataaacttctaaaggtgcaagtgggtttacccacgaatatgcttatagacaaaaatagtgcgtaaccgccggtttgactagcgggttaactatgaatttgacttataaatgggtttatagttcgatccacttatatatttagatgcggcaagccggaccgcaatgcgaaaacccataaattattatttatttaaactcgcggatcggcccgcttgcacccctactactataaacacatgtcgaaaagataaaagaagagagaagaacaacgagctacaaatttatagctaaactataacacagactctaaaacgtaatgtgtgtatgatatgtgagaccagatattaattatatattatgtatgtttataagtaaatattatatgaattgactatggataatttaaattaaaagtagtagttgttgcctatgttcttacagtgttttgcatgtactaccagctatatatagctataggtgaagcgtcgatgttaccatacctgatttctgcttggttaacttaattatggcctatggggccccgtttctttcattcatatgtgatttaatttttggagggttaggtgaagtgttgcgttttgtgtccaattcgtaccacaagtccactacacacatgcatgcttgttgaaaaacatgaaggtcgatttaccactagctagtagtaccatctagttaaaaaatctcgaaaaagtaggagtaccatttttaataactcgactatatatgaattctgtttaattgatatataatactactaatcaataacacgccgtcacaaccataaacattaagacaaagttaaactaactctcacaaacatgcatggctagccatatattacattatctcgttctttaattctacataatttgtgccgtcaatccatctatattttgacaacaaatatcttttaggttatctagctagctagagatgtggtttttagttactgcaccatcactcgtgtcggcggcggcggtggtaggtgggtgaaggaggcaggtggtcagggcgtgtggcgggtgggcggaggagtaggcgtcgacggcggggaggagaaggagtaggcccggcagtgaggatctgcagcggagtaggaggcagtgggggtgttggcggcggtcacaggtggacgtcgacagtgtcgctggcaggaatctggagcgaaggaggcaagcgggtggaggagtcaccgacggggatgggtaggcggaggaggagtcggagtgcgcaatgggtgggttacgcgacaggtgggaggtccaggctattggatatgacgatctgatggttaatattaaagcaagaataatagtgggctgtaaaaatgctgaatgttgaggtggatgatagatgatagagatgagaagcgggctgtaagcttacagccggcttagacacaggaactaagaaaatcagtgagacagacaggtggaccatatatttatagtgaagagctaaccactatatgagtgagctgagagataggctataaagatctatacagtcagtagctggctatattattagccttgctcttagcatgtttgtcagatgtgtctgctatatcatgaactaagaaaatcagtgagacagacaggtggaccatatatttatagtgaagagctaaccactatatgagtgagctgagagataggctataaagatctatacaatcagcagctgactgtattattagccttgctcttagcatgtttgtcagatgtgtctgctatataaaaatcgagaccactattacaaatttaagtagtagagatacaattataaaaacaaacctgccccaccttagaaaaaaaaaactttctgtgaaaaagaacgaaactacatgagattgaggagaagatcatgttttgccttctgcccagatcgtcactactttaaccctaaacaaatctttggcgcatctaaaaggcaaaaacaaaagacacaactatgtgctcaacacacttgttttcctaccctactaatttaatgattcctcctgttgcatttatccatccacgcaagcaagctgcaggtactaaccatatgtaactccgaaagcacctgtgttatactaagataattaaggtttaaaactaacacaacttgctagacactacacgtactacatgacagtgaatcattctttcatagacaaggttaatattatcgctatgcgctcttgacagtgaacatcatccaacccgaagctaaggttaattgtcaccatgtgcttcttcagttctccttttctgtgacgaccatgcattatactttttctatccataaatccataataaacttgtctcactagttcaaccggcttatgtcagatgaacctgtcatccaatttagttgatttctaccgttactgtgttctaatgggaaaattggattggctacttaatttcttgattttcgttagcatattttaaaattgttaaactttgcatttttttagaaaaataaagtaaatttatttatttattcaattattaatgcttcattttgcgattatttttcattttgcatgtgactaataagccgttctcatcctccgattagaacgtgaataaagtatgttagtactttctttaacatggtccatcaataaacaggaggtaaatgcgatgattttttaaagccagaggtaaatgatttttcagagtttagagagagagcaacactttgcactggcagaagagtggccgtagagattgcgtgctggctgggccccgcaatgggcccatgggcccacaagccgggcaaaaacttcgcacgagggactcatgcagagccgttcattcactttcactggggcccaccagctcgtccggtgcgtgaaagcctagtgggcggcgttccgtggaccgagtacggtacatgggcccagtgttgtggttgtacggtcggatcggagaccatccctagcccatactgaattctgtatctccaaaagtttctcaaattctcatccaaatcaagccaagtagccaactgtttcttatatgttgtcaaatttcaccgcaagtcaccttaccgcataaaatttctcaatgtgtttgtacctcattttgttaccgcaatatattttttcacttcccattgtgaatagggcgaaaggtaaatgtttttgttaaacttctataggtttgattaaatttatataaaaaattagcaacatctacaacaccagataagtttaactaaatataacattgaatatatcttaacaatatatttactatatttttatataaacttactctctccgtttcataatgtaagtcattctatcattgtccataattcatataaatattaatgaatctagacatataacatccatatgaatatggacaatactagaatgacttacattataaaacggaggaagtagataaataaaagtcaaaagcgactcataacaaatggagtagtacaagacactcagaaggggatacgtacagacatgccgtaaatcaaaaggaaaaagtccacttagactcccttaattattcaccgaatctaattcgtgacccttaactgtaaaaccggataggatgactctcgaattattgaaaccagtgcaatttgactcctccagcggttttggagagcggttttgcttacgtggcgctgatgtggcagtgctaacccggttttcattctatgtggtgcttatgtggcatttagaattaaaaaaatatatgtgggacccatctgtcattcatacacaaaatatatcatgggacccaccgatatatgggcccacgtgtcatcctttttccttcccttcttcctcctccttctctctcccttctctctcttctctctcccccttttctcttcccccttgggaagcatcggtggcggcggcggccgggggctggagtggcgacggcagcgtgcgggcgagggctggagcggcgacggccgcgccaccgcctgccccgtctccaagcaggctcgtcgccgctccccctctaggcccggccggcgcttggatccagcgcgaacccggatgttggaagcaagcagtaattatgcatgtgccacttaattgaatgtgcaaatgtagatgaaatcgatttttttttgactgaaatgaaatcgattgtgaaaatggatgaagaagcacacaaacctgtgagctgcagctgctgacgcagcgggcaatccgggagcagacagtggatctcgacgatctcctcgagctcgtcgatgagcagcacctccttctggcatttggtcgccggccagtggcggaggaagatgtctcgagcgacggatgctgccgcagtaggagagctggcggtggtacgtgtgcacccaccgcgtccggtgcagcggcagcagcacacgcgccatgaacgcccggtgctcctccttgagtggcacggcgaagccgttgatgatgctgccgcagatctcgagcagctcgccgacgccgcagtggcgctcggcctcctccggggacgtgtcgtagacgaaccggagtagcgcggcggccatgatgcgctgcataaacgcgcgctcgacggtgagcttggagtagagctggtggtagacgtacttgaggcggtcgcgctcgcgcgagtcctcgaaggcgaagagcgccacgaggccggcgaggaagctccgatcgacgtggttgcggagcgtcctggcgtccgcggcggtgagcacgtcgtagacgaggtggaggtgcggccacgatcgacgggagcagcaccatcacggggacctcgtcgtcgagcacgtcggacggcggcgagggcgacgacgggtaggcggacggcggcactgcccggaggcaggaacaagttggcggcgaccatcttgaccagcgccaccatcacccggtggtccagcccctgcggcggctgcttcttcccgctcgccacgtcagcgccatgtgagcaaaactaccctctaaaatcgatggaggagtcaaattgcactggttttaataattctgagagtcatcctacccggttttacagttaaggatgacgaactagatttggtgaacaattaagggtgtctaagtgcactttttcctaaatcgaaatgacacaaataagcccatctacttgtaaaggcccaaggcccatgtggccgtgcacctacaaccaaccacgtcatcgatccatactcccccatttcaaaaccagaatccaccgtccattctcatccaacggtggagcacaaccctcccacggatcgcgtccctcctccccgtcgtcacaagccacgtcatcgatccgcaccgatcccccactacccaatcccacccctccatttccaatccaacgctccaaacccaacaccccacggatcgcacccctcgccttcacctcctataaatatccgcacaccccaagtgtgtctctccatctaaaccaaaaaaatccccaaatctcaaatcctcctccgtctccaagctctcgtcgtcgtcgtcagacatgtcgggccgtggcaagggaggcaaggggctgggcaagggaggcgcgaagaggcacaggaaggtgctgcgcgacaacatccaggggatcacgaagcccgcgatccggaggctggcgaggaggggcggcgtgaagcgcatctccgggctgatctacgaggagacccgcggcgtgctcaagatcttcctcgagaacgtcatccgcgacgccgtcacctacaccgagcacgcccgccgcaagaccgtcaccgccatggacgtcgtctacgcgctcaagcgccagggccgcaccctctacggcttcggcggctgattccttccttccttccttcctggtggcgtgcgggtggtggtggtggtgtaggagctagggtttcgatgggattcggggggaatttctgctttgtgttggcttctgtgtagcgactcttctgtttaaatgaattcgatgaatctgaactgaagatttggttcccctgtgattccgtcattttatatttctgtttcctgtgatgtgaatttgtgcgaagttcgtgaaactgcctttcggatgaaacgaattttgttttcgtggaagttcagattggttgtgcatttaatatttggggaaatttgtagtctgccaagtatgtgtaatcagcgtgtggagttgaaaaatgttggtatagagaacacaataggtcagaagacgacgcggcgtgagtcgtgacaatgcggtcgcctggagtgctggaccatggcgaacctgtacagtacagctttggtgggtacagtacagcacacgctatacggggtgcgacacggccatttctgccttcaaccgtcccaatctttttatttcgaagtaaaaaccgcttctcacggtttatcgaaatatgtctgaaccaaaaaaaaccaatgaatttcagtcaacatcatacagaaactggctcataccaattggttttcacaaatcaagtactaacggtttcacaaaaatctcataccaattggttttcacaaatcaagtactaacggtttcacaaaaatctaccatttttcacgaaattccatcggttctatgaacatgctcatcacccaccggcattctacctgcatattgttttcttttttcaaacacagcagcacgcacacttgtcattacaattgcacataggagtactactcagcatttccatagactgaatagtcgtatgttgagattactgtcaccgttattgaaaaaataaatgaagttaccttaaaaaataaacgaaacaataaaaataatttatgaatagtttttcaacctgttagcagtttagaagctaatattgagaaatgtaattgatatacacttaaaaacctcaaaatcaacttaaaattgactttcaaaacttaaatttaccgctgataacaccagaattcaaatatgggtaaaggcatctggatttgaccatctcaaattgtttatcaggattctccctaaacgaagcaggagggaacagcagtgattaatggaacagaagtcatccatccatccactgatccccaccttctctctccccgaagcaatcgaaatcggcgcggtgtgaaaccaaccacgccggtggatccacggcggggcgcgcacccccgccaccgacgattgccggcgacgcgccgaccccgggagggagggagggagggagggagggagaccccgcacctgccgcttgccgctccgctgttcccatcccgctcccacctcggcgcccgcctccccccaccaacatctcctctcccatacttctcgcttccgctccacgcctcactgcctgccgctccaccgatcgctcgctcgcttcccgcgatctcgcctccgagagcagatctggtggcggggcgtcgggccccgtcggccgatggtttccgccgcggcgcaggcgggcgtggtcgccgcgtgcgtcgtgctgttcgtccccatggggctcgccgggtggcacctcagccggaacaaggtgctcttcttctccggggcgctgttcgtctcgctcgccgtcggggtacacctctcgccttacctcccttccctcccgcacctcctcctcgccgcatccttccacccccatcccatct

SEQ ID NO: 26671 - DNA, 2189 bp, Oryza sativa
gggcgcccttcgagagcaacctcacgcggctgctccacgaggatctccgcctcgcgccgcgcacaccggacgtgctcgtcctcggatccggcctctggcacatgctccacgtcacggacgccgctcgctacggcgacgcattggcgtccgtcgtcgatgcggcgaagtcgctccggtcgccgctccccgtgccgccgccgcacatgttctggctcggcctgccgctgctggtgaaccacatgctcaacactgatgccaagaaagtacacatgaacgacaccattctgcaagcctacgaccttgaggtcgagcagagggggctcttgcagcgcgacggtggcccgttcctactgcttgatgtaggaaagctctcccgggggtgtgggcagcaatgcacggctgatggaatgcattatgacggcgatgtgtatgatgcggtcttgcacatcatgctcaatgcattggtgatcgagtcacaacagaggatttgattgattgggttcttgaagcaggtgtgttctcacaccctgttcttttggtccagtataatacaggggtaagtaggaattgttgtgaattaggggtgttcttttgatcgcttcaacattttggtcgcttgccagaatccatagttggattcctcaaccttagaatgtaatttaagggaatcttagaacaacactctttttctccttttctttttgggctaaatggcaagccgagctgttgtgttgtatactgtttctaggtaacaactgaaaatgatgattcgaaaatgtaggagaggaaacattctggaatgctaaaaactagtcatcctttttgtttgcagctggagatattctgtgttacaaacacacaaatgttttctgaatcatgtctattgctgctatgacatgttcagtgtttctttttggtccatgaaaccttcaaatttatggtttgtataagtctaggatgcatataaaatgcaaaattgaaccataactgtactgctatcctttgtcaacatagttctttccaatgggcacaattgcatcacttcatagcaataattatgctgcataaggatagtggttgagtaagttgtagtatctgcacgattctctagctatatataatacttgcatacgggtcatggatgcatcatgtataattgagcacacagttagaaatttacaaatacagcgacataatagtaaagaagattatgccaaaaatgcaaaagttgtttcaatgcattatatgcagtagctctatgctcagtcacattgacactttctgtgcaattggaaccacgactttgtgttagcttcatttagtatttcacactccattgcactccccatgaggtggttttctttacaaacttttaatcaactttagattaaaagttctgaaagatatcctacaaacagggcttatcgttgttcgtttataacactattacagtagtctgtgtttttatttttcacactacaaactagtgcaaataaaacttttatggcctaatggcaatctctccctctgagcatatctgctagctgaactcactttgctcaaccttgcagtaaaggtaatcgatgtttgcctgaacttctaaaggctgattgtttgtcactttgatctgtgtaactttatggtacagtaaatggccccattcatagaaaagaagaatgcaccgtacaccctaaacgaagcagaagggaaccactctttttttttttggtctaaatgacaagcccagctgagtatatcttttctagatcacaactaaaaatggtgattccaaaatgtagctaaggatatattgtggaatgttaagtactagtcatcgttttggcttgcaactggaggtattctctctgttacacacacataaatgttttctgaattatttgtatttctgccatgacatgtttagtgtttctttctggtccacgtaaccttcaagtttcttatttggataagttcgagatggatagaaaatgccagattgaagcttaactgtactactatcctttgtcaacatatttcttaccaatgggcatcttagaacaacactgccttttttatttttctttttgggctaaatggcaagccgagctggtgtgttgtatactgtttctaggcaacaactgaaaacagtgattccaaaatgtcggaaagggaagattatggaatgctaa

SEQ ID NO: 26672 - DNA, 3325 bp, Oryza sativa
tccctttccccctttttttcgctgcctagggtttgcggcggcggcgcccgctcacctcctcgccggccggacggcgcgaggaggaatctctccacccccacactcctcgcgccggtgcccctccctccccctccatcctcctcgcgtttcgcttcccctcttcgcactactccgactcccagcacggaagcgccggtgtcgatggcggacgatgccggtgccggtcgcactcgcagtcgcagggatccttccgatcgccctacgcgttcaggccaatttctaatcagggctttgctacgaggcgaattggaggagcggtaattttccattctttatttttcttttaaatctcctccatgctctgtcgttgttttttcccttacaatgttgttgtgtaggagtagtttttttttaattggattcataacattataaatttgcatgttttaaaaaataataacattataataattcatataatcgaaacaatgccactaaaactcctatgaaagccaaatgggagcggttgggtaactccgaggcgctcaacggatcttgccgtcgtgccatccaggccccaacaggtgccctcaggctgagatattgaactatatgctacttttagatgtggcaattctagggggagttcctgtgcccagcacctcaaaaatcatattttttagctattccattccttcaacaccccttctggtcctttccagtttccatccctctcatcgcattcctcctgtgtttctagggatctctgtctcagacctttctccaaaaatcaacggtattgtcattcaaaaccctcccaaccgcgtctggtatcctatatcgctctgggcatcttccgcacctaggttgcaagttagaatgtggcaaactatatgattttggtgggggcagatagtttgcatggagcagtgtttcagttccatagttcgttaattcaggcagcttggccagagcagcattcgacaacatcttctcaactctgtcaggaattacaatggatatcgcttagcaaaaggcctctacgcttgccctaaatgtgccaccaacaacccgctctccgccccccccccccaaaaaaaattttttttttcatggagctccctcattaggaacaagaaattatcgcgaggctttactctcctcaccaaccgtccctcctcaagcccatgctcctcctcggagaaaaccgatgcttctgctctgctgctgctcgctactgaccacaaggttaaacactgtagagatccagttgtgtgcaccgcctgtcgttgccctggccaccggcaggacaactgcccctcctttgttgcttcaaactttcctttcgggggatctgcagttgttgcttccacgacctcttcctccgccaacctcttgcctctgactccctcgcctctgcgccttcgccaccacctcgccaccaccgcaacctcgctacccctcttccacccgcttctcggctaagtgggtccgcaaagccaaacaagcacaacagcagtgacggatcccctctgctcccttcccaaaatccatccaatctactgccatgcaaccctccttggctccgtctctctccctaaattccttgctagcctttgcttttgaaaccctaacagatgaggagcttctcaagtttcttgcggtagaagttctggaggtcgctatccgctccaatgtggaccaccatgccgttaacagggaggcaagaaagggaaaggctattgttcatgcatgtgcgcctcctggtggcccctcatccccttcctgggatgtgtttatttcccaaggtacctcgactgctctgtgatcctcatcccttgacattcctctgatctccttttcccctccacaccctgctgctgctgctggaggtattgttcatgctggatctagaggtagcggatctggatctttgaaagaattagaatctggagattctgtttcggatgactccaatgcccccactcatcctagaggaccgggtactccggaaccggtctcgagctaagcggatgccttggggattactaactttgtggatgttttttccccgtactcggatatgagacttggtagtcactatgcttatgctttcatggtcccctcttctcatcccccggctggaaacatttgcagcgcgatgagggaatacctacctgacatgcatttctcccttcatgccttttgtcatggtgctatgatggttcatttcaatttgttgcaagacagagaggttactgctccacgcccaacttcacgtcccccacacatcccatccttaggccttagctatgccgggctgccagcaagggcgtcaacggagcaagcggcagtggacgacgggtccagcgttggcgacacagcatggagggaggagggcgatggacgtgccgttgggtggccagctctatgggcccatcctgctggagttcgggatgcttccggcacgttcctcgctcgattggagttcatctctgcagcgggtggagctcgccgctacagtgggtggctggctttgaccttgggtgttggtcatcgccggcaagctgtcgatcctccacaccggctttatttttctcttttttttcttttcttttgtttttcttttctttccctccgtgtaaattccttttccaggggtgctttcgttcgtatgaaaaaatagtaaacaaaaacacttgataacatggaacaaacgtatggcatggcatggaaccacttttgagagtattgcagtagcatcgatctaattatatgaattataatgttattttttgaaacggtaaaatttataatgacatgaatccaattaacccttttttgttacagttttgcttttgtttcaagctgtagcaactgacacattttctctttcctcgcattctgttgatgaatcacagcactgcagacgcaaggtttatcccacttacaccaataatggaggatctatttgtcaggtatgcttattatcatgtctttcctatatttttcttggctagcttaatgctcgtgtgttgcaacagattctaaaaaacattcattgacataaattaaaatcataaacaatatattacaattgggcataaataatgaaggaaatataaatatagaaataataacatgaaactacaaataactttggccggaataataattcaatatcagaaaaattatataactaaatccccattttttttttcatttagctataaataattcaatacagaggaaaattataagttacaataatttttagtggatcaaatagtgttaaaactaatagagtaaatttcagaaaactgcc

SEQ ID NO: 26673 - DNA, 920 bp, Oryza sativa
  unsure (1)..(920): unsure at all n locations
gctcaagctggggttccagctcatggacgacgccggcctctgcctctacacccaggcggcaacggagaaggtcgacgtcgtcgacgacgtgtcgccggctcttgccagagctcacaacaagaactcgttcagcgtcgcgaggacgtcggggcccaagctttcagcatccgacgcggccatctcgccctccatgagagcctacaagcagctcatcgataggctcagcgtcgacgagcatggagatcctgtgacgtcgctgatccctcggaagctcgccgacgacgaactttccggcgacgtcggcctcccggagtacgaggtggttgacaagggcgtccagaccgtcaaagaggtcgtccactaccatgctcaccgcgacgtgcttaaagagctcgactccattgccgagcanatcgaggccatcgacgcgctgatgaccaacggcggcaaaagtcgccgacgtcgccgaagatagtggatcagaagcagtgcctcgacgcggatgaggagatggtgaccgtggagtttctaccgaagctcgaggtagtcgacgataagggcaggaagctgaagcagcccatgacgccgagaagcgagtcggagaagaaggcggcggcggcggcgccgccggtggtgccggacttggggccgggccttgggacggcggtgcaaacgcgcgacggcggattcttggtgtccatgaacccgttcgacttgcctcttgagaaaggagatgcacccccgaagctcccatgcaggtgtcgaggccgttcgtgctgccgagctccatggccgcgactgggttcgacgtcctccagaagatggcggcggcgggcggcgccgactaggtccgggacaaggtggcgaggctaggcggcatggacaacctcacggggaagacgcccgagcaggtgggcttt

SEQ ID NO: 26674 - DNA, 6966 bp, Oryza sativa
tcgatgcccatgcttctggaagagatcattcgtccaacaacgctgttggaatgcaaacaaaggaagaacctgcatttagcaggaccctttacgtgcagagaagatcagctcaagcaaatgaatgctggccatggaagaaagcctggtatgccgaacgcgcagagtagcgctggtcatacgtccaacgccaaatgagacgattctcgacacccggtgagagctgtacgtgaagcaccgcatcccaaataaggagaaactgggagatgactgggatagtgagggcaccgcggatgtcagagacataggagttgttcgccagaccagaagcaaccgtgcgtgaacctggaagacgctggggaacaacgaagaggagatctggagccaaggacgccaccgagcggccatcgatccattggtcggaccagaagagcatagactcaccatttcccggcacgaagaaagtggatgccgcgaacatgtcggagacggtctgcttgactggggacttcaggccatcccagcaggggtgccctgagcgctgaagccagagccagcgaacacgcagggcaaatcctgccaacctgaggtcagggatccccaacccaccgcaagttttgggacgacagacgttcgtctaggacacccgacactgcccccatgagccgagtccatacccgtccacaagaaagcacgacgtttcttgtcaatggccttaataacccagactggaaggccgatcaccatagatacatggatcggaatggaggagagaaccgactggaccagcatagaacggccagctagagtggtaagtcgtcccttccaaggcggaagtcgatgggagactttatccacaagcgtttgcaaaggctggcttcggcaacttgcaaacggacaacggaatgccgaggtaggtgcaagggaaattagaaaccgagcaggggaagtagaactgaaccagctctaggttctcagccgagcaacggatcagagtaatcgagcatttggctcttgactaggtttattaatttttactagagaattaaaggttcaaaatgtaatgttatcctcaccgttgtaggtaactgtatcgatcggtgacgtttgtgtttgaatggaactcctagctccagtggctcatccatttcacagttatttcgtgctcacttattaacgattattcgaagttaacatcaatttattcagtcctatgttctcgtggttcgtccatgcaaaccaatcatctgcagctactgtccctatataaacctagctagtactcatcaacttcgatcacaatcaagcatcaattcctcattagcatcgctggttgatactaaactaacagtagccataatcatgggaaggccagtggcaacgctgctggtgctgtgcttcatctctgtcacggcgcgcgccgccgcgttccgcgtgcacggccgcctcctcgccgacgccgcgacggagggaggcgccgtcgtgcccatccactggacccaggcaatgaactacgtcgcgaacttcaccatcggcacgccgccgcagccggcgtcggcggtcatcgacctcgccggggagctcgtctggacgcagtgcaagcagtgcagccgctgcttcgagcaggacacgcccctgttcgacccgaccgcgtcgaacacctaccgggcggagccgtgcggcaccccgctctgcgagtccatcccgagcgacagccgcaactgctccggcaacgtgtgcgcgtaccaggcgtccaccaatgccggggacaccggcggcaaggtcggcaccgacaccttcgccgtcgggacggccaaggcgagcctcgcgttcgggtgcgtcgtggcgagcgacatcgacaccatgggcgggccttccgggatcgtcgggctagggaggacgccgtggtcgctcgtcacccagacgggcgtcgccgcgttctcctactgcctggcgccgcacgacgccgggaggaacagcgcgctgttcctcggctcctccgcgaagctcgccggcggcggcaaggccgcctcgacgccgttcgtcaacatctccggcaacggcaatgacctgagcaactactacaaggtccaactcgaagggctgaaagccggcgacgcgatgatcccgctgccgccgagcggcagcaccgtcctgctcgacaccttctcgccgatcagcttcctcgtcgacggcgcctaccaggccgtcaagaaggcggtgacggccgccgtcggcgcaccgccgatggcgacgccggtggagccgttcgacctctgcttcccgaaatcgggggcgagcggcgcggcgccggacctcgtgttcacgttccggggcggcgccgccatgacggtgccggcgacgaactacctgctcgactacaagaacggcacggtgtgcctcgccatgctgagctcggcgcggctgaactcgacgacggagctgagcttgctgggaagcttgcagcaggagaacatccatttcctcttcgacctcgacaaggagacgctctccttcgagcctgcagactgcactaaactctcctagctaatcaatggctgctgtgctgctacttaattactttcaggaagcaggagagtgcaggctatatgtatgtgtacttctgaataacgcagccatatatgcggcatgagctgcacgctgctcatgttggtgaaaataatacccccattcttattattctgtggcgatatattctggactacttcgatttcaatctctgttccatgtttaatactttaatggttcatcaaccactgtaggaattaggatgctctcctacagtttttctttcaaaaaaaaatgtggttcatcaaccaagtttcgtcttacagcttcagaaacaaactgcatgcctcttcagttatcttagcaaaacacagagaaattaaatcagaccggtagcttcgagtcgatcaattgttgggaggcattgctaagaaatctaattagtcaatagtcatggattacgagttacgacgactgactaatataccaaattaatcaccaaatatgacaagtggaactctgaaacagcaacatttatgcttaatccaccttgcatttctggatcacgtgctggagacgactttttccaccagaagccgcttcacacgtaccaccacactcgcactaacaaatcaaatattcgctccattaaaaaataaacaaatgtcgcataaaatgtgagaaattctgataatacgaatctggatagattcttaattactataaatttaaacagaccaaatttataataatgctattatgtatcacatcttgtactacgtttatttattttaaaatgaatggggtagtagatgaagtagactagaccaagcatgaagccagcaaatcagggtaaatgtggtaaggaaaatagatcctctaacttgctattctctaactttaaatgactaatatatccacagctcatgtgtgtccaggctgcccttatcctttctttttgggcgcgtaaccgccgaaaaccacataaaattcacctcgaaaaataggacatttttcatttaacttgtttcaataatatttataataagcttttgtcaaatctaaaaccttttgaacggaacattctcattttatctttacgatactttttttacaattgcacagtacaacgcagacactcacaacgcacgcaaaccctacccttatgagcatcttcgaagactaggccggcaaatccatcctagagattgatgaagtcaccacaagcgcctcgctgtcaacagcaatccatccttgagattgacgaagtcaccacatgtcacgccccgaactagtaccgaccggaactagcccgtgacgctccaaattaacctgttaatcgataccagtcccaggaaacagtgctggtaccacaggaagacggattatcacagcaacagaggtctctttattatagagtagaggtacagtcatgttgggctgcggacagatcccgagctcacaactgcattacaaaagggaaacggaagccaggacttggaccaaacaacacaggcgcgacttgggaactaggccgaaaccctaaaactcatcgtagccggcttgctcctggaagaactcctcatcagcaggatccgcttcatcttcttcagcaactgggggggggattatttatatagagcaagggtgagtacgggagtactcagcaagccatgggaaataagtgtttaatgcaggcttcaaggaaaggctgttgtttttacaattgattttattcgaactcttttctaaaaacaactaagtgagtgcttctcaaacgacacggatgagacagtgcgtctcgtccggtcggagtatgtgcaatgtatcagtctttagaattgttcaagattggcacccggccaacaactttcaaacggccacccgggccaacaactttcaaacggccacccgggcctagctgatcccatcagctgcagatttttcaaacatcgaacccctttccataacagcaatctcacaaggcaatagtcaaacaaaactacgctaggaatcacctcacatccgcccatgaccgtgggcacggctgttcgaacagtttgttaacctctacagagggggtacactttacccacacgacattactaacccggatcacccagcccgtggggatcagccacgtcgggagacctccaagctttcatgacaaggcatttcgaaagccgacacaggtttaccatatgccgacgagaggggtcccagaccaacaacaggttaggtcccagaccatactgtgccaggaagcccaggggtcctccccgacaccaccccggcgaatccacatgtctctcggcatcaaggctcccctgataagctagttactcagccaggggtgtcccattccacccatgtggtcgtacttgtcttatgtttggatgaaattccaaggaaacggtccttaagtgcgagagcggaaaaccgtacacccggtacgtcccccggtccgcggttttggaaattcatttagttcgcaagcaccgacccaggtgtcgggttttccaagtcttttgtaaaacccgagttttacccaagaagttttttcagattttaagtttgaaggcgtccgtcgatactcgcacagggtgcacgaatatcgagacgcaactagatggttacaaggggacacgatataacaattatcaaaggaaggatcaaatgcaacaaattaggtaggtccgccaatctgccttgcagacgggacagcagattaagtgcgatcctatcaatgcataatatttttcaagcaacataattaaatttcaaatataggctcaagatgttcaaaggtggcttgccttgctcgagatctggagcttgatcctcgaaatcctcgcactgcgggtcttcgggctccgaaactacacgcgaaacgggacaactcaacaaacggcgaaaaaaaataaagccctattaatgacctctatgtatgccattagatagatctcgagatttgaggaattttggaagttgaacggagtcaaacggatttacggttgggaagatattgaatttctaagattattggatttttggtctaaaagaaaaggatttaattaaatcctttttgaaaaagaaaacaaaagaaaggaaagagggagggaatatagacttttctcgggcggctagggcgcggcccaagagaatttggggcggtccggccgagctaaatgggccggccggcccaaggcggcccaagacgcgcgcgcgcgggagggaggagagagagagccggtggaccgggcttaccacgcgcggtcccgggtgggacccgcttgtcggtgacacggctcaccgtgtggagcgagcacgcggcgtacgcgcgcgggcgggggagggacgcggtgcacgcgcgcggttcgcggaggaacggttgcggtgggcccacgcgcagcctcacggctcgtggtggaacgcgcgcacgggaggggctgaccggggtcggcccgacccgatctcggccgagctggcgccgacgtggcgtctacgtggcgcctacgtggctgccacgcgggccggcgggaggaagacgaaggcgccggccgcgaatggacggcgggcggcggcggtttctccggggcgccttgcgacgatgaggggcgacggggcgtacaccgggatgacgaggaagaaagagacggagcgagccaacggcttggattcgccggagggagtccgtcggcggcggatttcggcggcggcaaccggcggagagcaaaagggggaaacggcgacgaggtcacgaggggccaattcccggcggtgagaacatctacgcggctacgggaatccgttgctagcgtcggattgggcggagctacgccgagcgaggccggcgacgagcgggtgctacggagcacgggcggcgacggcggcgagcacactgcgagcggcggcaacggtcggggcggcgccggctagctacggggaggctactcgagctactaccgaaaactaagggggggagatggagcgaggagggagaacggagggaggcactaccgagatgaggaggggcgctgtgacgagaggccgacggcgcgggagtaatctctccggcctcgggtcggggaagaggaggaagacgagcgcccggagtccccttccgcgtccacgaacgcaccggatttcccgacgcttggcgatgaacggcggaggcgagacagagctcggaaggcggcgacaatggcgatgggagggagaagagagggagggcgcccggggctttaagggcggcaatgtcggtttggaaccgacttgggcggtcaaggcgcgagctggcgctcggcgctcgcgtccaatcggcgacagggcggagggaggatgacgccggcgggaggaagaaggggaaaaggagggagagaaagggggctcgtccctttcttctttgggaaaaaggaggggagcgggggcgtcgcggca

SEQ ID NO: 26675 - DNA, 9397 bp, Oryza sativa
ttttgtctttgcaatactaatccaatatgtctaatacaatggcatgataagaagccgttgatatatctatcacccgccgcaatacggtaaatattaaaagctatagcctagccatggtcaaaggtacggttggcgacatggctgaaaggtttatttaagaaaaaaaattctaaagctatatacagtttttactatagaacggtttaaaccgaagaaaacattatccattcggatgtaacaacatcagtgatgtctgaatgatacttatatgtataattaaacctttatagtctgaatgacaccggtattttttagagaagaatgacaccaatatggtgcagttgttgtcaatggcttttgagatagaatgtcctagctacagggtcgaggcgtgacctatacgaacaggtggtcagaaatgttaaagaaaacttctgctacgtagccaaccaaaagttgccatgttgcgcgttcaacacatattctatagagatccatgtgacgactacgtacatgatagggtttaccatccgatgtaatccggacttccctaaccaggtcgaaaacacaaattgctagtttttttttgttaattaaaaaatcaaactgaattttaaattttcagaagctagatttatccatgttttttgtttttatcgatttatcaatggttactgtaaaatccaaagacaccgctcatgaacggtttttattctcactatcagaattgtgaacccaaccttgctccatgaaggctcaagtggttcattcaatttcactgtcatttcgtgcccactaatcctcgacgagtctctctcgcgtaccaattaaacgatgaggcgttgacatccgttgctttgtttttattttcagttattcagttactacgtacaacattacagtgttaataattaacccatcttaattactcctggtttagtgcatgcagccaatcatgtgcagctacgcttcctatataaaccctacctctcgacttcgataccatgcatattaccatactcattagctcgagacagtaattaatcatcatcataatatataatgggaaggctagttgtaacagtactgttcgtgttgtgctcgatctctctgacgacgacgtgcgccgcggcgcttcgcgggcacgatctccggcgagccatgcgcggccgcctcctcgccgacggcggcggcgcggtcgtgccgctccactggtcccgcgagctctacaacgtggcgagcttcaccatcggcacgccgccgcagcccgcgtcggcgttcatcgacgtcggcgggctgctcgtctggacgcagtgctcgcagtgcagcagcagcagctgcttcaaccaggagctcccgccgttcgacccgaccaagtcgtccacctaccggccggagccgtgcggcaccgccctctgcgagttcttcccggcgagcatccgcaactgctccggcgacgtgtgcgcctacgaggcgagcacccagctgttcgagcacacctccgggaagatcggcaccgacgccgtcgccatcggcacggccacggcggcgagcgtcgccttcgggtgcgtcatggcgagcgacatcaagctcatggacggcggcccttccggattcgtcgggctagcgaggacgccgctgtctctcgtcgcgcagatgaacgtcaccgcgttctcgcactgcctggcgccgcacgacggcggcggcgggaagaacagccggctgttcctcggcgccgccgcgaagcttgccggcggcggcaagagcgccgccatgacgacgccgttcgtcaagagctctcccgacgacatcaagagcctctattacctgatcaatttggaagggataaaagccggcgacgaggcgatcatcacggtgccccagagcggccgcaccgtcctacttcagaccttctcgccggtcagcttcctggtcgacggcgtgtaccaggacctcaagaaggcggtgacggccgccgtcggcgggccgacggcgacgccgccggagcaattccaatctatattcgacctttgcttcaagagaggaggggtcagcggagccccggacgtcgtgctcacgttccagggcgccgccgcgttgacggtgccgccgacgaactatctgctcgacgtcggggacgacacggtgtgcgtggcgatcgcgagctcggcgaggctgaactcgacggaggtggcagggatgagcatcctgggaggcttgcagcagcagaacgtccacttcctctacgacctggagaaggagacgctctccttcgaagctgcagactgcagctcactgtctcctaattaattcatggcaatggccgctgctgctgcttccttcaggaagcagttcttgcttagatttgcaggtgtgcatacttatattgtcagaataacacaaccaggcggcatgctttgcttctcaacttcagtagcatcgtgctcttccgcttacgtgcttgtatcctaatctgattttatgtcagatttatgctaggtagtctaaataatattcggtggtgatttttttttcgaaatccaatctttattccatgtcttactccctccgtcatgaaaaaaaacgaatctagtactggatataacatattatagtacaacgaatatagacatattctaatactgtatgtccagattcgtagtactagaatgtgtcatattcggtattgtattaggttggttttttatgcgacagagggagagggagtatggtttattaacagtatttgatctttgtgactctgtccaacacggctgtctatgtcagcaggtattgtacgacatgtaccaactcagcaagttttatacaattataaatattagcaagttttatacaaataaaacatatgccataccagtagagtgcagagagataagtatttgaacttcagtcaaaatgcatatataaacatactgcctctggttttttaatggacgttgatttttaaatatttaaccatttgttttatttagaaaaagtgtaatatgctaaaatacaagtcatgtttaaattttttaatgttaaaatatgtgtcaccaaaataaataatatttatataaattttttgaagaggacagatggttactcactccgtccataaatataaggtgttatgtctaaaatagcacaaattaagaaagagtaactagtactagtacgtctatgtagcttgaaaataagtatttcatccgtcctatattagttgccgtggttatttagtatatgttaaggtttgagaaaaaagactttagtacccctcattaaattttgtatgtttagatgtaggagggtggttgagagtaaaaagaaataaatttgaattaaaagtgattgatgagacaagtagtattccattgtgacaagtattttgggacaaagtttgaattctaaagagacaagtaatttgggacggaaggagtacattattgacacaataaacaaagtagtactccctccgtttcagcatttcccacattcatattgatgttaatgaatctagataacatcaatatgtatgtgggaaatgctagaatgacttacattgtgaaacggaggaagtagtacactagtactagtacgttctcagtagtacgccatccgtcccaaaatgtaagtacttttggactccgatacgatttccaaattgctactttaaccaacattatccacaaaaataaaacattttgaataaaaagagttgtatattattatagtttgtttaaggataaatctagtaacatcaattttacatgatttatcttttttattattttgctattaatagtcaaagttaaaaatgtttgacttgttactattctaaaactacttatattttaaaacggagggagtatcttttttttcctttttgaaatggaccgtgcgaagtagtacgagtgctagacattctttgtatttctttagttctgataaattagcatcacataggttaatcatggattaattaggcttaatagattcatctcgtgaattagtccagggttatggaatgggttttgtcattagtctacgtttaatacttctaattagtgttctaatatcagatgtgacagggactaaaatttagtccatgatctaaggctgtgtttagatccaaagtttggatccaaacttcagtccttttcaatcacatcaacctgtcatacacataacttttcagtcacatcatatccaatttcaaccaaaatccaaactttgcgctgaacaaaacacagcctaaatagggcctgagtgatggatggtggaggctgacaggctgtgcttgcttgcttcgggaggagacaaatccactattgccctggacatacccagggaataaaatccctcgtagtacttctggacagagggagtaaatgtcataagtaaagagtcaacaatattatgtacttaaaaaaaagagtaattaattacatacagttactgagttaagcttgggctgtgtaagtccggtttggagcatatattctgctcaaccacagttccaaagttaaaacctcccccagtttgtaattgtagctactagtttgtcatattccaaatattcctatggagcaattgccattatgcaggctggtcatgacatatctaacctgctccattacagacgaaggtataggttacatttcgacaacatcccattcttaatgttctgcccaaatagagaaataattctggtagtatgttattatgtgaatagatagaaatacgttcacattgccatttcattcagtgcccactatagatcacgagttcacgactttaacagagatgcaaaccatttttattattaaaaaataatcttgcatgcgtctctatctcacttcaacaaaatgtccgacacaatgaggcgttgacatcagttttattcagttacggttggtgtcgaactgtcaatatcttaattaatttctcccggttatgctgatgcacgcacacccaatccgctgcgctgcatccctgcagcatcgatctaattttccctatataaaccatagctgcacatctcttcgatcaaaatcacgatcaaactcatccttgcgctcttgaaacagcagttaaaatcacgatcattagctcgctgattgataactaacagtggtcataatcatgggaaggctagtgacaacactgctcgtgctgtgcttgatctacgtgacgacatgttcgctctcgacgcgcacggcggcgttccgcgcgcacgacctccggcgaggtctagagcaagccatgcgcggccgcctcctcgccgacgcgacgccggcaggaggctcggccgtgcccatccactggtccagacacctctacaacgtggcgaacttcaccatcggcacgccgccgcagcccgcgtcggcgatcatcgacgtcgccggtgagctcgtctggacgcagtgctcgatgtgcagccgctgcttcaagcaggacctgcccctgttcgtcccgaacgcgtcgtccaccttccggccggagccgtgcggcaccgacgcctgcaagtccatcccgacgagcaactgctccagcaacatgtgcacctacgagggcaccatcaacagcaagctgggtgggcacaccttgggcatagtcgccaccgaaacgttcgccatcgggacggccacggcgagcctcgccttcgggtgcgtcgtggcgagcgacatcgacaccatggacgggacttcgggtttcatcgggctagggaggacgccacggtcgctcgtcgcgcagatgaagctcaccaagttctcgtactgcctctcgccacgcggcaccgggaagagcagccggctgttcctcggctcctccgccaaactggccggcggcgagagcacctcgacggcgccgttcatcaagacctcgcccgacgatgacagccaccactactacctgctcagcctggacgccattagagccggcaacacgacgatcgccacggctcagagcggcggcatcctcgtgatgcacaccgtctcgccgttcagcctcctggtcgacagcgcgtacagggccttcaagaaggcggtgacggaggccgtcggcggcgcggccgcgccgccgatggcgacgccgccgcagccgttcgacctctgcttcaagaaggcggcggggttcagccgcgccaccgccccggacctggtgttcacgttccagggcgccgccgcgttgacggtgccgccggcgaagtacctgatcgacgtcggcgaggagaaggacacggcgtgtgcggcgatcctgagcatggcgcggctgaacaggacggggttggagggggtgagcgtcctgggaagcttgcagcaggagaacgtccacttcctctacgatctcaagaaggagacgctctccttcgaacctgcggattgcagctcactcccctgatcgatcaatggcggctactgctgcttcttgctggaagctttgctgttcaagcttaattccattccatgtttgtgttgtgtgcgcgtgtgtgtggctgtgtgcaggtgtgcaatgttcatagataagataacgcagccatggcgcgcgcccaggcggcatgagctgcagcatgctttgctttactctccagtgtgggtagcgtagctagttctacttcctgaatctataggctatacgtgcttgtgtaagaacgagatcctcttgtcgaactccattcatccttaaggaaatatccctcgtttttgcatggtgtttcaattattagcaactttttctaaaagaaaaatagtaagatagatcaatatgtgatatataactccaaattcaacttatatatatagaaacaaagataatttggctcacctgattcgggatataggtgcgcagaggcgaactcaaaacaaaaattatcgggggtccaatacgtactaattatcttttttttacttatatactagttatcatcatataatttagttagaattgaatagtttacccggggttcgaggacaccaggaaaatgtacctaggatcgccactgggtgcgctgaaaatgagaggttgtcatttttaacaacatgtataaaatgagagtatgtccttccacttttgatcctctgcagtatgtagtactgcaatccacatgtgagctctacttgctcaaagtcccacatgtcactggctcctattacaagagcaattatatagaggagttgagttcgcttgtgtccagattgatatatcagtcttatgttaatttaaatattattcagttgtgatgtgtgggctttgatttcaaaattgaatcttcgttccatgtctaatggtttatgaatactcttgcgttacatcttcccaacactgttggcctttgtcagcatagatcgttctacctgtgccaactgaacacaagtcaggaaaaattgtcatgaagtctcatgactctcactctcatgtgcacaagccatcaacttcaaactttcagagtcaataggtaaataaacatacagctactctcagacgataccttttgcttcaactcgaagtttgccggcagtgatctgcagaacattccgacgctgatttcgggaagtctgttttcaggtttgaggatataggattaataacggttatacagattttgggtaactgtttatttctgtctttaggttggtttccatcaattccattataaataatgtatataaacatatgctaaacagattgctcattcagttatcctgttcaaatagtactaaaataattaaatcattttccccaattcgtatatgctactattagtttctcttattcctatggagcaatcgtcatgatgtagattggtcatgatatggcaaacctgctccactatagatgaagtctaatatttactccctcgctccaaaataaattaacctacacatcacagtgctacgaatctgcgtggcgaagacaaaaggaaacttagctgcaaagttgccgcgttgctgaacacaataattccacgtgaaggctcaagtcaatcatccatttcattgtcatttcatttttgcccactagatatgaacatctcccatccctagtgtggcagaagccagagttgtagacactgtttccatgcattatcttcgttttaaaagaagaagatctcgctgtctctatctcatacggagtataccaaaatgtccaaaacgattaggcgctgacatcaatttatctagctacgttacagtgtcaaactgtcaacatcttaattactcctggttatgcttatgcatgcaccaatcagctgcatctactgtccttatatctctactattataaaaattaaaaatatttttgccggcgctttgatatatcatctgtgtatgagtcggttttcaaattcgttcacttttgaaaatacatatccgtatttgagtcgtttattaagttcgtttgcttatggaaatatagaagagtcgtataagaaatctctttaaaaaatctcgcatgctaacttgagatgatttgactctaattacaactcataattttaagtgaattctcacagtaaattttaccttaattaaaccgtataacaataataagattaaaataactttcacccgttgttacgcatatgtatttttctagttaaaaaaacgagatttgaaggaagggatgttctctgtccccatataaacccaagttacccctcgacttcgatcactaatccttcctctcgaaagttgaagcatgcatcagtcataatcagttaatcacgacaattagctcgctgattgataattaaccgtaattataatcatggcaagtctagtctcaacgctgctgttgatgtgcttgatccctctgacgcgcgcgcacgaactccggcgaggtctggagctcgccgacgacgcgacgacggcgcggccaggaggcgtgaccgtgcccgtccacttctcgcaagcgttctacgtggtgaacctcaccatcggcacgccgccgcagcccgtgtcggcgatcatcgacatcggcggggagctcgtctggacgcagtgcgcgcagcactgccgccgctgcttcaagcaggacctgcccctgttcgacacgaacgcgtcgtccacgttccggccggagccgtgcggcgccgccgtgtgcgagtccatcccgacgcgcagctgcgccggggacggcggcggcgcgtgcgggtacgaggcgtccacctcgttcgggcgcaccgtcgggaggatcggcaccgacgccgtcgccatcgggacggcggccacggcgaggctcgccttcgggtgcgccgtggcgagcgagatggacaccatgtggggatcctccgggtccgtcgggctagggaggacgaacctgtcgctcgccgcgcagatgaacgccacggcgttctcctactgccgggcgccgcccgacaccgggaacagca

SEQ ID NO: 26676 - DNA, 2423 bp, Oryza sativa
atgagccaatattacccgatacaattggacgggataaaagccggcgacgcggcaatcgcgctgccgccgagcggcaacaccgtccttgtccagaccttggcgccgatgagcttcctggtggacagtgcgtaccaggccctcaagaaggaggtgacgaaggccgtcggcgctgcgccgacggcgacgccgttgcagcctttcgacctttgcttcccgaaggcggggctcagcaacgccagcgcgccggacctggtgttcacgttccagcagggcgccgccgcgttgacggttccgccgccgaagtacctgatcgacgtcggcgaggagaagggcacggtgtgcatggcgatcctgagcacgtcgtggctgaacacgacggcgttggacgagaacctcaacatcctgggtagcttgcagcaggagaacacgcacttcctcttggatctggagaagaagacgctctccttcgaacctgcagactgcagctcacttatctcctaatcgatggcttcttgatggaagctgttcttgccttagcagcttagctagctttgctattcaagcttccatatttgtgtcattgtgtgtgtgtgtgtgtgcaagtgtgcgtgttcatagataacgcagccaggcgcccaggtggcatgagctgcagcatacttttctttgctctccagtgtgggtagcgtcgatctaccattttctacttcctgaatctatagtataggctatacgtgcttgtgttggaacgagatcctctgtaatactgagactgacatgtggccccagttacgcaaggcccacatgtcagctgcttctattacaggggaaactattttgatccctcgagaagatgtccactcattatttgcatgccactaaatggttacgaaagaatttgaaaaaatttaagaagatgtattaacatatgatataacactaaaatatgtaagttcaaattcaacttctacatcttgtaacgaaaaaaacagtatataaacaatcagtattacagcttcttaaacagattgctcattcagttatctgctcaaacagttccaaaattattaaatcatttccctctatttgtatctgctattagtttctcttgttcctatggagcaatcgacaatcgtcattatactggctggtcatgagatggcaaacctgctccactatacatgaaggtataagttaatactatagccacagtattctcctcctaattggaatctactccgtaaacttgccttcatagactccatgatgtgaagttctgttctcttttgcttattttactttactacgccgattccacatgcacaaggataggtgggaaatagtgagtggattctatactctcgatggaacatcctctcgttatttgtatgtcatctaaatggttataaaaaaatctgaaaaaattcaacaagatatattaatatatgataaatcattccacacaaacattcaagttaaaatttaacttctgcatgttgcaacgaaaaacacaattaaatttgttttttttttgcaacttgtataagttcaacttgaccttacatgttcataaagtaagttatcacatattaatctatcttgttgaatatttttaaattcttttcataaccgtttggatgacatgcaagctcgagagtttttgtttcccgtgggaaatacactagagcaaagatggtgttttgatgttcttcaaggaaagaaatatacttcagttttcggtgtcctggggccaccagaattaggacttacaaaataaaataggagaaaagtcaattcgtaagcattgcatgcaccaaaccttttcatagcagctccaacttctaaatctaactttaggagtggagtttggcgtggagctatagagcggcccaacctgttccccccctctaattcttttttttttcgatcacttaagcttgctctgctccttttttaagacgatgtttaaattgtttggttgtcatctagcttcaaaagagatgaatcgggcatttaactttttgctactttataatcacgatcattagctcgatgattgatagctgacagtggccataaccatgggaaggctagtgacaacagtgctcgtgctgtgcttgatctatgtgacgacgcgcatggcggtgttccgcgggcacgacctccggcgaggtctagagcaagccatgcgcagccgcctcctcgccgacgcgacgccggcaggaggctcggccgtgcccatccactggtccagacacctctacaacgtggcgaacttcactatcggcacgccgccgcagcccgcgtcggcgatcatcgacgtcgccggtgagctcgtctggacgcagtgctcgccgtgcagccgctgcttcaagcaggaactgcccctgttaatcccgaacgcgtagtccaccttccggccg

SEQ ID NO: 26677 - DNA, 5944 bp, Oryza sativa
gttgaattacggcgccaaccactctggcgccccaaaaaggaccatttctgggataagttttttcaggggtctatttgcgaaataagttttttaaaaggaccaaaatgtgaaaaatccagcaaaagagagtgcaatagggtatcttatgaacttgctcagtttgctaaacggacggcacattacgcggtttggcgcgatcatgccccgtcctgtgttaagcatgtactgcaataagagtgtaatcctattacttaatcaataaagctatatgttcccgcaaaaaaaaaagagactcaaatgaataaggtactcattttgcaacataccgattcgatcgtcaaatccgcgccgctgcgccatctactcaccctcgacctgtcatcctccgccaccttcttcgactgcccagaggtagatctacagtagaagggagggtcggtgtcagatgatactgacaactttcgataaaatttatacgaaactgattatccctatattataatactataatctaaacataattaacatactatgaccattgataaacacgtttatatatgacagcagcaaatcgattttatcccccgcaccttttgccgctctttctccatgaccgatccgtcgttccggcgctaagcacatgcatctccccgtcttcctggacgacccccgccgcctcctctcctcctccgccgccgcctccgcctccgcccggaccctcgcccgcctccacgccctcctcatcgtctcctcctccgcctcccacaccctcatctcctcgctcgccgccgcctacgcccgcgctggcgacctcgccgccgcggagtccaccctcaccgcaaccgccgcctcatcctccatcgccgcgtggaacgccatcatcgccgcgcactcccgccgcggctccccggcatccgcgctccgcgtcttccgcgcgctcccgcccgccgcgcgccccgacagcaccaccttcacgctcgcgctctccgcgtgcgcgcgcctcggggaccttcgcggcggggagtccgtcagggaccgcgcgttcgacgccgggtacaaggacgacgtcttcgtctgctcgtcgctgctccacctctacgcgagatggggcgccatgggcgacgcggtcaaggtgttcgtccgaatgccgaggagggaccgcgtcacctggagcaccatggttgctggtttcgtgagtgctggacagccactggatgcgattcagatgtacaggaggatgagggaggatggtgtgaagggagatgaggtggtcatgattggggttatacaagcgtgcacagcagccagaaatgtccgaatgggagcttcagttcatgggcatctcttacggcatggaatgaggatggatgttgttactgcaacaagcctcgtggatatgtatgcaaagaatggactacttgatgtggcgtgccgagtttttggtctgatggtgcaccggaatgatgtctcatggagcgcgatgatctcaggttttgcacagaatgggcaatcggatgaggcacttcggttgttcagaaatatgcaggcttctggtattcagcctgactcaggagcacttgttagtgctctgctagcttgctcaaatattggattcttgaagctagggaggtcagtacatggtttcatcgtgaggaggtttgattttaattgtatcctcggtacagcagccattgatatgtactcaaaatgcggctccctagcaagtgcacagatgcttttcaacatgatcagtgatagagacttgatcttgtggaatgccatgattgcgtgttgtggtgctcatggacgaggccaggatgcgctcactttgttccaagaaatgaacgaaactggaatgagaccagatcatgccacatttgcttctcttttgtctgctctaagccattctggtcttgtggaggaagggaaactatggtttggtcgcatggttaatcacttcaagatcacacctgctgagaaacactatgtctgtctagttgatcttttagcacgttccggtcttgtggaagaagccagtgacctgctcacatcaatgaaagctgagccaaccgttgccatttgggttgctctactttcaggctgtctgaataacaagaagctggagcttggagaaagtatagcagacaatatccttgaattgcaacctgacgatgttggcgttcttgcgttggtctcaaatctctatgctgctacaaagaaatgggacaaagtcagacaagttagaaagctaatgaaagattctggaagcaagaagatgcctggctgtagctcaatagagatacgcggaacacgccacgtgttcgtgatggaagaccagagccatcctcagcgtgaagagatcgtaagtaaggtggcaaagcttgatttagagatgaggaagatgggctacattccgagaacagagtttgtgtaccacgatctggaggaggaagtgaaggaacagcagctcagctaccacagcgagaggctggccatcgccttcggtttgctgaacacaggcccaggaacaaggcttgtgatcataaagaacctcagggtctgtggtgattgccatgatgccatcaagtacatctcgaagatcgcggaccgggagatcgtagtgcgagacgccaaacgcttccaccatttcaaagacggagtctgctcctgcagagattactggtgatgaaggtagcagtttcatctgaattttgaccaccagcgagaccacccactatttacatagtacttaggtagcaaggcagcaagataagttcactgtaacccctattggctattgccgcttttgttgtgcaggctaccgagaaccagcatggcaagaggatgcgtgttgctgtatgtatacccaactgatccccctaggcggggaccatcagaagaagttcagccacgcaaggcggccacgtccgtccgtccgtcacgggggacccggcggcgtggtagtggtgcggtgcccgtcgccttcgccattcccggccgcgggcgtcatctgtcgcggcgaaaacgacccgggaggtggcggcaaaggcttttgcttcctacccgctggggcgcgcgcgtcgccgtgatcggtacgaatctcgcggggggaagtggtggtggcccagacagatcgtgataacgttggactttgcgcgcaggtcgcgttggttggagtggtttgcggtctaggacacttgcttttttccccagtaggatgatcacccaagaccgctgcactgcacctgccccatgtgggagcagcatccagcatggccagttcgcaacgctacaccggtaacaacaagcccttagaaaactatttggcagtttggtgtctggtgctgatgaagtggtgattggggcctcagattagtcttttctgtgtttaactactgtgcatatgacagggaggaagcaaaaaggtttcttcgccgttgacttattacgggtgtggccagaagaaattcggcgtttggtttgctgtgcatatgtgtgagccatggtagttacatgctgtttctgtttccactggtatagtggtattgcccgtttcggtcccaggtgagtctgaactctgaagaccattttatctttcacaagattctgtaataatctggttggtggatgaaggcagtgttttcataaaagattcattaatttcgtggtgggatttagtgtgtccagtgtaatcatacagggttcatctcactgtctgccaacctttgtgttctaatttgaaaagaaacgaattgatattaggttttttttttccttaacaaaaaagtaccgaattggttgtccatgggcgattggctggcgatatgctcagatacatcgttgtcccccttttcgtggggatagcaaatatcggttgtatgacttcctcaatccaaaatgtggtcctttcaaagatggaaaattaagggtggtacctcacacattcgactagtcatatgctggaatctcgtcatgtgtatataccatgaaacacatttctgatttgccatccacattagcttgatatccaatcagttcttgtggagatcacctatatctaggattggtaaagagctataatctaggaaatttgagatttgatttaaaatgggttgagctaatttttacatatttttcatataaaaatatatgagagtgacccatgagtcttgcccattactacccctacctacatcctcagtagaattagtataccaacaactattggtttgtcacggactcaattttgcgggctatccatgtagagattattcatatccatgtttgcccctaccttttgtgttgttaaatagtacatgaacatatttatcaattattattatattgtaggttacataaactttatttttgtttgtggcaacgaaacgcaccaaaaacagaagttaaaaccactagattatagaaatgcattaccaaaggtggaatttattacatatttattggtgttatttctacctgtggttggccctccttttatgttattgcacatgcaattgaatatcttgtcagtttaccatgtgcatttacaattggtgactatgagcagaggacatgacaggaaagcaaggccactagaactctccacttgaaaaactagaataaaacaaaacaatgtaaccttctgatcatcgaaggtaaatctatttgaattgtgcaccctagtgttgaaaatcatgcttgataatgcatcctaggcaatgggtcattcagcaagccggctgcagcggctgcgctctgtgcgttcagcactgttggtgctgagtgcggcacagccgtgaaactagcaactgaacatgtccaatactatagagaccatttaattgtagcaatggaatgtatttataagtatatatggatgtaacattattccctactatctccaataccacgtggccatggtactagtagaagtgatattggataaatctatcacaaccacatagcttttcctgttcaacatggtgttatctctactgagacaacgccatcccaatactagtctaacgtcatatgatattgagtctagtgatagacacggaccctgataccagcgctacgtcaccgttcagctagcaaagaattccattttgtttagaatactcacctaacataagtttcacctatagcctttaatcctcattactaatttacaattatgttattgaaagtaggttcacctatagttacaccaaatggaatcggcaaaaactaaaaaatgtcgcatcattttctcctcctttttctccatgtgaccaaagaagaaacacctttaagttgtataggctacctagccatcgataatgaggcattcatgctgacttcatcgatctatacgtgtgtgcgcataaggatgagtgtacgtgtgttataagcgtctgcgtttatattgtatttttaaatagacaaaatcgaaaaggaagacctttgaaatacaaaatacatgaactcgaaggggtgtaatgctaaaaagtatagaaccctccaccacgaagcggccacgctcgagacgagacgaggtgaccccttcccttctcttccgtgcgtccggaaagcttcggtaggacgcttagcttggccgtcatcattaaccttcccaacctcccccacgcggccgccatcaccaccaccacctcctcccccccacctcccctcctccgatccctttcgcccgctcaaccacccgtcggccggcgatgctccggccgccgacgccgacgcggcgcctcctccagagcgtcggcggtgggagcaaccccaaccgcatccctggcatcccgcccgccgatcccccctccggcggcgtcagctccgatgtcgtcgtcatcctcgccgcctcctctgcgccctcatctgcgtcgtcggcctcgccgccgtcgcccgctgcgcccgtaaccgccgcaacagcggcggagccggcgccggc

SEQ ID NO: 26678 - DNA, 3599 bp, Oryza sativa
tccgagttcggcgagcgggaggaggtccgcgtgatgccgcagtgcggccatggcttccacgtcgcctgcgtcgacacctggctccgatccaactcctcctgcccctcctgccgccgccccatcgtcctcgacgacccctcgccgcccaagcgctgccgcaagtgcgaggccatagtcctcgaggccgtcgtcgccgcctcctcctcctcctcctcctccgccgccaccgccaccggcagcggcggaggcggcggcggtggcggtggccgattcttgccgtagtgtagggaggatggttgtgtccctgacgggtggggcccaggtcggtgtgggtagttgagctgctcctttccacccatggcccacatgtcagtagagagagagctcttgaaaaagttttcttcagaaaaagaaatggaaaggagaataattagaacttgtgaatgaattgtgattctttttttacacctttttgggttccttccagcttctgtcgggggcatgacatcacatacagtcgttgttgatgtaatctgtaaaaaaaaaattatatcagttatggttggggtaaaaaaaaaagatttttactagacctaagtgtcttgcaaattttagcaaactaatcccatctgaaattatatcagttatgcagcatgagagtaatgatacttcccagctgagcagatgcatgccacgtggaggcatccgcagccgttggatgcgagaagagggagcgtgtgaagtggagtagccgggtggtctgcctcaggggcgttaggtcagtgacaataatcatcagtcgccatgtgaccgtgaggtttttgtcttccattaattggaacaacatggaacaaagccatatatcatatcaaagcaactaacagcgcttaaacaaaagcgtacttagatcccaaacctactccatttttactaactaactatacgtgctagcctcacccaataattggcgatcaatttagaagtagaaattttggagacgtccagctcagctcaccggctcgagtgtagcttagcgatttttgtaaacacgacgtgtcaagcggccagctcagtccaaagtcactagtggcagtgggagtatagcaatatggcgacccgctgaaaattccgtgtctcccgcgcataattgcctgtccgcgccgggacggcgcggcgagcgtgcgtgtgacaagtcaccaaccgcagtactagcctcttctccggctgtctccatcgcggcgcgctctccaccgccacggcgccaacagattttcttagagcccaaaaaaactactatattaaatatttgttataaatattttttttaaaaaaaaaacacaatacaagcatagacgctaaaaacgcgtgtacactcatatatacgagcagacacgcacgtactacccgtatgagtacctttaagaaattaaatcaatatatcttgagattgacgaagttactgcggaagtctcgctataccactaagaatagttagccgtaaatatgataaaggaataattagccgtaaatatgatcatactagtttaccttagtcaaaaaaaaatcacatgtttactggttagaatcactggttagtagatgtactcaaggttaaaaaaccaaatcacacacaataatcggaccggatgggttttctaaaacttttaacttattgagaaactgaactgtttgtgttgtcaaattggcctaagaagtgtggtttgttttttttttttgttggttttgtgaagtgtaaaccatggctgtacctccacgaggccaccagacatgtgggtggcacgagcgagcgtgagggagagggaaagacgtgtgcataaataaataaatggcgtcgtcaacggccacctgccgctgcccgccgcacgaaaccgtggtggtccgccgcgacggcgatcaggcaatgacgctacctccagctgcgcggcggccgccaacctatggcttgcccatttcttgcgtatttaaaggtaggggtggacattcggtcagaccgaaaaattcggtctcggtcttcggtttttcggtcttcggtctttgaaaactcaggaccgaatttcatccaaaaaaaactcaggaccggtaaattctgtctcggtcttttcggtctcggtctcggtctcggtctgaccaaaattttcaggagtaagtttgaaatgaaaaattttgacagcacttcctctcttttgagacatttcttcacagatatatatcaaaaaatacaagataatatgcaagaataaatagcacagccgcacaattacaggtgtagtagtagtttatagtttatgctacctgctagtactggagtagtagcgtctttttgttgttgccaatctttattttttaagcaaccactacaaacatcgaccagcggttgttgccctcttggatcaggtacaaacagaacgtgatggagatgttctcttcgattcaatcaatcttcggttccaagacctgatctaaccaactgcaatgcagctttgcaagtggagctccagtactacaagagtttctgaagtctcagctctgaaccaatactcccaccgtccaaaaaaaaaagaaaaatatgaattttttttataattagtatttttattattgttagatgataaaacatgattaatactttataacttgtctttttaattttttttatatttttttaagataagacggatgatcaaacgttagacacgaaaatctagagtttttttttcttttggacggagggagtacaccagagtccaacacagtttctgttgctccagcttgtccccaaactgcacattgctgcatgctgaacccacagcttcccaccatcatgcatcgctttaatttataagctgccactagaactcgaagcttttctgctgggacagtagcttttgggttccactctgacagctaacaaaattgaaattttattcacaaagtacttctcctactcctgaactcctttacaagagtgggcacaattcttttcctgggtatatggaactcaaagcattacctttgctttgcttctccttttctcccctttcacctttcaccatttctttttaccctgtgagcttgggtttttagtacttgatgaaatccaagcatcaatgaaagatgttcagcagagaggaaaccaattcagaactagtactcggctatgctaatattcagaactcacaaccgagagaagaaaacaaactcaagagtaaggcaaaaccagtaacacaactgtgatagaccactagttacagggagaagaattccaaagaaacacaaatggaaaatgaccaaaccaaaaggaacagatgatctacatatcctaagctccaaaatccagtctacgacaggattcagcctcatgatgtacagccaaatcatctctttaggctcactgcattttgatctcttccaagattctttaacaaagcatccatcacaggtttaacccgcagcgcgatttggaagcaacaaaattaccaccagcaatctgattgatcacttgatccgagcaactagtcctccttggcctgctttgctccgacagagaagaactcggtgatgacttcaagaggcatgcc

SEQ ID NO: 26679 - DNA, 3301 bp, Oryza sativa
  unsure (1)..(3301): unsure at all n locations
tgcacttccaagtgcactttgcccgtgaacaggacgggcaacccacgataagccttcttcaggaccatacagtttgatcttctctggatctggagccagcccttcatcagcaagctcatcatcaggtccaattatgtattcctcaatttttgtgtctttcccaacccccagaccttcaacgagaagggccatttctcctgcacagttaattcaacatgagaaactccatcgcatagataatatacctatactgatagcattaaatagtttctccactttctagatcctcacagggaaaaatgctgggtaagacatacaaacctgaaacatcttctcttccacgcaggccttgcaacacacgcttggcctcagccattcttcctttgctcacgagccacctcggcgattcaggtaagtaaaagatggtcaatgcaaagtatataagtgatggtattgatagaacgccaagcatgatcctccaatctggctgtggcatgagggacatgccaaataccatgcagtatgaaaggaacatccctccagacccactgaactgcggcagcgtgtttagcagtcctctgatgtccgtcggggcagtctcagagatgtacaatggtacaagcgtgacagccaaaccgatcccgaacccgtcaatgagcctcgccaagagcaacacatacacatttggcgcccaaagcatcactagcccactaacaaagtagaggacagccgacgcgatcagcatgggccgcctaccaaaagaatcagccactgctccagagaacgtcgtgatgatcgtcgccccaatgagcgacatggccacgatcaggccttcgataaggggctcgctctgcaagttgaattccttcttgatgtacagtaccgcacctgataaagatcatcccaacaagtccacagggtcagcaagaagtcaaaaccatcggtatcaatcaaatttctgaaaccttaccatgcagacagtatcaagtccaataaatacagatcattcatgagatccggacatttgtttaatcctactcataattgactcaaaattctactgaaaaaaaaatatcagttgtttttttttgtgatatcatgaacagagaagaacanctaaaccattttttactgcagatgattccaccaaatccatcatgatctccacaagtatcacaataattgccaccaaacacgggccctagcgtcacataacgacatggcacacaaactatggcagaaaaaaaaagattcgttttttctctaaccacgaacttacctgcaatggttgcattatcccagccctgcagcaagttgccgatggaggccgcgatggcgaccagcacggcgcccgccatggccggcgaatcttaccactgcacaagaaagaaaaagaaaagaaaacaacgaacaccaccatcaacaccacaacaaagaacgccatcagcaacacaaatcttacaacaaaactccccccacccacaaacaaaacttgattcgatctaacaaatcccctcctagaatcaagaacatgcctccccccagagagagaaagaaaccctttctttacccaagtctctcgtccaccgagatttcggatcccctaacaagaagagaggcggctgggaatctggaagggctcgttgggacgccgagatggggcaaatatatggggaattctcgccaaattgggaagcttttaggggagatttggaggagggagtccagggccgagggggggggggtgaggagagtgagtgtgggctgtggactctttggactaccatagattttgctctagagaggcaatgtttttttctcctctaccccttctttgcattgcttaggtgactgacaggtggggccatgcaggttgtgggccaggtggttcagtgagagagggtggtgatctgacaggtgagaagttgaattttggatgtttatttgacaggtgagcattagcagtagagccagccagtgtcagaggagaattattgagctggatgccttcggatccatccttgtgctccatgtaggacaaccaaccattatgtacttgatgctggcaaaaaaattggtattttgatgaattgccatgttcaccacaagaattttgaaagcatactatgtgtggtgtatcagaggaaatcaataccattttagtttttttaaggttgaaatgctagcttgtaatgggatgtgtcatgtgtgctaattttcagatcttaattcttcgattataatacaacccaagttcgagatgcaagacttgattggttcatatggattatagagcaaagggatgcatcatgtgtgccaattttaaaagctattttcctcattttaatctatctccgcgttcaagaaacaagacatgtttggttccaacttttagatagacatgtattcatatgatattttaaaattcctatggaatatctcgttctataggaattttgggagaatagaaacatgtatagtttcttgttgcaccaaattcttattttaccctacaaagtatctaattattagtgttcattattaaaaaaaacattcagttctatatattattccactaaacactccatcggaaacccttctctttgctctataatcaatattaaccaaacaagtcctaatcttaaactcgggatagattataattgaggaatttggatacgaaatttggtacaaatgatgctcccaaaattcctgtagaatgagacattccatagggatttaaaaaaatatgggtgcatcccaaatcatactaatacgggtgcagtcctttgtcctaaagaccacagatatcctataaaattccactaaaatacattaagagttagtttttaaaactatttgcattggttgtggaattacacgagaacttcaaagtgtttttagcatgtttcaagcttatgtttcgttaggcatgagtaagatctaggcttcaagtagtatttcaacaaaaaaaaaaggaaaagggaataaaacctgactgcttttggcgtagcagattggggatctagacgcagccacggggcacatccaacttgatctatggattcactcgtcgactcttccttgaaaatgatatcctcttaggtaccaagttaggattgattgtggtggcaccatcagatctgatttggtggcccatcaatcaccacggcaggcacttcaaacttgctctatggcttcgctcgctgattcttcctttgaaagcggtgtcctcttaggtgtcatattaggattgattgtggcagcgctaacagatctgatctggtggtgcctcagatct

SEQ ID NO: 26680 - DNA, 753 bp, Oryza sativa
taataaaatatattgagcaagtcagcagcttatcaaacaacagcaagcaggttatctatgtggcaagccatatttaaacttatttctttcaacaactatgtgaaaactgaggccttagcccttagatgtaccttttgcaagtctttcaacaatattggtcgctacagcaacctcaaccatatttttggaactctggccaagttcatcaagcatttccatatcgttttcaatatgaatgaatgaataagcaccataaatagggccagggagataactcttcatatagtcttcctgttggacactgggaccatcagaaattcggttatcataaaagttggcatttggaaatttgttgatgccagggtgcatcctatattgtacttccagcaaatgctttctataacccattgtacacaatctctcatagagacttcggccaaagtcagcatctttagcaatctagagtagcagtaaggagacagtatgagcaaagctatagaagtcagaataattattggcaacaatatactcataataaaagagaacatgtccatgtatattatcccataccaatggcataccttactctttaccaatgatgataattggttttcatctccaatcagcagaatgtgctctatccctgggagcaagagaggaaccagtgcttcgcattcttttagttgtgctgcctcatcaataaccaagatgcttataggcatcacgttttgcaacctgaacaactcaaatgaa

SEQ ID NO: 26681 - DNA, 2469 bp, Oryza sativa
tggagcgtttctaggatgattaatggacttttagtatgtaatagattaattaagtattaactttcttttaacagtttaactatttgaaaacgagaaacgcccagaggtcttccagctagctccataaggtggtgagctagacgatctgggtttgaattctcaccccttctaattatttgatattagatccttccctaatattcgtattttactatttgaaaaacatgcatgtaaaaaaaaagatgagttgggaaacttagctgccaaacagagaattgaattggagagatatttttgtcgagatggaagagagaacttgaggagagagatgtgtgggtgactaagagcaagaataataacgagctataagctaacaataaatttatacgaaactatcgacgtttgatgtcgcgattccggtatttgcatagtatggggatcgttggtactaggatatatgcgagactgaggtaaaagagatggatacatggatttttatacaggttcgggcccctgaatcgtcaggtaataaccctacattctgttggccgaagccggtcgttgctcttattcatcataatcacaccagtacaatatttggggtagcctatctaactgttgtcgacatggcggtctgaagttctgactcgtagtcgataacatggtagtcttcctcctcgaatctgtgcctggcaagatcagagacagcgctatgtctctcctaacagtctccggagacaccgtaggggactggccatgcctatctctaaagtcgatatccggcgtcttgtcttggcgcatgttggcttgtatattgtggcttctgttgttccgtgtcccctctcctcctaggtggccttgtatttatacccataggtgtccccttgtccaagtagaactagggaaaccaatatggatacaatccaaatagtccttgtcgtttccatgtaaaactctattcatcattccttatgcagaactcctcctatatctgaaggttgtttccgtataggacatgatatgtggtgggtcctgccgagatttagtcaactactattaggtatgtggtatccataaccctgacataaacagtgaaacaacaaaaaaataaaagatgttggctctcatgtaaaatctaactaacacgtgcttcaagacaaatactttaaatacataggtgagagagatagtgagaagcagtgaaacaacaaaaaaataaaagatgttggctctcatgcaaaatttagctaacacgtgcttcaagacaaaaactttaaatacataggtgagagagatagtgagaagaaaatatggaaacaatattatagttaatttattatatatatgttggctttaagataggctaatagcggttagtgaactctactactccaacgcactcaacgcagcaatgtgggcccaacgaataggaacaaagggagaaagcataggagagagattaacatgagtaaaataaaatttttgatcgtactattgcagctagctattgtagtagtacctaagagacggtaaattatctctatatgatgcggatgaaaattatagcctgttgcttactctattattaatcttgctctaaccatcattagatcgaataacaaagactcagaacgcacaagagtattgttcatcatattaccgtatgtacgtgttgaatagggatagcagcgccgggggtctccaatctggcagtgggtcccacgtgccaatatctaccttcttcttcccttctctttctccacagtccacatctatcaccttccccatccccacccacccggtggccctcttcccaaccagtggatgaggaggcggcggcttgaggctagggggcgagtggatggggagctggcggcgccaccgccgtttcacgcgatgatggccgacgctagacgactacgagcacatgaggtgatgacgggatcaactcctcgccggcctccctcaccgtcgcgtcctccctcccttgctgtcgatggtgcacaccggctccgtcgccctcgttgtcgagttgcgctgatggccgacgctgaagaaggaaggcaacaacggccggcagaggtggcggcgactggcaggggaggcaacagcctaccggcaaacagcagggagccaccgagccggcggacagcaatgaacgacgacgggtacgagagagagaagcgtgaagaaaagcagaggtaggggcaaaagcacatgggtccattgttttgggaggaggaatgcatgtggggcccaccgttagctagtgactttggcttgccaagtttaggccaggggagaaagtgttttggacagtcagatggcgccatctggttaaaaagactgttggcgatgctctaactcataacttcgggtcctcgtgggtcaactcttatccccgcatgcgcccctgcatttactgtctgcaaattgccaccccttcccgcgtatgacgacggccggatc

SEQ ID NO: 26682 - DNA, 3972 bp, Oryza sativa
gtgtgggtaaagtgtaccccctctgcagaggttaacaaactgttcgaacagccgtgcccacggtcatgggcagatgtgaggtgattcctagcgtagttttgtttgactattgtcttgtgaaattgctgttgtggaaaagggatcgatgtttagaaaatctgcagctgatgagatcagctaggcccgggtggccgtttaaaagttgttggcccgggtggccgtttgaaagttgttggccgggtaccaaccttgaatcaattcaaaagactgatacattgcacatactccgaccggacgagacgcactgtctcatccgtgtcgtttgagaagcactcacttagtggtttttcataaaagagttcaaataaaatcaattgcaaaaataacagtctttccttgaagcctgcattaaacacttatttcccatggcttgctgagtactcccgtactcacccttgctttatataaataatcccccccagttgctgaagaagatgaagcggatcccgctgatgaggagttcttccaggagcaagccggctacgatgagttttagggtttcggcctagttcccaagtcgcgcctgtgaagtttggtccaagtcttggcttccgcttcccttttgtaatgcagttgagagctcgggatctgtccgcagcccacatgactgtactcctactctataataaagagacctctgttgctgtgatattctgtcttcctgtggtaccagcactgtttcctgggactggtatcgattaacaggttaatttggagcgtcacgggctagtctcgctcggggctagttcggggcatgacagcagaggtaggggcaaaagcacgtgggcccattgttttgggaggagaaatgcacgtggggcccaccgttagctagtgactttggcttgacaagtttagaccaaaggaggaagtgttttggacagccagatagcttcaccatatatccagttaaaaaggctgttggagatgctttaactcgtgacttcggggcctcttgggtcaactcttatccccgcatgcgcccccgcatttactgtctgcaaattgccacccctagccagtagccgcgtatgacgacgaccagatcgtgcatgcttacgcatgtgctacctgccgggaaatgcctcgcatatactcctacgtaccgcgccgagtcgtcgccgaccgatacgcgttgtttactgcatgggtatatcatgatagcctgcgtctttttttttgcatcgatcaatcgatcatgtgaaaccgtacgtcatgaacttcctcaccctttcgttggttaaacttcctgcgtaatgtcaacaactgaactttttttttgttttttttagttgaggccggggatcaacaaagtgaacttgactgacaaatagtcatgcttgatctgatctgccagcttgatcaacgagttgaattgagttaacatcgatacagggcgatttttagttatatatacatactccctcagtaaaaaaaaataattatagagatgaatatacaggtatatctagattatattcatccttaaaattaacattttttcttgctgagggagtatattttggcgatgccatatgctatagtactccctttgtccaaattataaggcactatctttttaaaagaaaatcaaacttggtaactcttgattaataatcatactaaccagtattatgcatgttaattatatcactatattcatattttaaaagaattttaatgtcatgctaatttcatatttgttgggagcataacatggaataaattaatgatcaaaatgagttattaaagtctgtttaaaaaaaatatagaccctataatttaggacggaggaagtatagaaatctggtaacatggcattgcaggaaaccgctactgcgcctgtcacacgttgttgacacaattatttgaatagacaaaatggtggttatgagtttttgtttcttaaaatcatgaattgtatgcctaggtttattttttcgcgaacgcgcaaaaggattgcgcgtcaatatattagaagaaaaaatttatagttacatgacgcaatcagtcagaccgacttatgtaaagggaagggggaaaaaagcaaaataagaagctggagcttaaaaaactacggcggctaaatacaaactccaagcagcgggaaggggccgagccacgttacactcctaacaagtccctaaaaacggcaacgccagctaaagactatagatggccctcctgagtggatggactccagaaccactgagaccgaagagaacacaaagtcgaaaaacctagagttcagttccttccacagctgccaagagaccaggagcaccaggaagtcgaagctagcgcggagatgctcaggttagcaggccctgaaggacggccaccagtcctagaaccagctgccacgggggagagagggcatcccagccaggaggcgatagcacacagagccagacctactgagcaaacacatagtcgaggaggatgtggttcgccgtctcaagatcctgagtgcaaaaagggcaggccgagtgactatcgatgccatgcttctggaggagatcagtcgtccaacaacgctgttggaatgcaaaccaaaggaagaacctgcatttagcaggaccctttacgtgccagagaagatcagctcaggcaaatgaatgctggccatggaagaaagcctggtatgccgaacgcgcagagtagcgctggtcatacgtccaacgccaaatgagacgattctcgacacccggtgagagctgtacgtgaagcaccgcatcccaaataaggagaaactgggagatgactgggatagtgagggcaccgcggatgtcagagacataggagttgttcgccagaccagaagcaaccgtgcgtgaacctggaagacgctggggaacaacgaagaggagatctggagccaaggacgccaccgagcggccatcgatccattggtcggaccagaagagcatagactcaccatttcccggcacgaagaaagtggatgccgcgaacatgtcggagacggtctgcttgactggggacttcaggccatcccagcaggtttattttttcgcgaacgcgtaaaaagattgcacatcaatatattagaagaaaagagttatagttacatgacacaatcagccagaccggcttacgtaaagggaaggggaaaaaaagcaaaataagaagctgaagcttaaaaaactacggcggctaaatacaaactccaagcagcgggaaggggccgagccacgctacactcccaactagtcccaaaaacggcaacgccagctatagaccatagatggctcttgactaggtttattaatttttactagagaattaaaggttcaaaatgtaatgttatcctcaccgttgtaggtaactgtatcgatcggtgacgtttgtgtttgaatggaactcctagcagcaacagggccacgtttgctctgcgaacaggtcgtaagtacaacgtacgcactgaatttcttcacctctccagccaatcaacggtgggccacattgctgaacatataaattccacgttgctgaataagcacattgccgtcaatatattaaacttgatccattggagatatagtatatttatatagagaatcaacgactccatgaaggctcaagtgtctcatccatttcacagttatttcgtgctcacttattaacgattatgagttcttatctcatttttcctaattcacatctttcgtttttggtacgcacgcttttcaaattattcaatggtgtgtttttttttaaaaaaatttctatgcgaaagttgttttaaaaaagtattaactatttttatacgaaagttgtttcaatagttaatacttaattaatcgtgcaataatgcatgttccgttttatgtgccgggaggcaacccctcctcccgaacacacccagaagttaacatcaaattattcagtcct

SEQ ID NO: 26683 - DNA, 5409 bp, Oryza sativa
gtcccactcgaagggctgaagccgggcgacgcgatgatcccgctgccgccgagcggcagcaccgtcctgctcgacaccttctcgccgatcagcttcctcgtcgacggcgcttaccaggccgtcaagaagccggtgacggtcgccgtcggcgcaccgccgatggcgacgccggtggagctgttcgacgtctgcttcccgaaatcgggggcgagcggcgcggcgccggacctcgtgttcacgttccggggcggcgccgccatgacggtgccggcgacgaactacctgctcgactacaagaacggcacggtgtgcctcgccatgctgagctcggcgcggctgaactcgacgacggagctgagcttgctgggaagcttgcagcaggagaacatccatttcctcttcgacctcgacaaggagacgctctccttcgagcctgcagactgcactaaactctcctagctaatcaatggctgctgctacttaattactttcttcatatgtatgtgtacttctgaataacgcagccttgcggcatgagctgcagcatgctcatgttggtgaaaataatactccattcttattattattctgtggcgatctggcctacttcgatttcaatctctgttccatgtttaatactttaatggttcatcaaccactgtaggaattaggatgctctcctacagtttttctttcaaaaaaaaatgtggttcatcaaccaagtttcgtcttacagcttcagaaacaaactgcatgcctcttcagttatcttagcaaaacactctgaaattaaatcagaacggtagcttcaagtcgatcaattgttgggaggcattgctaagaaatctaattagtcaatagtcatggattacgagttacgacgactgaactgatataccaaattaatcaccaaatatgacaagtggaactctaaaacagcaacatttatgcttaatccaccttgcatttctggatcacgtgctggagacgactttttccaccagaagccgcttcacacgtactaccacactcgcactaactaaccacgtattcgctccattaaaaataaacaaacttcgctaaaatgtgataaattctgatagtacgaatctagataggttcttaagtactacgaatttaaacatactaaattcataataatgttataatgtatcacatcttgtactatatttattaattttagactgaatggggtagtagatgaagtagactagaccaaacatgaagccagcagatcagggtaaatgtggtaaccgcaagtccaaagaaaataaatcctctaacttactattctatgtatatccacagctcatgtttccatggctgctcttatcctttttagttttttagggggggggggagggggcgttaccgtggtaatcgccgaaaaccgcgtaaaattcacctccaaaaatataacatttttcatttaacctgttccaataatatttataataagcttttgtcaaatctaaaaccttttgaatggaacactctcattttgtctttacaatactaatccaatatgtctaatacaatggcatgacaagaagccgttgctatatctatcacccaccgtagtatggtaaaattaaaaactattgcctagccatggtcaaaggtacggttggcgacatggctgaaaggtttatttaataaaaaaattataaagctatatacagtttttactagagaacggttaaactgaagaaaatattattcattcggatgtaacaacatcagtgatgtctgaatgatacttatgtgcataattgaacctttatagtgtgaatgacaccggtattttttttagagaagaatgacaccgatatggtgcagtcgttgtcaatggtttttgagatagaatgtcctagctacatggttgaggcgcgatctatgcgaacaggtggtcagtactgctaaagaaacttctactatgtagccaaccaaaagttgccacgttacgtgctcaacacatattctataaagatccatgcatgtgacgaaaacacaaattgctaggtttcttttggttaattaaaaagatcaaactgaattttaaattttgagaagatagattgatccaattttatttgtttttatcaatttatcaatggttacagtaaaatccactcatgaacggtttttattctcaccatgaacggtttttattctcaccatgaacggtttttattctcactatcagaactagcatggtggcccgcgcaatttgcgcgggctagcatcattatattttctctcatataatagcatatatgttttctcattatattatttaaatatattacaatgacaacataattttaaattttgcaataactttacgaaactactaatgtgtaatattcatattgtattttatatacgtgttagttattaattatttttaatatcaattttttgttatttataaattatatattttcctatatggactctagtctcctcttctaatagtccttattttttaattccgaattttaactatttctaaattgtatttctatatggactctagtctactcttctaatattccttattttttaattccgaatttcagctatttctaaattgtatttctgtatggactctgctttttctttttctccgattaatgtgagaatttctaggtcatgagagcaaacgtggaggctcctttttattccgaattttagttagttttaaattcatatatagactctatactctacttctaatattccttattttttaattccaaatttctttttttttcttaattataattctatatagactctatactctacttctaatattccttatttttaattctgaatttctattatttcctgattgtatttctatatggactctatactctacttctaatattccttatttttaattacaaatttcagttatttcctaattgtatttccatatggactctagtctcctcttctaatattccttattttttaattccgaatttcaactatttctaaattgtatttctatatggactctgctttctctttttctccgattaatgtgagaatttctagaccatgagaacaaatgtggaggctcatttttctattcctttaataatataatagattgtgaacccaaccctgctccatgaaggctcaagtggttcattcaatttcactgtcatttcgtgcccactaatcctcgacgagtctctctcgcgtaccaattaaacgatgaggcgtacgttgacatctctttattcagttttttttatcggttagatttattcaattactatgcgacattacagtgttagttaaaatcatcttactcctggtttattgcatgcagccaatcatctgcagatataagcttcctatataaaccctacctctggactttgatcatactcattagctcgagacattagtcgatcatcataatgggaaggctaatcgtaacactgctcgtgctgtgcgccgcggcgactacgtgccccgcggcgcttcgcgggcacgacccccggcgagccatgcgcggccgcctcctcgccgacggcggcggcgcggtcgtgccgttccactggtcccccgagctctacaacgtggcgaacttcaccatcggcacgccgccgcaggccgcgtcggcgttcatcgatctcaccggcgagctcgtctggacgcagtgctcgcagtgcatccactgcttcaagcaggacctgcccgtgttcgtcccgaacgcgtcgtccaccttcaagccggagccgtgcggcaccgacgtctgcaagtccatcccgacgcccaagtgcgccagcgacgtgtgcgcctacgacggggtcaccgggctgggcgggccaccgtcggcatcgtcgccactgacacgttcgccatcgggacggcggcgccggcgagcctcggcttcgggtgcgtcgtggcgagcgacatcgacaccatgggcgggccttccgggttcatcgggttagggaggacgccgtggtcgctcgtcgcgcagatgaagctcaccaggttctcctactgcctggcgccacacgacaccgggaagaacagccggctgttcctcggcgcctccgccaaactggccggcggcggcgcctggacgccgttcgtcaagacctctcccaacgatggcatgagccaatattatccgatcgagttggaggagatcaaggccggcgacgcgacgatcacgatgcctcggggccgcaacaccgtcctggtccagaccgccgtcgtgcgggtcagcttgctggtcgacagcgtgtaccaggaattcaagaaggcggtgatggcttccgtcggcgccgcgccgacggcgacgccggtgggggcgcccttcgaggtctgcttcccgaaggcgggggtcagcggcgcgccggacctcgtgttcacgttccaggccggcgccgcgctgacggtgccgccggcgaactacctgttcgacgttgggaacgacacggtttgcttgtcggtgatgagcatcgcgctgctgaacatcacggcgttggacgggctgaacatcctgggaagctttcagcaggagaacgtccatctcctcttcgacctcgacaaggacatgctctccttcgagcctgcagactgcagctcactctcctaactaacattggctgcagcctgtgcagtttgtgcgtcagcttggctgtatatgtttgtgtggttgtcaggtgtgtacaactcgcatgtttatagccataataacgcagctagctaggcagcatgcatgcatgtgtgctgcgacatgctttgctttgctctcccagtgtctacgcattttccttcgtgaacctgcgtgcttgtgtgtggcatcctagtgtgatatgttacttgttagtgcaaataatatattcagtcgtgatctggacttgatttaattccgtcattcacttgatcattcccatatgtaatgttttattctcacggtctccttccccttattaatgatggtaaaattaaaattaattgctctattaacataaggctacaacttatagaaacagattgctcattcagttatcctgctaaaccacagttccaaaattaaatcagtttccccagctcgcagctaagtattagtttctcttgttcctatggagcaatcgtcattacgcaggctgctcatgagatgacaaacctgctccattatagattaaggtatacgttacactttgaatgcaacccattctgctcccgattggaaattgtattttgcaatcttgccttcataaagtccttaattggtgtaaagttctgttatctttagcttatttttactctactgaccccgattccacatgcacaaggattggtgggaaatacctcggagcgaataagatgggattttgatgttcttca

SEQ ID NO: 26684 - DNA, 8147 bp, Oryza sativa
aattcacaatagggttaatggcctattgggttgggagccaaattttggcatgcctaaaaaaataggccatttcaacagttaatttaggctattttggcttcaatccaaacacaattttacctttgccaaaattagccatgctaaaagttgccaaaatttgacattgataaaatttggtaaggccaatttaggccacaaaccaaaccaaccctaaaatttactgggagttaaattttaactcatgttgacgtggacaaatctcaggtgtctatttctcgatccaacggtgtaagatgagagttgtatggttgcaccgattaggtgattgcactagatacttctccgggctacccgtgccttcgggccagtacagcatgggccgactactggtgagccgtgcctgggcctaaggtgcagcctgtgggccggcacggcatggctcgaagtgccaaccgtgccgtgttagctcgatcgccttgggctgtgcctagccagtgtctgggtcgggtcgtgccgaacgagactcatggccatctatacattgtgcgtagaggtggatctttaacgttaacgagttaaagagctacaattaggctcggcttgtgcgctggctcgttaaattcgttaggcttgtttcatttgtattatattaataatttcaaatttactattttattatatattaacataataaaaaacaatactaactaataaaaaaactcactaaacacgaatgttttaatgtaaattaaaatactaaatattagttaagtagcactaagtatatatagatatggttatatcttatactaacaagctaaacgagtacggagtagataacatgctagcttgttaagctcgcgagctaaagattagcggccccatcatttcgcttatttgtgtaataaaccaaaagacatataaaagtagtttgtgaataaaacttttatatacgtgttcttaacgatctaaatgcaaaggctaaaaaataaacttcaatgaaaaaaacctcaaaatcagctctaaacatatggttgaaaaaaaaacaaattttagctgataagtataaacataagcgaaaagatgaagccctagctcgactcgactcattaaaactacaagttcaagtcaatatgagttacgagtttcgaggttttatccgcccctaaatatatgtgatagtacaatctcggttgagcaatgtggatggttggatctcaatcaaatgacatagttcagccttgatcagttgattgtcaggaaaggccagcctctctacgattttttttaaaataatactatattaatggaaaatattactgtggtgcttccatatgatagagattttagtcatcaacctctatgtttacaatttttcattaaaatattattatattatttcaaaaataatcctcttaatttctccacattccacagcgatctgtctctcttttctctgcgcttatctttgtgccttgaccttgacaaccaccattgccaagcagcagaacaaatctcatactatcatattctccgatgtgtcaacacttcagtagtattaggcccaggggaccttttttaggcccaggggaccttttactatcgggagatgggttagccctccccacggtaaaccctgttactgttactgcggttaaacctggcgaaactgacgagaaaagaatgccaacaacttttaccggaaattttattctttatttttataatttggtcgatataccagggtgttatcaattatcataccccgacgattagctcacaataactaccaatattgtaaaccctaattaggccatgcacgcaacatatcagaaccaacatataagcctgcttgtttgttctttggttctgcacctaaatttaaattatagaacttaattttagattaatttaaagagtatttcatctctttctatttttcagcattagcttttggagtacaaagtgcaaaagcatataattatggttgcttccgtcacttgtcttcagcttacattctctgtttttgaataggatattgcattaaacctataataatcaaatatttgcatttaatattacaatattacattaatatccaataatgaacttgcgcaatctggatgatcatatcgaagataacaatacactgacggacttgcgcaatctgcaggagtcaaggacacaatcatgcattcaagcagccaaataattcgtctactggaccacaattgcctcccagaaattaaaataaattaatcaaacgaggaacatgttcacaaataaaacaggctgtataaagttggattgcacggcgacgaaatattttatatctcgcatgcactaacctttttttttcttctctgctttcatttctatccgcaggattgagtgaagagaacaaattaaaagacagtgtgtactgtgtcttgtgtgcttgaactacgtcgagatgagacataaattctcctttgtgtatttgtgtgtcagcccgtgtgccattatacttttttgtcttctccttttgtgctaatctctgtacttagtgtgtgctattactgtactactgtactccttttagtatttgtgcctgagcttttatgatgatgacatccatttgttagtaactttataatctttgcgcccatcaggtgaaaagaacaggttgaacaaccgcagctcagagaatggcggctaaaaaaaaagaccaggacacaattaactaaagctaccattataatatccagactttcggccaatattaatacagatttcagaacaaatttcacggtaatttatacaaaacatttcatttctaaatgtaattggaaaaagaaaaacctctgctcatagagttccaactaaatgcatgggtggataaggcggatcacaccattttaatggtttcaattttcgacccctctaattgtgcttgctaatgctctgaaaaaaaaaatctagatcggccacttaataaatgtgaaatgtatcctgataattcaaagaacgtactaattaatgactaatgtgaccatctccttgactaaccatcaactataatcaacacgttcaccttgtgtcacgccggcgtcgtgggcgcgggcgccgccgcgatcttgccgtgctcgaggttgtcggcagccgcgtcgtccgcgtgcgcgacgtcgtaggtggcgtgcacgccgaagagcacgtagtagacgagcatggcggccgtgcagatgccgaagcgggcgtacgccgcggtgcccagcgaccccatcaggaagaggttggtggcgatggacatggccggcagccacggcaccagcggcgcgccgtacacccgcggcgcccgctgcttctccgcgcacgccgccagccccgccgcccccgccgcccacccgcagccgaacgccgcgtaccctggccaccgccgcgcgtaccgggagttgtagtaggccgagacgccgatggaggagagcacgacgagcgcgaggaacgcgaggaaggtgcgcagctgccccggcgtcgtcgcccccgcgacgtggtagcggcggacgaggagcgccacggcgacgagcgcgaagatgaagagcgtgctgatggaggagacggaggcgagcacgtcgaggctggagaagagcgcgacgcaggcggcgccgagcgtgacggcgacggtggcgtagatgggcgtgccggtcgtcgggtggacgagcgcgaagtacggcgggatcatgtgcgtccgcgcgatctgcgtcgtgtacctcgcctgccccagcgcgccgacgaggaggccgctcgtcatccccttgagcgcgccgagagccaccacgtagcgcgcccacctcatcccggccgcggcgaacgccaccgagtaggcggcgttggcgtcgatctcggtgtaccgctgcatcccgaccagcgccagcgacatgaggcagtacacgacggtgatggaggacatggacgagatgagccccaggggcacgtcgcggccggggttcttggtctcctccgccatggtggccaccatgtcgaacccggtgtacgaccagtacaccacccccgccgcgcggaacacgcccgcggcgccgaaggggaagaaggacggcgcgaggttgccggcgtcgaagtgggagaaccccgcggccagcacgaacgcgatgatggcgatgccgaccaccgacgccagcgagttgagcgtggacgtgaggcgcgccccggacatggccaccgcggaggtgctgacgagcaccacgacggcgatggggtccaccagattgaacccctcggcgagcgccgggacgtggatgcggagcgagtcggtgtctcggccgaagagcgcggcgaggtacgacttccacgacctcccaagcccggccgccccgacgacggcctccagcagtatgttccccgcggccaggaacgccgcgatgtcgccgagctcgacgcggaggtacgagaacgagccccccgcggaggggatctccgtggcgagctcggcgtagcagaaggacgacagcagcgcggagaaccccgccgcggcgtacgcgagcgggatcgccgggccggcgtcgaagcgcgcctcctggccggtgagcacgaacaccccggagccgacgacggagccgaacccgaggaacgcgaggtccagccacgacaggcaccgccgcagcgggttctcgctcacggcgcgcagcgtgccggcctccgccgcctccgacgagcggctccccacgcggtcaaccagccgcggcacggtggccgcgagcgcgccgccgtaggaccgccagctcgcgaacgacggctccgggaagaagtccgccttactccaccgccagtaccgccgcccactccctccctctcccgccgccgccgccgtcgccatcaccggcaacacacacgctgacacggacgaatggacggaggagaagatgccgcgtgttagctaaccaccaccaaccaccgacaagccatcgccatggaagagctggagatagtgcggcgggcgggtgggttggagagatcgatacgagaaaatcatcacaggataaactcgaatttatctatctacgcgcaaaacagaatcagctcgggattcaggggagaatttctcagcccggcgaaacagaatttcagagaagcgcgcgaactttacgcgccagcgccgcgccgccaacaagcgatgcatgccatcctcaccgtgcaggctactgctactacgaatctagacagcgcgcttatcctgattcatagaatatatctagaatgagtaaattgcgttgatgctaaagacctatctcattttatagaaaaccccctaatatgatttcttaacgtacacatatctcatttcatctttcttgacgtgatcctgatcgagaggtggctgcgttggtggcagttactactagaaaaagcatttttcccgacgtacgggtctcattttcgcaagcggacataacccttagagccaaataaccacctacaaaaatataaatcgaggtgaatgtgtcggtcacctgcgaaaatctatttttgcaggcggtcctttcgctggcgccgcttaagagatccgcctgcgaaaatagacttgactataaatagactttggatagacttaaattttttctaagtctcaaaacgcacccctcccctctcctcccctcggccggactatcccacggcggctacagcgcggggcggcgcgcggcgtccggcggcgcagggcggcagcggagaccacagcgcgagcggcggtggcggtggctcccctccccccctccctcccagatctggccggaggagggaggggggaggccggcggcggcggctacggcgcggggcggtggcggcgacgacggcgcggggctgcggtgacgacgacatgcgcgctggggccgtggcggcggctcccctcacccctccctcccagatctggccggaggagggagtggagaggccggcggcggcaactacggcgcggggcggcggcgacaacaacgcccggcgcggctcccctcccctcccctcttgcccggcgcggcgatgctggaggagggcggcggcgacgactgccgcccgtgatttttttgcccgccgcatgtgatttttttttgtttttttaatgtattttcgcaagcgagctgttaccccgattgcgaaaatggatgattttcacagtcgttgacttacaggcggtccaactctccgcctgcgaaaatcactttttgccgcctggaaaaatactttttctagtagtgggtgacgacgcagtggcggtggcagcggtggcgacgacaacgagggaaaccgtgcaactacatcgcggcggcgatgagggctccgtgtgccacactagttgaagccctaaaccaataaccaaaccaattcaagtccactagttgcaccatgagcgcactcacctagccaagttataaagtcaacgcaatttacttttctagatacatggcatggcattatactatgtccaatctaatttactttttatattttggagcagaggggtaactgcatctgccaaatttcacactcgattttttttaaagacaaaactaactttaattatcattaataatctttttaccctggctgcaaaataaaatctttatcacaaaactgaaattttaaatctaatgctttgaaatcattttttaaaataaacaaatttggaactttcaacttaaaatttaaaaaccttactcaattttcaaaactttcaactccaattttaaacctttccgtttaaaattttcaactataaaattggaactttcaaattatattctaaaaccttcgatcaatcatttatttattgttttatttcaaaagtgattaagcataataagcggtatgcctggagttaattacgttaaaaaaacaaaacattgaaatgagcgtaggtcaattaattaggttgtgtaataaggtctctcggatttaaatatttttttatacgggtactcgtatttatgagtaactattttttttttggtagaccacgtaggctaacccgtggaactcacttgcatactaaaacaagccaggaacccgtcctcatccagcagtccaggtcctcggcattgtgggcttgtagccatccataagattgagatgatgaccggcagtcgcggtgtggagggagccctgcaaggctgcaagctggagcgcaatgcggcagccatgcatgaccttgagctcggaggcctcgttgcgggggtggtgaccgtgaagtggaggcctaccgtgctgatgatgggatctgccccctctcccttcgctgcaactagatccacccccatgagccccaagtttcgcatctgcccgtcactgccgactgcatcgccctgagctccgcttctgtcgatcaacgttggtcccacacctcgagcctctgccaccaccaaaaggctgctaatggaggatatccatatgtggaatgatagggtgacccgttcttggcgacgaagatctagcaatgttgatggttagcccttctttgtgatgaaaggaaggaggaaaaaccgagagggtgtggtgaggaataagataaggaggccaggaggggaaaaaatggtggcggcaatgtacgagatggaaccgaggccaaaatttgtgtggggagcgtaaaggtcggaaacaaaaaaaaaaccgccacggcaggaaatggggggaggggggagggggactcactttttcttaaggtcaagttccaaccctccatctaaaatggtgtttatggtattaactacattgtcatgtaggacttttaacttatgtggcactatattaattaagagagagagtgaagagaggaagaaactagatctcatgcaagagacagcttcaacacgagaacctatacactagacactgtcaagttttacattgggagataatagtgtcttcataatagatgaaaaataaatatgattggtagagaagagagatgatgtatttattaatggcccactttaagaaatcatgggttgtggagtgtagtttctattgtgatgttttattgacatggcaccataaacactgcttatagacactatgggttgggactgccctaatgagccaagacaggcttattagggaataaaattaaatttgtaggtaaaactttgagatatcagttcgta

SEQ ID NO: 26685 - DNA, 1400 bp, Oryza sativa
ataggtcggatatagatacaaatatgtatattttctctcgaatacgagtacgagtatgatatcgaagtttccatcagatatggataataattcggatattcgataaacagtactatttggatatccatagaagccataagacataggagtacctaatttcattataactctatgaccttcaatatacattttttagattttaatagtagttcatctcttaacactagtccacactattaatattatttaaatttttaaaaatatttataaattatactatattttatataaaatgagctaattatatatagatatttgtttctattagaagttgagttagtttttgtgttccgagaaaattttgttgccgtattcatgtccgatcatattcgattcttattcgtattcgagataattcatatttgtttccgtattcaagctatctatattcgtttccatatctggcatataaacgaatatggtatgagtattatccgtctgtttatgttcctaacgacaagtatgctcgcagggcacagacagatttgggggctaatccatgggcacaaccacaatccatggattggccttctttgtcaacctgcatccacttcagcccaaaccgtaattcttcataggccagaccgctccactccaaaatgaaatcttagcccattcaaaaccaaccaatgtgatccaaatgaacatccactacacttaacccaaacaaacccaccctactaagtaggcataactacaacacactgcaattccgctctcgcttcactaaaaagtttgagcttggtgttacaagccatcaggcatccatccttacaaactagtgcttctctagttggctggtgaggtgggaccataacatcagttacgttgtttctgctgccgactgcctgcatgattgctgctgatcggctggatggcccaaggcccgggcctgccgctgcactagtgtcactgcttgcactactgctgccttacgctggcccaaggccaaagcatcccaaccagctcaacaactcttctattaactcttttttcatttttgttcttttcaaatattgtggagcgatacagatacccatactcaaagatttaacgtccccgtcgtctatatccgagagcgatcgatcgctaggggcgattagatttctgatttccttttttggcaccgcattactttcctattttagtaaatttatacacttaaaatttatacacctcaagtttatacatctccacaaatttttttacaaaaacaaaaagttagaaaaatttatgtatagaaatactatatataaaaaatttgaattcaaattcaaatttaaacctgaatcgggtatgtaaacttttaacttataaactttgggtctataaactttagg

SEQ ID NO: 26686 - DNA, 15110 bp, Oryza sativa
agggggcatggaattttgcaggcggcccccttgccgccctgggggagggcgatttttgcctctccccctataaagcccagcccctcctctgtgaaatttcattatattcactaaaaatacaaaaaaaacgaaagagagagaggggagggcagcagaaggggagcggcgaagccctgctggttcgctcaattcatcacaggtatgctcccatacatcttttgcatttgtactaatatgttatgtttgagtatatatgttacgttttagttttagttccatatattttagcacatctgtagcacacagcacatatgtgtagattcagagcatagaatataatagtatgaattgagacatagacagtagtgttaattgtaagatgtagtttagtttgatctggagaatgtaacgtaattttagaaatttagagaacaatattgtagagaatgtaacttagggcgtagtacagaaatgcgaggttaacgcagttattgttttcatcaggcacaatgtcaagtaaggtcacatttcagatagttcacggtgaaggaaatattagatttggtccagatggtgttgatctgtcagattttgtaatgacatctaagggcatcgataggcctgcggagagaacatttcagtcaatttatagttggttgttgagaggatttagaatagaccaagaagtctacacaatgtcagtgtcagttgtagtgagtcgtgcaacagaaggttatttttgggaactaatgccgatggacagcactgatgcttggagacggtatgtggaaatggcttttgaacggtcatggcccctcgttatatttgtgtcggtacaagagaaagatataaatgtttcaatgcaaaccgaagatgtagagggtcctatcaatgcaggggatgttgttggaccatcgatgcaaaatgaggaaaatcaaccaagggaggagcaggctatgggcatggcggatgagggggagagagtcggtataattgttgatgaaatggagagggaagattcggataatgaggaagtggacgacgacgcatcatccgatgaggaaggtgatgtaatggccactgattgggcaaatgaggacttctctggacttgttatatcagagggtgatcatgtaccctgggagtataaggagaacgaggtaattgagggtgcaaggtatgctcataaggatgagatgaaggaggcggtgaagcattgggcagtttccttgcagagagagtttagggtggtcaagtcaacaaattatgtgtatgaagtgaggtgcatgaaggaagattgtccgtggcgtgtccatgcatataagggtaaatggaatgattattggaaagttagcattgtgaccgagcacaagtgctacttacaaggggtggagaagtatcaccgaaacatcacttcagcttttgtggcaagtgagatgtacagcagtgttgttggtaacattggctttgaaccaaaatcaattattaggcacatcgagaacaaattcaagtacaccataagctatgcaaaggcctggagagccaaacaaaaaatcattgagatgaggtatggcacatttgaagcttcttatgataatttgcctcgtttgttagccaccattgctcagaggaataataatacgtactatgacctacatacatttacatcggttgatgatcgaacaaagagtgtgctgcaaagagcctttttctcattgggtgcttgcatcaatgcttttgtgcattgtcgacctgttctatgcatagatggaacttttatgacaggtaaataccgaggtcagatattgacagcaattgggtgtgatgggaacaaccaggttctacctatggcttttgcatttgtagagagtgagaacactgaaagctggtactggttcctagagagagtgcacattgcagtggtgcgtatgaggcccaacgtttgccttatacatgatcatcatgcgggtatgttgcgggctattgactacttgcagaacggttgggatgagaagggacttccagctaagtggcctgatgttcggagtcggtggtgcatgcgtcacatgggtgcaaatttctacaagcaattcaagaacaagcatcttatggagctctttaagaggctctgtgcacagaaccaaaagaagaaatttaatgagttgtgggacaagttggattagttgacaacgaagcaaacagatgagcaatctcgcagaccactagttgaaggtgacgagcctcccatacctcttggtgcattacatgatgacccaccaacaatgagaaggaggtcagggtcgtccatcagaaatttcactcagtggattgagaatgagcctaaggagaagtggtctctatggttcgacaccgatggatctcggtatggcataatgacaaccaatttggcagaggtgtacaactgggtaatgcgaggagttcgggtacttccattggttgctattgttgaattcatccttcacggcacgcaagcgtactttagggatcgatacaagaaaattggtccgtccatggccgataacaacatagtgtttggcaacgtagtgacaaagtacatggaagataaaatcaaaaaggcacggagacatcgagttgttgctcaaggcacacaagtgcatcggtatgaaataatgtgtgttgataggagcaggcgtggtatctatcgcaagcaagccgtgcaggaatgtgtcttgaaggcggatggtagatgtacctgcagttgtatgaagccgaagcttcatcaccttccttgctcacacgttcttgctgctgccggtgattgtggcatatctcccaatgtgtacgtctcaaattatttcaggaaagaagcaatctttcatacatggagtgaggagatatatgggttcgggatctcaggatcttacacaacgctgagtgcccaagttttttacattccagatccatctaagttaagggtgaaaaagggtcgacgccaaactagacgcatcagaaatgatatggatgagtcagaagcaggtgggaggactttacgctgcagcaagtgtgatctgcgcggccatacttacaagaaatgcccgaagaatgcagaagttccaagcggcgcagatgctagtccatctggacaggcaagtgatggtaggcgaccacctggtgaaggaacaacaagcaggcgcgcaaggccaaggcgtcgtcgcgcagcaggcgattccatggtgtaacaatgctttcgatttaggaaataaaatgctgttgtgatgtaatgagtgttcggactaaatacttctatcgtgtaatttcaattcaatgttgttgtaatgagtacctccgactattgttgtactagtagtattgcgaactattcggtgttgtatcataatgttatcgtgatgagtgttcggactaaacacttttttttgtttgtactcttgtttaatatgtgttagtaattcgcttatgaacatttattacttatgttgaactaattatttatatgtttctgatcaacctatttgatgcaggtatggcgtacgacacaccggcgctgttgaaccgtgggattgacaggaaccaccgctcgttcctgtcagcagtcgagggtgcacagctcggcaccttccgtccacgcacgtcgcgcgagtggttgcgtgtcgacccacgtcacgttccttggtacgcgtatgttcacatttcaactcaactttgctttgtgttgtacttatgtttgaagtttgctctatacaggttgcgtgcggcaggccttctaccactttgtaggcttgttgaggcggcggcggacgaccgtgacccagcgaagcggtgggatgcagaccggtcactccttgccgctcttgtagaccgctggagacctgagacgcacacgttccaccttccctgtggggagatggctccgacactgcaggacgtgtcgtacctgctcgggctaccgctggcgggagcagcagttggtcccgtggacggtttttttgggtggaaggaggatatcactgcgcgcttcgagcaggtgatgcgccttccacacctaggaccgaccaccacccttcctccgtactctacagtcgggcctagcaaggcttggttgctccagttcactgtaagtaaataagttgttattatcatacgtgcttatttgcgaccgaatgagtgttttgtactaacatttcattcttaattgtaggcggaccttctgcaccctgacgctgatgattactcggtccgacgctcccttgaggcgtacctgttgtggttgttcgggtgggtgatgttcactagcacccacgggcacgctgtggacttccggctggtccactacgcacggtccatcgcggatgctcagccacaggacgtgccgcagtggagctggggttctgccgtgctattagccacgtaccgtgccctctgtgaggcgtgcacgaagactgacgcgggagcgatcatcgctggctgccctatgttgcttcagctttgggcagccgagaggtttgccataggtcgaccagtggtggacagcgcaccctacggggttggtcgcagcgcgcagtggccagaggacggtcccacgatggggacttactggtgtcgacgtggggttagtgcaacttcgctgcgttataagtttatcagtcgtcttttttttttcttcacataacatgtctaattccgatcatgtttattgcagcgtcgttacgctcacgtccaggtgagacgtggttacccggacttcgtgttcgagtttgaccgtctccagccgagcgacgtcatctgggagccgtacacagaagaggccgtcgctgcgagagcaccgctaggactttcgtccttgtgcacacgcgaccaggcttactggctcaccatcctgccgatggtgttcgacattttcgttgagcctcaccgcccgcagcgtgtgatgagacagttcggacttaggcaggtgtttccgggcaacgtgcagccgaccgtcctccctgccgaccactcgtgagttcggattgttcatttctaaatttttatgataattacttcatcgagccatataatttacctctcttcacaggttgactcgacggggacagctagcaggcgcactttgggctccacgtgtacagcagtacgttgacgactgggtgttagctacagaggaggtgatcaacgagctcttcccacacacggaggagaactactgtgagtaccttcgctggtaccttcctcgcactcgtgcgcgtgtgaccttcactccagacgccccagagccgcacgttgccgctgtcacggacgcgtatcccacgcaccgtgaccgagactacttcgtggcggtacgtccaatttgtattacttcttacaattatttcatttatcttgcataatataggacaactactgaatttgttatttccatcttgcataggctgatgccgcacgggatatcagtgccgatatcaccgcagtccaagtgaggttgaacagaggtttgcacttgactgacgttgagcagagggcgaccttcgaccggatgcaggagaagatgcgtgcggtcatgcgcgtcttctcctgtcgcagcgccgtggacgtcgtacctccagctggtccggtacaaccacggcctcgcgcgcctaccgtcggagcaggacctcgacctacggcacctattttgcacggtacagttcagcccagatataagttcatttttgtttcagcttttgcacgattatgtcaccatgttttaactgcacgtttcctcatcgcaggacctcgtctgccttcgagcgcgttcgcaggcacgaccggcgcttccacgagctccgcaggggcgttcgccacctcttcgggcgcgttcgccagctcttcctctcacggagcgtcgatccctcgcccacacggtactttactttttattaatactgttaattacctgtacgaaactgatggtccttgtccagcaggatttgcagccgggatcttcggtactggggcctcttcgtctcacgccggtaggactggtcctactagccagttctacgacgacgacttgcacggtgcagaccaccacgacgtactaggctcctctcagcttggaggagctccagaggcgcacactcaggagcagccagaggtcacacctgtacaggcaggacgggttggccgtgccgtacccccggaccgactcacgtactcccacgggcacgttagggcgcagggtaggagggacaggggtaagaggcctcgtcagtagtgttctacctcttcagtccttatgtgaccgtttcttttggcttacaaacttgtaaagcagtactacttttgctattactactgcagtactacttgtgtttgtctcgtctacatagttcttttcattcatatggtgctagaacaacttatgctcacgacaacacactttcggcgctgcacggtagtgtcagatccagtagcgcgcacagtccacaacagcacacatgaaaagcggcagctcgagttatcactatcaactttcggcgctgcctgtttacataaagtgaatcacgcccacgcgtgatcgtcttgtcacatctaatgaataatgtatctcattgagttcacatatattgcagtgaaaacgacgctatataattgacaatctgaaggcaacctcttcatatcttctttcccactatcacacaacacacgaaaatgaaagcctattcattggtaatacgtaatctagatttgagattatgtagaacattcttcactacaattttacattttggcagcaaaccaaatatgatcaaatgcaattttaccttaccaaatatttggtcgtgaagaaaaatttggcactaacaatccaaatatgccctaaaaattaataaaatatttgtacggtaaaaaaatatttgtacggtaacaatccaaatatgccctaaaaaataataaaattgtattttaccagtcttggagattttaatcttgtatagttttcaatataaaatgatttgataactattgatatttatacaaaaatatagagcacaatacaaaatcgccctagcggagggcggcaagggggccgcctgcaaatttccatgcccaccctcgccgcccatttgcaggcggccccccgcacagtacaaaatcgccctcgcggagggcggcaagggggccgcctgcaaatttcgttgacggccgtcgcccgagagcgaacggccgtctgccacgtcattttcgccgccctctgagagggcggtaggcgactacttccgtcaattttcaaaatggaaaattatttttgtaaaacttttaataaaaaaaattaaaaataaaaaaaattcgagcgcgactgtgcgagatgatcaggaggcaggtgcctcgagcgtcgagtgcgtgcgtgcatgccggggagcccagatggtgatttctgttttgttttgaatggaacgtaactcctgtgacgatatctgaacgcgttatctgaatggaattactccttctcaactatcaagggaacagtgccatgcagatgtgcatgcctgcatggtcgcatgttgactattgttgtaccatgcagatgggcgtgggcgcgtggccgcgtggtcagacttcagtgtgcgtgcgtgccgttgccgttcagtgtgcgtgcatgcgtggccgatcgacgtcggcgcagtgcggagcaacaggcggcggcgggcaccggcgcgctgcgaagcaactaggcggcggcggcggcaaggtaacaagtgggtcgtgcttgggccggcacggcccgaacagcgcccgccgtgctttgggccgtgcttgggtcctttcttctccacctcggcctagcacggcccggcacgattagtaggccgtgctgggccggcacggcctgttctagcacgaagcacgatgggccaggccgtgctagcccggcacggcccaagtcccagctcgtgggtccagatccacgtgtcagtatctactactacatcaagataattctcattgtagtaacacatgatttagtcgatcccacctgtctagccatatagagaagcactagtgataaagatggatgccaatggattgtaacaccgagtgcaaacattttacgtgaaatgaggataagagcacaatattaattcaaacaaaaatatgctgtaaaatttatgcgatgcaaagaaacccgaaaagggaccacaatgctagtatacatataggtgtagaatgagggcatgcttgtccttcttttggacaatatgtccaacccaagtgcccaaccataggagaggtcactttttctctctatgtcggtggaggctgagagtctatgcgacggcaaaaaaaaaaagtgtgtctttagctttcctctgttcgcctcccttccccctctgtcttcggtggccactggtcatcgacaaggggaggggagtccagtgggtggtcgggttcatcctgcagttaggtctatcccattatagatcgagtttatctcatgttaagatttcttctttccctttcatgcacagctcaagggagatgacgatgtcttcatcctgcttgctgtcttgcatggctgagaagttatggtccacaggtgcagccgatatgtcctttggtggaaggtcttcttcctccacaacggcaagatagcaccggcctttcagaccaactccggcaagtttattcctaccgatttgatgtccttctttgtcttcaatggtgtgttttcaaggctagactgatttttctcctatttattgaatctgtttcaacctctacttataagagacccccgttggatttgtgtttcgatactatcttttgcggtcaacctcgttctcgccatcgccactatcgactttattgttttggtcatcggatcggaagaagaagcaaagtaagtacttgattgctttttaattttcttttagagtccttctttgcttatttttaggatctctatgtaatttgtttatcttctagaggtctttctgcaaattgtgatgtatgtctgtcttgtcctattgtgggcaaattaatcactatttcttctagagatgttatcatccctcgtgaattcggatcaggtgtagtcacactagtgattgcaagttaacaactgcacgcaactttggccgtctattttttgcgatcaacgggttagatcaaagctacagtagccatgtgaacagtactctgtgctacagtatttattgctacagtgttgtcgacggtacaatgcgcgatctaggctgtccagcttgtatccaacgatgcgtacggctattgtttaagttgcagtcactattgtgaccgcacctgatccaaatccatcactcatgtatgtctagtttatatatatatatatatatatatatatatatatatatatatatgtaatcttctatatattgaataaatgcatgggttcttaaaaaaaaagtgcccaactatctctggcccaataaggattaacgtctgatctacatgctgctaaagttgattgggattttcatttaaaaaacaaaggcatttgccgcaattctgtaaattcgtctacaagacaattgtcgctgtcttgatggagatttttgccacgttcgttcgacctgaaggcaatgtcgaactgctttgttaaatacacgaaatttatgaaatgtaggtctaaacttaatagtagcaaaggtcccaactgtttaattaacacattgaaatatacgtctaaattcaattgtagcaaataaggtcccaactattcaattatcccatgaaaggtacagttgtccaaatcaacgctctactgatcgatagatacattgatccgatcatttagttgtctgaagtggggcagtctatgggatgaaatagtgtagcaaatgtataggactccgatatatcaccaggatttaaaagttaaatgttgtttcatcctccgttcctattttctctacggatctagacatgctttaagaatagctatatatactatttaaaacaacagtagtggtgcatggtgtctattctgccaacaccgccgcatctgccattgacaatatatctgggtccactaaggcagcacgaaaatattgtggcttattaacatataattaattgagtattagctaaaataacttgaaaaatgaattaatatgattttttaaaacatttgtatagaacttttttttaaaaaaaacacatcgtttagtagtttcaaaggcatgcacgcaaaaaataagagagctgagttgggaaagtgaaaaaaaaaacttgagttgggaaagtgaaaaaaaaactcagcttaattagtgaaacagcatgtgccaccagcgttgtggaaaacggttgatacggccgctatgacgcccgttaaaacggtgacggtaagcagtccgtcacattagtcgtccaaaaacgcgtaattcctgttattaccgattaatccagcgtttttccgactaatcggccgtattggcagtatataatcgggcatgatcaaattcactgggcccagctcacgcacgatagcctatcctgttagttgtcttctctcgtactcctgtacagcatgcatgtactactatattaatctctttgaagaccaaatatttttcaaatgcactaatactagtataagatttcaataacgtgtaatgcaaattatcatggtattattatatataatttgttatggcagcaatggcaggcattatgaactgaacctaccactagttaatgcataaatatgcattatgatattttttgcattattaactttagtacgtgtatgttaagttaatgtcatgttatggttgttctatttaaatatatatactaggaaactagaatgtgttcatatggatttaattacctctaaaaggacaaactattattaactatgtacttatatttgcaaaacgttaaatttccgtcatattccgactaatcatccgtattccgattaatcgtttggcagtactctccccgtccgacatccgtatttcgtcttccataacactgtgtgccacttgattcaaacgctcccaatttcacggttgacccccatcccgtcttcgcagtttctcgccgtaggccgcaatgcttcgccgtctctcgaaaagctgcatgctgcatggaatcgtagtgcgacacatgggcaatgccctcgctggctgggaattgtgcgctcttggccaggaatcgtcgccgccactgccagccaccagccatcaacatcgaacctgacacatgggccctatcagtcagtcacccaccctcctagggtctcctcctttgtcaggcccatgaggctactacgcggtgcccctgttccccagcacagagctttgagtggcggcgacaaccaaaaaggactgaacgcgaagaagaatgatgccacacggagcttcccgtcgctatcaccatcgagctccttcgtgtcgtgcctgagggaggtaggcggcaactctttagaggatgagcggcggagacggcatcctgatctgccccagcaccttggcgacgaggagggggacggtggatggcggcacactgaagagtagggaggcggtgtgaacaagaggcggcggttggaagccccgagctctgtcggcctatgccacccaaatccgcaccgcttcgagctccattggccaactccacttcaatgttcaaaatagctggctatggcttttagcggctggtatctgtagaggctaagaaaggctatagcgggctatagcgccgctaatcccatttagcggttttgtaattgcctgacagaaatcagtcaagaattatgcatataaacatggaatcaggaaaaaatcatgaactaacatggtccaagttctaatcttccatctatctaatcctctgtctatcctcattgcctgacatttgaaaggagcaaaaggaacaatactaagtttagaagaagaaaagaagaaaattaaacttgcctgtctgacttgcttgttgctccggctagggcatggcgtcaaaactcaaaactcgaaagaaacttcttcctcagcagccccaagtcgcgagtctacaggtcgaggccgtcgctgcctccgagactctaactccgcagcccagccaccaaagaatcgtgtcgcaggtcgacgtatatcacaggctcatggccgctgccgccgccgccgccgtcgccgctcttttgggggagaggagaggtcaagaggattgaggaatggctagggttgctgccttgctacttgctagcttgctcttatacctcccctttgggccaccagcgagacttggagaaggcccagggcctgctctggattttggcccaagcacaaattgcaaactgaatggcgctaaatgaagtgtaatttagcggatttagccggctaattgctgctattagcggaaaacatcgtttagcgtcaaaagctaactatcctcgctatatcccgctatagcggtggctatagccggctattttgaacattgctccacttaaacccccgtgtgccccgagcttgagagtagagaggttggtacaggatgaggccaccggtggcatcgcatctggcggggtggggggggggagcagctaaacaaacaagagagggaagaggaagataataatggcgaagaggacctagagctcacacatcccgatttgtgccccgccaggagctcgtcggtcacgccctggctcgatccgcgccattgggagctcgccaccttgaccacccgtcaccgtggacctcgattctcctcacctccacgactgtcgccaccccactccatttgaattaaaaccaggtttcctatggaatccaaccaatcctttcattcataattttaaatttgaacattcattcggtaaacggcactaacaactgtttaaccatttttgggtaactgtttgttttaagaaccgttatttttaaccttgtctaatagtagacctaaatggtgcacatgatttaagctgcgtaatttgttgccaagtcgatttactaccctataaactcaaaattttttgctatatgtttaaaaatacccgctgcaaatattttgtatttatgtttaaacttttcttttagtatttttaagatagagggagtatatcagtaaatattagtatgcattcttatagtgtagatgctctaagttatacatcttttataaaaacagtattaattaataaactttagtagagaaccgtaaaaaaaaaatagtagtgcactaaatctatctaatgttactcccaccaaacaaaaacagttactcgaagaaaagattctctagcaaacgcacacaattatcagtggaatcttagtcagtacaggcaagtgtgcctgcccaattcggtgcatcaattgatgcccataatacagaggtatggcgactgtttcctgagctcaaattaagtcttcctggtcccacgaccataatatccttaactgtcctgcaacaagataacactaaacagcagtactgtttttcttctcagcatgcaactgcgatttgcaggtttgctgctagcgaacacttgcagttagcccctcctggaaacgatgttttgcagttggatccttaaaaactataggacatgtacggcgggtgtgtgccagccgtaaaatactaaaatctatccaccccctggtaaaatctatccacgtcaattttcattgacgtgggagagagtttgtgaagagagaaagtagcaatatgttaattgtccaccgtaagagagggaagggaggtgttaaggatgataatctccttgctgtaacctagcattcctatatccctatgtttgttaggcggtgttctaaaggggcttttaactatttaccacttttagatttggcaaataactatttgccacccctatctcaatgacatgtgggtccagtggcaaaaagttaattgccacatctaaatgggcaaatggttaaatatctctgttctaaaggctatgtttccaactttctttcttcgttttcacacacatacttagcaaactactaaacagtatgaaattttaaaaattttctatatgaaagttgctaaaaaaatactccctccattttttaatagatgacgccattgactttttgacacgcttttgaccattgtcttatttaaaaactttgtgcaaaaatataagatataaatcatattcagttgacggagcgtggggctcctcaccgggagaccgcgcaggcccccctttgccggtccggccgggggccctgggtgagattctaagctcctagtctgtggaaagttcgcgagaatggaaaaagcacaagacacgggcgaagtatacaggttcgggccgccgagaagcgtaataccctactcctatgttctggtggatctgtgtatgaagaagctacaaagagctggagagccagagagctcttactctagaaaccctcttctcccttttttcctctcgtgggatctactctccagttcctctctcctttcttcttttcgtccccctctcctaagtgggcaaggtcctccttttatatctcaaggggataccacatgcaccacctctacctatctctctttttggttggggacttatcctatctttactccaacttggcttgccttctctagaaagctaaaaacactgcttgtttttgagtgtggccacgcgtcctcactcgtctgacctcggggatcaccctgtcatctcttcataaatgggcggagacttgcaatggctgctgtccgaatgaccttctgatgggatggcccatacctacctccactccgccggaagcaggtgcaacgtgggaacatggttgtctgccgacgacatgaccagtgtcagaccggtcacaaatcggtcattcttgcccaccacgtgtcagtctagcaatctgcatgctcgcccttcttcatacaatatcttgcttgtaatggttaggatgaagcctggcatatatctgaccgggaccaacgtgccatctccaggagctaacacgccggttccggctagggacgagtgcttggaggctctcatcctgacgggatggggcgaggcgtgcgtcagaccgcctgtcgccacctaacccacgatctgatcggtctgtgaccagtcacagaccggataaacgagcgca

SEQ ID NO: 26687 - DNA, 26254 bp, Oryza sativa
tcggggccgacccccccgagggggtcaggccacgtgggtgattgctcctgcccaaacctctagtcatgatactcccggtcccatgtcaccgacattagtgataaaacaaatcacaataaaatatactataattatgtaaattttttaataaaatgaatgatcaaatgtgtgttcaaaatcaatggcgttatctattaaaacagagataaatctatttttaaacattttttcataataattaattaatcatgcactaatacatatttcgatttttcgcgagggtctgtaaataagatgtgctgagtgcatggtaaaacaaaaggtgaaatctagcacaagtgatattgtatgacactcctcgtgggggaggtctcatgtgcacacaatgtggccctcatcctttggtcaaatgcagataatacgtcatacggtatattagaaagaaagtaatttgcagctaaaaaatttatatatgtgttattagtgactttaaatgacaatgctgaaaaataaaatttgataaaaactttacaatcatctttttaaaatttaaatttaacagcgattgatgttctatagagaacgatagaggcttgctgtgcagacgcccggcacgcgaacgccatcatcgtgctcatgaattaggattctctatcttcaaaatcaaagtcacgtgacatttatcattgacatgtaggctcgacaaaccttaaactgatcacatgttagtggcaatggtatcaggagggtttggttaactaccacacagtttgttgagccttatcacaaatttttggcagattttgcttcatcgatacagttctggtacgccaaaatctttaattcctcatacaaacatgccatgcacctctattactttaattatcacactttagctataactaagtttcgtatggtgtgatattaaatacgagtagatcgaccaaatatgcatcgaagcattttatatttaggaattaacgcctttgtcttctatatcctaaaacactttaatttagtttgaaaactcaaaaacaaggatttatcatttattccctcagtttcatattataagccgttttgattttttttcctaatcaataatttttaagtttatagaaaaaatatagcaacatttttaacccaaaataaacatattatcaaaatatattaaatattaatttcaataaaactaatttggtgttgtagatgttaataactttttttataaacttgatagcctgactagaaaaaagagtcgaaacgacttataatataaaatggaaagagtaattataaagtttagcctacatacttggccttatttgtttcagcttaaaattattataatccagattattgagtcagattactataagatgcattataataagttgagatagaataagctatctttagattattagttgtttgttagctaaaaaaagcacctttaaagtggattgtaataatctattataataaactatttgtttatttcagcttacacctaataatctattttataataatccaagggctgaatcaaacagggcctaaatttcttgggacattgtgcaagttaaaaccattactttgtaagcattcttcgtcatctccagtaagcttgatgtcctcgccaactctaatttcttctccgaagaggatgacagacattcctcggagcacaaaatcaccatgttcttctttaggttagttggatccataccactacaaatatgtcaaattagaaaaatgtcactactattcacgatatcgatttggtgccactgaaattttataaaattgtaaccatgccaccgtccactttcctgtcatcctcgttagatccacattctcttcatctgtggcgtgtgctttgtcaacctcatcggcttcttcaactccggtgtcaacgctggcaagtagcagcagcaccgacacacgggggagaacaaggagagctctgcgtccgcggcctccagcggcggcgtgcggctcggcctcctccctggcacggaagaaataagcggaggtcgtcgaccatgacgacatggtcctcgtcgtcgtcgcgcctggacagcagctcctcgtcgtcgcgcgtcgccactaccatgcccccatgctccagcccatcgatgctccacgagcaaccaccaccctcaccgcctcttcccgcactgacaagcgacgagcgagcggcgggacggatgagccatggcgggacctcggtagctcggtggtggcttctctctcaccagatctaggcagagatcccaacctgtcatcatcacgctcatcgatgagctcgagcggatgcgcgtcctgctcgccgctgccctcgctgaggagctctcctcctgtcccgcccctcccccatctatcgctgtgccctccttctccagcgccgatttgtctgtcgaggatctcctcgcgctcatctcctttggctccctcttcgaccgtccacgaccaccgcgtggagtcgtcgccatccacgaccaccatctagccttcccggagctcgctggctagcctccggcgtaggcttgctgcttgcagacgaagacgacaaggagacgaaggccctgatgtcagaaaatgtgacatggacaacataaattgcgatggagtagcatggttctaattttagaagattggtgtggcatttacctgatatcacgaatagtagtgatatttttctaatttgatatatttgtagtggcatggtgaccatggatttcaaatgcaaatatcacaaatgtagatgccttttatggaagatttccccccttctcctcttcgctttcgctgtcacagatagaactaaaacacctaattcccccaaacaattccaattccaattccagctcaatgctgcacggaatctcctcttcccatcccccaaaactctcccaaaaccgcgtataaaaagcgagctcccctatcaccttctccatcgcatcatccctcccccaaattccccaactccgggcctccggcaagccaagaaacccccaacccaactccggcgatggcgtcgcagctggtggaggagcaccggtcgggcgcggaggtccacacggggcacgagctctgcgagcggaaggcccgggagctgctggtggagctcggcctccccgacgggctcctcccgctgccgtccctggaggaggtcgggtacaaccgcgccgccgggttcgtgtggctccggcagacccaggcgggcggcgccacccacacgttcgacaccatcgggaagcaggtgtggtacgcgggcgaggtgacggcgttcgtggagcaggggcggatgcacggcgtcgccggggtgaagagcaaggagctcctcatctgggtctccatctccgagatcgtcctcagcccctccggcaccaagctcgtcttccgcaccccggccggcctcggccgcgccctccccgtcaccgccttccagctcaacccggcgcccccggagccggagaagaaggacgccgccgccgccgacgaggccgacgccgccgccaccaactgatccaagaagacatgggcgttgcgttttagcagcggtaagtaagtagtgagatccgggccgtcgtggtgaaaaagattgtagttgttgttatatgcttggaattcgtgagcctacgagctcgatctgatctcccatctctctccagtctccagtgtgtctgtccatggatgatgctgaaataaatatatgttcttgtggattcctaattgcagtttacatttttgactgctatgctattgctctgccagcttgatcgatggcttggtgatctagcaatccatgcgaatttctcgccgttctttttgtggattgttatagatttgataatttggcatatattgtcataggattcacaaaaaaaaaaaaaacaaactgtgttttttttttgttttattatttatagaagtggcagagagtaccaaccaacagccttgaattgaaccataatccagcaattaaaaggcaggcaagagaggcatggggtctcccctctccccatgtgttgtacaggtagaaggtagaagttgttcatctaatccaacggctgtgcgtttcttgaaaaatcaacggccgattgttctttactcaccgtcaccttttttttttttttttttttttttttttttgctatttcacggtcatccttgcttggcttgtaatgtaagtcaggccctgtttagatcggactaaaacttttaattccctatcacatcggatgcttggatactaattataaatattaaacgtagactattaataaaacccatctataatcttggactaattcgcgagatgaatctattgagcctaattaatccatgattagtctatgtgatgctacagtaaacattctctaattatggattaattaggattaaaaaatttgtctcgcgaattagcttttatttattaaattagttttgtaagtagtctatatttaatactctaaattagtgtctaaatacagagactaaagttaagtccctggatccaaacaccacctcacggtcatatattccctcccacatactccctccgtttcacagtatgaatgtggaaaatgttagaatgacttatagtcagatttgtaactcagattagagtcgaccaatgctggttagatttgcaagttagggtgtgtttgaggagaaggagattgagaagattgggaagatacgcaaaacgaggtgagctattagctcatgattaattgagtattaactattttaaattttaaaaatggattaatatgattttttaaagcaacttttctatagaaaatttttacaaaaaacgcatcgtttagtagtttgggaaacgtgcgcgcggaaaacgaaacagacaagctcactctcccaccctctcgagcgctgccttaatggctttgtgttggcagcatgatgcatgcactgtttgatatgatagccaacagttgcttagttgctgtagtgaaagaactagttacaggctattgcgcagcgccgtaaagagctgcccaacaggccgagaattttcagaatatgtcactcaatttgtaacactctcagatcatgccaccaaggacgcgaattgtttcattccgtgtcactctgtccctctgaagcggagcgccgtcgcccgcccgtgtcacaacgtccgtctgagtcgggcaccaccgaagagttcctcccccacgccagggagttcttccttccatgccggcagagctctccccaccaaggcgagctgttcctcccgcgccggcgtagctcctcctccccaggttgccaagcttctcccccgcagatgctagagagcttttcctccctgcaccagaatggcgagctctttctccccaacaccggccaagctcctaattccctcacgctggcggcagcaacatgacgcaatggacggcacggtacggatgggcgacgggcgtaacttcggagagacggagtgtcatggaatgaaacaattcgcgtgctcggtggcttgttttgaaagtggtacgaattaagtggcaaatcctgaaggtggtgcaaattgagtggcatactttgaaaattctccaacaggcataatgcatggatttagaattgtaactttcccctgttctttttttaataaaagagaaaatataacttgctattcgtaaaaactggtagggttgcccgcttaccaaatagcacagtttcaagcgaaagatcgctaatgcatcatttgagagttaaaacacaactaccaaagaaggtattctcttgttcgtcgatagttatttcattagatgtgggacgagcctacgtgtcgggcgcccgattgatttagggaaaaatcgggcgttgacgtcagcataacgtcaacgccacgcatacgtacaaaactactctaaactaatttttctcttaaattatttatccaaatcatgatccgattgcaccattaaattcgttgcaattaaatctttaaaacaaaaccacacatggatatattccgatgaattttttttagcttattattgaattatcattgtgtttagttccaaagttattcttcaaacttccaacttttccatcacatcaaaactttcctacacacacaaacttccaacttttccgtcacatcgttccaatttcaaccaaacttccaattctggtgtgaactaaacaaccatacatagtgaaacattgtgggtacactaggtgaaacatttttcgtggaacaaaaaatgaaacgaattcccttaatagagggttttcaaaatatgtgggtaatttgttgcaatgaagtatatggtggagataagtggcaggcgagggaagagacgtggtggggcccaggggcaggcaatgcgcgtgatggggagggagcgcctgatattcctccctcccccgagcgactgatccggggcattctccttagatgtgtacatctggagttgaaaaaatgggttagaaattcaagtataaatttagggcctattttgtatagtttcacttcgagggatatcgtctatggttaggaagtgcttcaaagctcaaatcagataaaacacatttgatgtgttagaggcaacgggttcaaatcgtgataccctgaatcatgcatgcgcacatatactttctactgaaagtatatgatgttcgtatgttatggctttttatattgagcagcgaagccagggccgggcaacctagagccagtgcccaggcccatcgcaccgagaggccggtaacgctctctcatcttagagtgtatgagattttttttaataatggattaaaaacacagctaatttatggaaaaggatgtatacaaccataaatgtccatacaagaatacttatactctccccattacatgtgaaacattgacgacataacaagtttaaccaccacaagaaagaagaaccaaaactaagcttcaattcttcttgtgaagttccaaccataggtagattagacttccagaagtttcatctccaaggttttgcatagaaccttcactatattgccatcatcctcattaagaacagcgaccaaagtcttgccaaatgcgtgcccctgaaaatcacctacgcaaaagagttagcgatgtaaccattaaataccacattattcctacttatccaaactgcccaacacattgcagctatgcatacaaaaattagcttcttaagtgccaacttccaaagatatgtgatgcactacgaggcttggcagtgaagaggtcctgatgtcgtgcacagggagcatggagccatggagggaagggaggggggaggggggctaccgaatatccgtcggaatatccatttgcaagtatggagattccggttgaggatttctgcttggaccgaactattcaacaggatattggtatttgttactagagattccagtatagttggagcttctccaacaaagtgaacaaggaataatatcgaaaggaatatttagggaaaagagagaagtgattccaaacacaaaaagggaacaaaaacacacagacaaaaggatttttttttttcatgaagttctgatccaaagatcctactcttcattgaggtgcttcttagagctggtacaataaagtgatgtaagatggttgtacaagttaccacatcagatttgtgcttacgtggaggaaagagaagaaaagtggactacagattcttagctagcttcagcacgagctcaaataaactatgtgagagatggctgaattaggttttaatgatgtgatatatatctatagctaactattgtatgagtgagctattaggttggctatagatgatggttcaatttttggagctaatagttgactatattattaaacttgttcttaagagacgactctcttttgatcccaagcctcaccaagttaataaccaagagaaggctttaatctccaacttcacaccaaggaataggggtttactcctaaccaccaaggttcaaggatccaacaccaaggctttagtcgcaagagcatgaacaatccaatccatcaactaacctatctagctctcacctcatgacgttaccatctcatctctttgtattctctcaatactcaactctgtctatgtctcacgtcgctgtcaccacccacacctgcagcaaagaccaacaccatgcactccattgggtctgacaattttaatttgtttcttgaaccgaggtgcaccatcatcttcgagatatgaaacaattcaatctatatccgcacccgcttagaaaatgtagtgtaggatatgatatgactagaggtgaaaacagagtggattcagacgaatagtgatgagaccatatcctacaccacatattttaagggattctgagcgggtgtgatggtgtgcatatgtggtgcgggtagttttggataatggaaatggtgcggactctattcggaaatagatatgtgtatgtaatacatataacatcaatgcaacgtacaaaagtacataacaacataacatctgatttctaaacatgactcccactctcaaggacaacaaccagtcagctgttaggaggtaagagccggaaagacgtctctcaagaccgtcggttatcatgtggtagaccgtcaccttcgcctcatcaaagattaggaggttagaggggaaggattggagtggtatcactcactgctcgctatgtcattgtgtgttgtttctatgagtggtggtggctacacaagcatgagatgagacggtgagagtctacaattaaggagtttatgttatctgatgaattgggctgttggataatccaatgggaactttggataatcctcatccgctggattttagcgataccacaatcgttggatttatataaacccctaccatattctcatttcaaacagattcagaacggatcggatcggatattatccgattcattttcaccctaggtatgactgctattgcccaaatcctctctgttttcacccctattatattaaattcgcccgattgttacactcaaggtttacaacatcatgaattcaacactgggtatccatgctccacaaatgcattgtactataattgtgctaagtcatgagctaccctattacaccatcttccaatatgcctaacctcaacttccgggagcaatctcattatacttttcacttcattgatagttgactctctctcaaaagtagctgttggagcacgaaaaaaccaaaaacaaatgtgaaaaaaaatcttgtgctatcttgcatgatccaaccatgatgaagttgcatcggcaccgtcgcaagaggaagggaactccacctatcttattctaaataatgtatattaccttacaagcatttaattattgtttttttttcaaacacactatcactgggaagatggtgaaccactattgacaaatcaaatttggtttgttgtcaaaaaagttatattcgtttcttgaaacttttctttttatgattgcatcgttgttttatcttgagtatatttgcaacaatattttaattgtgcatgtagtattcttgaaattgcctcattattgcaagccaatgaaaatgacttactcttatgagggcaagtcctttgctatgaaaatgaaaatttttaaatattggaaagatattcccattttgtatgcatttgcatttattcatgacttgtgaggattcctcaatgttttgccacttcttggcaaattgtttgaggtatttcggaagtatgaaaataaattgcaggtaagaagaaattaggaaaacatcctcttcagatccctcgtctttgcatcgagtttaaattccggtattggtttagggatataatttaaacgacggaacgctgaggaatataaagtagactttctctaagaaattacaattgaaaaaggagttctgctgttgggccgtaatgctaggcccagccacgcagagcctacgaagcggccttctgggctccggcccggggcctatcatttcgcaacaaaattcccaagtctccccaaagaaagaaaaaccccatctcccgtctccccgcgagttcgcccgccgccagcgccggcgccgatctccatcccgcgaccgcgagcagcggcgacgtgcttccgccgcaccctcgctcgccggtgagaatccgccctcttctctgtcatcacaccattctcagatttgcttaaaccctagtttcacttctagatctggaagcttcctatctttgccttaaccttagtactaataacagttactagttcgtttgttcctcaaaatgtttggggggttcaatctgtcggacgaattgattagcctattttctttcagccctgagttccaacatttgtaatcgtgtgcaatctgttggatcatatagcgactagagtgtgttgtgttgtagtgtgttgtttgggaggaagcatacgtgaagcttcagaaacatctgtagtgtgttgtgtaggttgctgccatttttactcctaagataagagtgttacttgagaggtgaatccattcttgggtttgctagttatcaaaatttccggcttatattcaaatgaacttaatcctaataatggagatcaggaatcaatgctaataatatatttgttagtggtgaaatcacaaagtatttgatgggctagtcatggatacacactttacgccactgaccttccacgatcacatggaagtatggaactctgggcatcacgcgcctcttggaaactgcttgttgagccggttactctctgctgtaactccctgcttcctttaacctgaccgatttaacccctctcatcacttattccctgttctgaaatcactgtgctctgcaccttttttttttttttactgaggaaatgtaaggttcagatggtctgccgcagccttctgttgcttactcaacagaagctaatttgttcctgggtaccacacagcatgtggtaacctttttgcttgctaggtgctacctaagtctcaggttttcaggaatgtatctcaatttgctctgaattggtagtatgtaaatttttgagatttatggtggcgtgaattttctagctttcttggctgctgttcatgttgcaattcttactgcggtcaaagctgctggccttaaatttgatgatgttaaccttctaaaaaggttgaatgctgagactatagtgtttattcaattcttatactagtcacaacaaaccagttctagttgtcagaagattatcttctctgctgtcactatgccttggggctaagttacaggggttgtagccgggtgaaacaagaggttggggtcctggaccaaggcagcgggcaggcattgaaagaggagtgtgttgctctagcttatcagtgattacctctagatcagtggagagatgcacgctgttgagtattgacttcttcatctacaagtttacatgcatacggggatcatcatctgtgtatcttgaacattggaatttgaaattattttttgaaccgtcatgttcttattgcctttcgcagttttcacaacaaaaataatatgtaatgggtcttataagtgcttatgtctgtttcatttcctgctgctcttataccattttagattcatatgtatgctggaacatcacagatttatcactcatgtgaacactacacagtaatggcatctgcctaaatttgttctgagtttttagtgcttattaaatttatttaaattttgttttcattgctgtcgaaagctctaaattgcttcgtggttcatgacaaagctaacttttaccttctccaggtgtccgggtatttgcattcagtgacaaaagttcttcagctgcggagtcatggctgcccagatacgcataataatgaaatcttttatgagccaagctaacaaggttcaaggggttattccatacgctcagaagattggattgcctgaatcacgatccttgtatactgtgttacgatcacctcatattgacaagaagtccagggagcaattctcgatgcatgtcaagaagcaatttctggtacagaaagcggaaacgcacgagctgcaaaagaagctgttctggttgaagcgcctgcgcctacttggagctcaatacgaaatccaaatcagtttcaagactcgtttggataagagtaagctccaagctgctttgtagttggttcgttcacccttgaacaagactgcttctctctcttggttttgagattgtcaaacagaacctttgcatccattagcatttcatatgaagaactgcatcatttggaagagttcacaggaatgttgtactagtaattcattccaaactcagcaccatttggaatagtttacaggaatgtagcagtagcaattcatccaactatcatatgctatgaattatgatgacgcagcatgatctgtaataaaacagatgtgcctgcattcctggatttgttggttttgtttctagtacagtctaacaactcatgacattccaatcctatataccttttattcgtttgttcttggtactactaattcacatgagtcatgacaaaactcaggggctcagtggtggagatgagctgttgaattagagtttagtgttggtggctagtgagcctggttctgaatcaagcagccttagcacactgtctgttggtcacaaggtctgcataaatcttgccccttttcgtggaaggacaacaaaacagagtgcaagcacatcaacctcttgtaaaatctgcatttccggcgatccattcgaagtgttcattttttttttggcaaaatacttaacataaaaaaaaaatagtcgaatcatgctgaactgtattgtacagtgttggatcatgtggacactgtttatactccatgccttcatggcactgatctgcaatgtgagtatggattcctctattcatactctcttcgtctcgaaataaatcaaactttaactagaattaaatcaaactttaactagaataggatacatcctaatacaacgaatttgacagatttattgtactaaaatgtgttatatcaagattcgttgtactaggatgtcctagtacgagattaatttattttgggcaaaagggggccttaatcaggctggccgacatactccaattattcatctctgtttgtcaagctgatgtgcgcgccttctgaactccattcattaattgaaagcgtcttcttggcttgttgtcacctattaatcgatctgatatgaattcaatacccaaagatacaactcagttgtaatggataattaatgtgtctatgtcaattctttctctgaaggaacccaaatatctcgccttgataaatcctatagctaggggtacgcctaatggacgatcgatcgccctggggatagggtagcgatcagattcgctccccacctctcccctccaccctcccttcctccacctggtttcctttttggctccgtattactttcctattttagtaaatttatgcacctaaagtttatacacctcaagtttacacatctctaaagtttagagaccaaaagtttataagtcaaaagtttatatatccgattcaaatttgaatttgaattcaaatattttttatatatagtatttctatacatctaaagtttatacacctacagtttatagacctaaagtttatatatccgattcaaatttgaatttgaattatatctgattcaaatttgaattatatctgattcaaatttgaatttgaattgaaatattttctatatatagtatttctatacatctaaagtttatacacctaaagtttatatacccgtttcaaatttgaatttgaattatatccgattcaaatttgaatttgaattcaaatattttctatatatagtatttctatacatctaaagtttatacacctaaagtttatagacccaaagtttataagttaaaagtttacatatccgattcaaatttgaatttgaattcaaattttttatatatagtatttctatacataaatttttctaaattttttttaaaaaaaattgtggagatgtgtaaacttgaggtgtacaaactttaggtgcataaatttattaaaataggaaagtaatgtggtgccaaaaaagaaaacgagagagaatcagatctgattgcccctagcgatccctagcgatcgatcgctaggtagcattacgctatagctagtgtatgattgttctcttgtattctattactagtactcttatatgctaacaggtttgatgttgcctagaaaaataaataactatgtgggctcatttgagactgggaatgtggtgaggacatccctatcattgatacaaccatacctagtatacagcaaggaccaattattcgagctcaagcacaacaactcaattatcaggaacattgaacacaaacaaggtgggaggaggagcagccatgagaatgaacaagtgaaagccagcatgagcaagggaaagttcagacagcatgtccggttctacaggcaatggcaacttcaattggtcataactctttacttcaaagagtgttggaagctcatgagcacttgttggaaagggttttgatgtctactttcatatggatccagaaacaccatcaaattccatcgaagctgtccagaaactgcagaagagacgttcggacctcgaacttgctagttgggccttgtatccagtatagcccattaagggagcatttcagctcagttcaaaaaaaaagggagcatttcagctaaggtctccgtaacctcctgctgtcctccaccatataataaggcagcagcagccaccaagaacactcgagttttgattagatgcaagtttagtttcagctacttccttatattcgcgtgaatcggctaaaccacccggatgcttgatttagaaccctgactttatgtgtattagttttatcatttggcaagtgttgtgaattgtttccttatcaacttgttcttcgattgcctacaagttaagtattgttcttggcacaacaaaaacaacaataaattagagccgatgtactggttgctaaggcgcaacgccgctctggtagttgtaaccgaaccaccagcgtcatctcctcccacaaatcgaagttattattctctcactaaaagattgggaaccccgttgctacatcaaaatgtggatgtcccaacagacatgagcatggatgtgtttaatttgttccactatatttactttcagctactcatacaacctctacctcattttggcactgcaagttatccatacaacaaaaggaggtcaaggtttccacaacaatcttgctcttctaaatgatattccatcttcaactcatcctcatatcaagcttttgtctctatgagcattattttttaaagaatttttcttttcagttgaaatgaaggcgtattctccagcaaattatcagttttgtaagatacctttcagccataacaatcattttcatatctactaacaaaatatacaaattttaattgtcttgtagtaaaatttgattttatttttctatactgaaagtcgcatatatttccaatttttgctctgggccgggtacccagctaagggctccctttgaactggtagcgctaatgcgcgcggaatattagttcgagcgccacacgacgccctctccttccggtttttctattttttaccaccccacctttgctttgcatctcaccttttctcggttcctttttttctttttttttaccaccccaccttccgtgtttcttttttctcttttctatctcatccgtgcttcatcaatgggcccgctaaaatattagccatccagatttttctgtttttcgttccttctctgtagtttttctgttttcgcgttttagtaaaatatttaccgtctagtttttcttttcgagtttttcattcttctagtatttatgcacgtttcaaaagtaacgaatttaatccgacgagtttttcatttactccaagactcccacatctgctcttcaaaagtaacaaatttattcgcatgaatgcctccacatcgtatgacaccatacctagctggtcgtaaaataaaagaattactaccaacttacaacgcaagtaattcttttaccaatattataaatattgtttagatttcatggtctaatattataaatattgtttagatttcatggtctgtgagtaaaacaattactaccttcctcttgttatagcccatgatctcgtagccaccgtgtagtaatatgtttactgatgtattcaatacatagtataagagtaaaaactgagatttcgtggtctgcgagtaaaacaattaccaccttcctctcgatatagccatgatctcgtagccaccgtgtagtaatatgttcattgatgtgttcaacatacagtataagagtgaaactgatactaagagtattgttgatatgtatcacaaaatagtcgtatgaatgaaaatattacaggcttaatcacacacaagcaataaaattactcataggtgaatcaaactagaaaaaaaaatgattcagccaaaaatctatctggtggctttgctggatcttgctataaggatgaagatgatggtttgtgtcttatgacgggtagtggagagggcaaccgggtggcgatcagtagtcgacgatggaatcatggaaggatgtagcggtgtggtatagagatgagctcgacgttgcacagtagcagccatccatcatctagcaagcacgaaaaaaaaatgcaaaaacattctcgttcatgtcaatagagatgacgagcaaaagaaaaatagcaaacaacctccatcaccggcgcactccaccctatcctctgcggccagccacatggagcacaatgtgcaaatgtaggatatgtgcagcccatcaattgagtttaggtaatattggagattgcacgctaatttgatttgcaaaaaaaattagggcttcatgcgtgaaatggaaggagagtatgtagatgcaaatcagagtgtcatttccttacttgcttgttctatcaatgtcgccgacgtggagcagccgctggttgttgctattggccctggtgaacacctccttgctggttaaggtgttgcccagcgtctgacggcgagggtcgaagcagtgccttctcctcatctgccgccggccactgccatcaatcgccacggtgtcgtcgtcctcctcctccatggtgtgtcgccgatctgtgggcttttgtcggtgacatgggaccgggagtatcatgactagaggtttgggcaggagcaatcacccacgtggcctgaccccctcgggggggtcgggcccgagggtgatgtggccgcccccctctttgtctccccgaggggtcggaccgctcccgtttcggccccgagggctgaggcgccccgaccccttgtgggtttggcgccgcgtgtatgggttaggtgagcataacggggctcacctaaccgcatttattgcggtttagacgagcgcgtcacgccgcatgtaacgcagtgcagcgcgctcgtttatccggttgtgaccagtcacagaccgatcagatcgtgggttaggtggcgacaggcggtctgacgcacgcctcgccccatcccgtcaggataagagcctccaagcactcgtccctagccggagccggcgtgttagctcctggaggtggcacgttggacccggtcagatatatgccaggcttcatcccaaccattacaagcaagatattgtatgaagaagggcgaacatgcagattgctaaactgacacgtggtggacaagaatgaccgatttgtgaccggtctgacactggtcatgtcgtcggcagacagccatgttcccacgtcgcacctgctttcggcggaagtggaggtaggtatgggccgtcccatcagaaggtcattcggacggcaaccattacaaatctccgtccatttatgaagagaaggcaagtcaagtttgagaaaagagaggataagtccccacacaaaaaagagagatggtgcatgtggtatccccttgagatataaaaggaggacctcgcccacttagcaaggggggacggaaaaaagaacgatggacgaaaagaagaaaggagagaggaactggagagtagatcccacgagaggaaaaaagggagaagagggtttctagagtaagagctctcttgctctccagctctttgtagcttcttcatacacagatccaccaaaacacaggagtagggtattacgcttctcagcggcccgaacctgtatacatcgcccgtgtcttgtgttttttccattctcgcgaactttccacagaccaggagcttagaacctcacccagggcccccggccgaaccggcaaaggggggcctgcgcggtctcccggtgagaagccccacgctccgtcatctggcgcgccaggtagggggctctgcgtgtgtttttctaagctctcgcattctttcgtgtgcgccaagcttttcctgttcagcccaatggccgaacaagcaaaggcgcacaacctctctccgagcgttagcggtgacgacggggagccgaacccacaccgtcgagctcgtactccaccgccccctccacgccaaagtcctaggcgggaggaggcgctcgagagggtcgaaggatccgagacttcgacatccacaggtgatggagaagggcgccgagatggggagcgtcgcctcctcgtctacggcgacggcagcacgccccagggcgcgctccaagctgcgggcgcgctcctacgtcacccgcccgttgtccttgacccggagtctccagcccaacgttggctggacgacgtggccaacttggtcatgacggcacggcagcgcctaggtgctggtgggcggtcctccgccaccaagacctctggcgctgctaccaccggctccgtgtcgtcaaggcggagggcgcggcgagcggcggctgttgctcgccattcggctgccactccctcgtcagcacctccaacccgggaagatcagcgtggggggccagatgcccgcatcgatatcgaacgccggcgtaatggtcgacgtactgcccacgcaacggagggcgcctcctcgtccggagtgtcacctcaactcggacgcggggatcagccctccgtgcccccggttggtggtgtcggctgtagagcctttgtggcgagccttcggaacgtccgttggcccccaaggttccggcccaccatcgccgaaaaatatgacgggagcgtcaaccccgccgagtttctccaggtctacgcgaccaggatcgaggccgccgggggcgatgacagggtcatggcgaatttctttcccatggccctgaaggggcaggcacggggttggctaatgaacttgccacccgcgtcggtccactcctgggaggatttgtgccaacagttcaccatgaactttcaaggcacatatccgcgcccaggtgaagaagcggacttgcacgcagtacagcgaagggatgatgagtcacttcgctcatacattcagcggttttgtcaagttcgcaacaccataccatgcatccctgcacacgcggtgatctacgcgttcaagggggtgtgcggcacaaccgcatgctcgaaaagatcgcctccaaagagccccagactaccgcggagctttttcagctcgcggaccgagtggctcgtaaggaggaggcatggacctggaacccctccggttccggtgtggcagcttcggccgcccccggatccgctgctcggacagggcggcgtgacaggaggaggaagaaaaggtccgcccattctgacgacgagggtcatgtccttgccgtcgagggtgcttcgcgggtcacccgaaaggggaggtctgcgagcgacaaaaagaaggaggccggcgctcccagcagggagcgcccaaccggcaggtggtgcaccgtctacaacacctcccttcacgacctcgcggactgccgcgccgtcaaaagtttggctgagcggacgaggaagtgggaggaggagaggaggcaggagcgccgagggggcaagtccccggcggttccttccggcaatcggcgaagtgaggccaagcagaaggcccccgccgaggacatcgatgacggcgatgatgacctaggtttccaagaacctggggccaccattgccactgtcgatgggggagcgtgtgctcacgtttctcgccggagcctcaaggccatgaagcgagagcttctggccgcggcccctactcatgaggcgacgcgccgggcgcggtggtcggaggttgccctcaccttcgaccagaccgatcacccaccgtgcgttgcccggggaggacagatcgcaatggtggtttcccccactgtttgcaacgtgaagctggggcgtgtcctcattgatgggagagcagccctcaacatcctttcccccgtagcctttgacgccatcaaggccccggggatggtgctccggccgtcccagccgattatcggtgtgacgccggggcacacttggccgctaggtcatatcgacctcccggtcaccttcggtggatccgccaacttccgcacggagcgggtgaactttgatgtggcggacctcagtctgccctacaacgcggtcctagggaggcccgcgttggtgaagttcatggcggcggtccattacgcctacctccagatgaagatgccgggccccggtggccccatctctgtccatggcgacctcaaagtcgcgcttgcttgtatggagcagcacgcggaccacctcgccgccgcgtccaagcccaagggtggcgacgagaggcttggcacctccgtccccgccgccccgaggcagcggatgatcacatgcgacgaggtcccggtcaaggaggttgccctgggcgacggcccgtccaagaccacaaggatcggtggtcttctggacggcaaataggaagacgcgctcgtctccttcctgcgggcaaacgctgacgtcttcgcatggagaccggcagatatgcccggggtccccagggaggtgattgagcaccgtctcgccgtgcggccgggcgcaaggccggtctggcagaaagtgcggcggcaggccccggaacgtcaagccttcatccgcgaggaggtggcgcgactgctggaggccggattcatccgcgaggtcatccatccggagtggctggcgaacccggtggtcgttcccaaggcgaacggcaagcttcggatgtgcatcgactacaccgaccttaacaaggcatgtcctaaggacccttaccccctgcctcgcatagatcagattgtcgactccaccgcggggtgcgaccttttgtgttttctagatgcatactctggttaccatcagattcgcatggctagggaggatgaggaaaaaactgcattcattacccccataggaacctattgttatacgacaatgcccttcgggttaaagaatgcaggtcctacttttcaacgtactactcgaatttctttgggtagccaaataggacgtaatgttgaggcttatgtcgatgacttggttgtaaagacgcgcaaccaagagaccttactttcggatctagcgaaaacttttgagagtctccgctccgcccgcataaaactgaaccccgataagtgcgtgttcggtgtacctgcgggcaagcttctcgggttcttggtctctgcccgaggcatcgaggccaaccccgagaagatacgagctatagagcggatgcgcccccccagcaagcttagggatgtgcaatgcgtcaccggttgcatggccgccctaagtcggttcatatcgaggctgggagagaaggcgctacccttatttaagctcctcaaacgctccggaccgtttacctggacggaggaagctgaacatgcctcgcccagttgaaggcgtatctcagctctcccccagttctggtcgacccggagccaaatgaacccttgctactctacttagcagcgaccccgcaagtggttagtgcggcgttggttgtggagcgcgatgaggacaatcctcattccgcgcatccccaccctgtgctggcttggcctgggagagagcagggaggagaggcccccgagccgaacggtggcccaaggcccccgacgactggagctggccctctgcccgcttgtcagacggtgccaggtgcccccgacccccaggatggcccgggggccactgcgggaaggccgcacctatcgccctctgaccccgaggttaaccctgtgccgactcgacccgggagagagcagggagaagaggcccccgagccgaacggtggcctaaggctcccgacgaccggagttggccctttgcccgcttgtccgacgacgccaggagcccccgacccccaggacggccccgaggccactgtgggaaggccgcacctgtcgtcctccgaccccgaggtcgtcggcacagaagacaagtgcgccccacgtgaccgcttggacgaagagcgccccaggcatgcggcccctggcgaagaggatcggccccaccgaaaggtgcagcggcccgtctactttgttagtgaggccctccgggacgccaagacccgataccctcaggcccagaagatgctttacgctattctgatggcctcgaggaaactgcgccattatttccaagcgcatcgggtcacggtggttacgtcttaccccctcggccaaatcttgcataatcgagagggtactggacgggtggtgaaatgggcaattgaactttctgagtttgatttgcactttgaaccacgccacgctatcaagagccaggccctcgccgactttgtggcagagtggaccccagctcccgagcccgtctccattcccgaggccagctcgggcccctcgcagctgcatcacaccgcctactgggtgatgcagttcgacgggtccctgtctcttcagggcgccggtgcgggggtcacgctgacctcgccgagcggagacatcctcagatacctgattcgcctcgattttcgggcgaccaataatatggcagagtacgagggactccttgcgggactcagggtggcagctggactggggatccgccgcctcctggtgttaggcgactcccagctggttgttaaccaggtctgtaaggagtaccggtgctctgacccgtagatggacgcttatgtgcgccaggtacggcgtatggagcgccattttgacgggatagagcttcggcacgtgcccagacgggataacacgattgccgacgaactctcacggctcgcttcctcgcgagcccagaccccaccgggcgcctttgaagaaaggcttgcccagccgtcggcgcgacccgaccccttaggggagacggacgcgcctgaccggcccccgaggcccgtcggagtccaggcctcgggacccgaggggagcgctcccagctcccttagattgattgcttggatcgctgagatccaagcatacctcacagataagactctacccgaggaccgcgaagggagtgaacgcgtccagcgcatctccaaactctacgtgctgatagaagggaccctttatcggcgcgcggctaatggagtcctcctaaagtgcattcctcgggaacaaggcgtcgagcttctcgccgatatccatgaaggcgaatgcggagcccactccgcctcgcgcactttggttggcaaggcctttcgccagggtttctattggccgacggctctcaatgatgcggtcgacctggtccggcgatgcagggcgtgccagttccacgccaggcaaatccatcagccggcccaggccctgcagatcataccactttcatggccatttgctgtctgggggctcgatatcctgggaccgtttaggcgggccccgggcgggtttgagtatctgtatgtcgcgatcgacaagttcactaagtggcccgaggcttatccggtcgtcaagatcgataagcactccgcacttaaattcattaagggcatcacagcccggtttggagtgcctaaccgtattattacggataacggcacccaattcactagtgagcttttcggtgactactgcgaagacatgggcatcaagctctgcttcgcctcacccgcccaccccagaagcaatggccaagtggagcgcgccaatgcggaaatcctcagaggccttaaaaccaagaccttcaacatcctcaagaagcacggcgattcatggatcgaggagttgccagcggtgctctgggcaaaccgaaccacaccaagccgagcaaccggggaaacgcctttcttcctcgtctacagcgcggaagcggttctcccatctgagctcaccctgaggtcccctcggcccaccatgtactgcgaggctgatcaagatcagcttcgcagagatgacctcgactacttggaggagcgaaggcggcgcgcggccctccgagccgcgcgctaccagcagagcctgcggtgctaccatcagcgccacgtccgggcccgatcactctgcgtcgacgatctcgtcctacgccgcgtccaaacgcgtgctggattgagcaagttctcaccaatgtgggagggtccgtatcgagtgatcggcgtcccccggccgggctccgttcggctggccacgggcgacggcacagagctgcctaatccgtggaacatcgaacaccttcgtcgcttctatccctaagggggatcgggtgtcaggtttcgggctcgggccaaccccgcacccccctcgggcgtgcagggttggccgggggctaccacacatgcatattcttatttctcttctatctgtatttcaataaaagcattttcaatttcctaaaggctgtatctgtgctgttgtttccttttgaagaatcttgacttgaaataggtcactcgtgctcaatcctgccctcgggggctcgggtcggctaaaatcgccaaaaggggcccagaaccgagccgtgccccggggcgtggtgaactccggggggggggggggaatcggcaaaaacccacaatcgggtcacccataaccctcggtcaccacgctcccggcctggccagtctcgacatgtggatctccccaggcactagccccgacccgagccaattgaggactgggacctgggcacgagcccttgttcaagccaagacacaaaaggaccgcggcacagaccatcctcgtctcatacacacaacaaatagaattgacacaaaaatttcctctttatttgattacagattaaattagtctatacaaaaaggaggcctgaaggcctcggaagaaagaagaaaatggcggaaccagccctgccattgcgaaagggaggaagaagacggaccgccccgggtagcgtggcgccgagcgtccctcgcccagcgtgactatctcccggccggtggcagattccggcatgaagcggcgcggcagcccgacctgtctctcgctcacgatgcgggaaggcggcagcacgctaccatcaagcggagcggagccccgtgccatgacgccggaagaagagatgtttgagagcgagcgcgtgtggcgagggtagggcacaggaaacaaggagttagggcgcaagcggcgaagacaaggggaataatggcgagaggaaggaagtaaatcccttcctcggtgtctttatacccttgccaacgctgtgctcggctcctcgcttctcgcgcccactatctcgctccctcgtttctcgcgcccacgcttccactaatcccattcgcccgcttgcggcgcatgaggtggatatgcggctgtggcggtcgagatggaacatatcgtgcgcgcgttaattacgctcgccgaccgaagcgccatcaccatatctccaggcaaaacgaaccggctcgtcccaattcgcgtgctactcgagtaatgtggcagtcttgaagagaccgctcattattgacagccgagttaccattgccgatgtgtgtgatttgcgaccgttgggtttctgcccaactgtagagaccagccccacttgtcaccaggcctaagtaagtggcgtcacgcccgaccgcttccctcaaggagggcgatcgccctggcataacgccgggggctactgtcggtgacatgggaccgggagtatcatgactagaggtttgggcaggagcaatcacccacgtggcctgaccccctcgggggggtcgggcccgagggtgatgtggccgcccccctctttgtctccccgaggggtcggaccgctcccgtttcggccccgagggctgaggcgccccaaccccttgtgggtttggcgccgcgtgtatgggttaggtgagcataacggggctcacctaaccgcatttattgcggttta

SEQ ID NO: 26688 - DNA, 5314 bp, Oryza sativa
  unsure (1)..(5314): unsure at all n locations
gatggatgaaaagaagaaaggagagaggacctggagagtagatttcccgagaggaaaaaagggagaagagggtttttagagtaagagttctctggctctccagctctttgtagcttcttcatatatagatctatcaaaacacaggagtagggtattacgcttctcagtggcccgaacctgtatacatcgcccgtgttttgtgttttttccattctcgcgaactttccacagaccaggagcttagaacctcacccagggcccccggccgaaccggcaaaggggggtctgcgcggtctcccggtgaggagccccacgctccgtcagctttgatggtggatcgattcagatccaaaaaaaaaggaaaaaaataaagtgggggcaagagtggttggttgggtatgggaaacatagaatatataccggaaacagagaagttgtttttatcgagtaaatcatttactccgataatggtgggagcacgatgcgggacgtgtggtgcgatcgcaagaatgggagttgtttttattattgaagtaaatcgtttactcgaataaaggtgggtggtagaggcgcgcgataggagtaaatcgtttactccgacaacggcaggagtgggatgacgggacgtggggtggggtgggcctgaactgatgcatgcttggttgaaatattaggagcatgcgtagttctactaatttatatgaaatgtctacaaaatatcttcgctccaagaaatattatccggaaaacacaattctgtggaatattctgttttcgattgtttaattatccggcggtcaattgtgcttgcctccttgctggtggtcactgaaaaacagttctagactgctaatcaattaacacgtgcagactagaaggactaaaataactttaaaattatatatacgtcatttcacaaagatagtacccaagcaatatatggtcgatctagcttgtgcaggtgctcgatcggatcaattactatttagtctaataattgatcgaacaagaacacaatcagaaaagagattccaagctatatcatatctggaaaaaggtacagatgctaattgatttaatttgagttaattagctccagttattgcaaatatttggtctagttgtacttgtacgggcatatatggttgcttcctggcactaattaatctccatggcaggtgggcttaacatctgggaatctcgcttaccagacgactaagttgtggtgctaatgtattcagaatgacctttttcagatgatttattgaattatttttaaagtattaactagattattaatacagattagttactaatatgtttttaaaacttcttctattacataactgaacattcgttttagatctttgttaagtttattttcaaaatatttatattatatctaaaatcaagtagatatttcatggtaataatctgctcactaatctaaaataaacgagaccttagtcgataataagttagttattcttactcaaacatatctaccaagtgtgtagtcccatggattaatttattaaaaatcgtatgtcagactacatgactatggggaatggatttaatgtggaaaaacctttttgggaaagaaaagaaaatagtgtagtttcaatatataattgcggttttttcaaattaagatgtttttaaaacacaagtacaatgttttcctaaattagctagaaaggttaatactttagtatgatcaaatgccataaaccacaaaataaaaccatctagctttgtaaatgggattcaactttagtgtgcctagccaacataagctccggtgccagaccgatcggttgtaaagagaattcattcactatacgttgctttgaatatatagtaccggatgtcgtacttgttcatattacataatctccggtgccacaccgatcagttgtacaagagaattcattcactatacgttgctttgaatatagagtaccggatgtcttccttgttcatattacataatctgcggtgccacaccgatcggttgtacaagagaattcattcactatacgttgctatgaatatgtataagtaccggattgccaatcttacttgttcatattagaagacaattttccaaaaaaacaaaaaaaaaaccatcttgagcttcctgtttcttatactccctccttcccataatataagaagttttaaagttagacacggttattaaaaagtaggtataagtgaatggtggagggttgtgattggataagtacgtagtggaggtaggtgggaaaattgaatgatagagggttgtgattggttgcgaagagaattgtggtggagaagttgttatattttgggacaaattctgaaagctaaaagtttttatattttgggacagagagagtagtgattagtaaatatggaagcacttacaagttgaaattatggaaatatgctactaccaatgttggatataatcagacaaattcagttggcaacatcagtcacaagtcatagacttctttcaagatacctctttaattagttaattaatatcatagcaagatctggctaatcttcacatcttttagcaaaaggatcatttgtctttgtctttatatgtgccaagtgccatatcagtatcttgttactcaatggttgaaatttactagagctctcttaattattcttctttcttgtatacactggtcctaatccaaaagcctccaattaagcagggaacttcaaattaaagtctccaaactagatatatcctaaggtaggtcagatacgttctgcactataggctttaatttcagtatgtactgctacaaatgctactacccaatttagagcactttagcttatctgggtttaagttaggtcagatgcccctccactagcttttggctgctattaactagtttcaatcgtgtgtgcactctgccaattctcctaatttaagagtaagtaacaataattacctaggggattaggatgcttaatcaagtatgaatcatctgatgatgcatgtcatgataataaagtaggattgatctgactcttactacatgggatgagctgttcttgtgctagttatatactccctccgtcccgaaaaaagacaaaccctggtttccgtgcccaacgtttgaccgtccgtctcatttgaaaaaattatgaaaaaaattaaaaagacaagtcacgcataaaatattaataatgttttatcatctaacaataatgaaaatacgaattataaaaaaaattcatataagacggacagtcaaagttggacacgcaaactcagggtttgcctttttttgagacggagggagtatacttttagaccacttggaacaataatgcagagatgatgatgccacacattctgtatgtatcgagtgtgggagaagataagatatcatgcagatctaagttagcaaagaagtgatgaacaacctttttagaacacaaggaagaaaaagtgctccagttgagtattgtcatttgtgacagtgaaagacacagataatcctttaatttattcgcatcaatgtattattggatgtttgtccaacgaatgtaaaatcctctggattcggtcaagccgtccaccgtaagttgagtgcgttgagagttgggagtgtgtgtgatcaactaactagctttgagtgctccagaaattatctttcagttgtgagttgtgacccaaggttttgtgaattgccaaaaagaaagtagtcttaggttttggcaactaccaaagaaatcctcgtcctgggactcccccttagaggcagtttaattattgatgtctctctctatgaacaataggagattgttttaacggcaaacaagattatattgtttcaggactaggggaagcaccattggtggttatatatatagccgtacgcatggagtattacatcatttgcaagttttaaaacgtagaaacggttttttttttgaagggggaaggcgagcgaaatatcataaatttgaggataaataatttttggatcttaatcaaattagccaaatttcattttttttactaattttaaatgaatgaggtttttttttttgtgggnnagnngggttaggggagtggggggggagtattgtgatagatatccaagctgagaatggcaccataataggctcacattgattagtctaataattgtgtagagtttgatggagctccatcctacggagaaaacagagagaaaaggggacaagctagggaggactgtggtagcttggtccttgaggttgtgacccatgtagcgcgaatgcgcgagatcgaagaaggatggggcaatggctgaataagttgataggtggacctgtgcattagtgagagatatgtgaatagtgttggtttgtaaccgaaattttgataatttgatctttaaaaaaacttatttaaaaataaatagtgtcaaaaacttattttaaaaataaaccgtgaacttagggtcatcggaattggcgtagaggtccaatgactcagcaccagccatcatggtgctaaccactacccgctgatgaggctgtgtgcaaggtgcaaaagggtcagtgccatgttccaagtaaggtcttaagtagaggatatgtcctttgcaatcgtcatccccagtgtagcccaatggtaaagctcttcacttggcagggttgtgagttgtgatctaggttctgtctctcggtttgcatatttttatttcttttcccattggtaacagataaagcttaaaaaaagtagtgctcaaagggagaatcgaacctagtaaaccactagtccactgtgatgtattatgggggtcagtncnatnnngnanggnattcccccccttacactttgcacgtggacttgttagcatggtagcggccgattagccccatgctcgctggagctgagcgccattggaccttagcgtcaatcccgatgacgctgaggtcacggtttatatttacaataagtttctgctatggctcattttttatataaatttttaaaaggttaaattatcaaaatttcggggtttgccaagtgacatgaaccacatgaaccgtatgtgtgcatgtctagggttgaagatgattggattggctacaagctagggaacatggtgaggaggatgctggtggccacaacgaggagctcaaaggctttctatagaagggggttgaagatgctggatgctggtggagtggtggccacactagatccattaaaggaaggattgggtgattgggtctaccgtctacgtccactacacgcttaaggacacaaagttgctaccatacttagggcctgtttggt

SEQ ID NO: 26689 - DNA, 915 bp, Oryza sativa
ggaggcggcaggggctatatgatgagcttgcctctgtcggtaagctctctcctgcactcattgtcatacgggagcatctaccttctggaaaagcatgcctaagagttaacattgatgcaacgaaagtggggaatgtggctcgttttatcaatcattcgtgtgatggaggcaacctgcatcctgtcttagttaggagctcaggctcattgctcccaagactctgcttttttgctgctagagatatcatcgaaggagaagagctcaccttcagttatggtgatgctagacttaggccgaatggcttgccgtgcttttgcggtagcttgtgctgttccggcctacttccttcggaagagacataatgccatcatttgtaattgagaatttcctgatgtggtgctgccagaataatattggcatggcatcaggacgagtagacggtacctcagtacctgatgagtgatgactagtgctttcacaaattcagtgtacactatgcatgctgccttggccgttttcatgacccattctgtaacttttatctgacactctgagaaaacgacttgcaagctatgcattctttgctcatagcatagtgtaccgcaagttaccggagggtagagagtcttttggtagggatgttcttaaatcctactagtaaaatgcaattcatgctggcagttgggcatgcatttcccgcttcaggagtcaggaggtgatgaagatgaatcctttgacaaagaagactcctggagagagtggaggactcaacagaaaaacaaccttgtgccgttgcaatcctttatccaaagcacacttccgtttccgctttccctagcgtttgtttcctctgtgcagcaaccgcagcttatgccaatgccaccattgcccatgccccatgttccatttgcacta

SEQ ID NO: 26690 - DNA, 577 bp, Oryza sativa
ctaactcatgctccaggttctaatgattgaatatcactgcagatcttgatataaacttcttctatttaactgggatgctctattttatttaactaagatagttgttgaacagacgccgtgctaactttagtatttagatgattgcttgaagattgtgttcattatttcgtgagaaatgtacttatgttgcaactatttataagtgccataaatctttaaaatctgttgccccttctgagtaaaacttctgttgcatatttttgttttatttgtaccgaacaagtggggaaatggcgtataattcactgtgaccattcacttcctacttttaccctttttttccatgttagaacagatgcgttgttttacttctgactggtatttactcgattgcagacgacagcatctgaaagtggactttttgatcatttgataaatgtttgggagttcaagcctggtcctgttcctggaacatgtgacctttacttcttggttgattttaagtttcagtcgccactatatcgtcaggtaaaatcatccgttacgatcgtgcacatgaagcgcattcatttaactg

SEQ ID NO: 26691 - DNA, 1025 bp, Oryza sativa
agttcaaactctagagcccctctccctcctcttttctgcagtctaccagcttccggtcctctctcctttttttctccttccgtccgtcccctcttttggtaggcatggtcctccttgtatatctcaaggggataccacatacaccatttctacctacccttcttttgggtggggacccatcctactttgaccaaaacttggcttgtaccttcgtctgacaccgggataaccctgtcctccctcattaatgggcggagatttacaatggctgctgtccgaatgaccctccgatgggatgggtcataccaacctccactccgccggaagcaggtgcaacgtggaagcacggttgtttgctgatgacgcgaccggcgtcagaccagtcacagaccggtcattcttgtccaccacgcgtcagtttagcatgctacacgtatgcccttcttcatacaatgacctccttgcaatggttgcgatgaagcctggaatgtatctggccggggctgacgtgccaactccaggagttcccacgccggctccggctagggacgagtgtctggaggctctcatcattccgacgggacggggcgaggcgtgtgtcaggccgcctgttgccacctaacccgcgatctgaccggtctgtgaccggtcacacactgcgaccgatcacggaccggataagcatgcgctatgctgcattaaatgcggcgtgaggcgctcgtccaacccacaataaacgcggttaggtgagcgccgctgtgctcacctaacccacacacgtggcgccaaaccctcagggggtcggggcgccccagccctcggggggtcaaacgggagcggcccgacccctcggggagatagagggtggggcggcctcatcaccctcgggcccgacccccccgagggggtcaggccacgtgggtgaccgcggctgccccaaacctctagtcaagatatccccggtcccatgtcaccggcacgtaccttttcctttccgaaataatagaggaggagttttgggtccg

SEQ ID NO: 26692 - DNA, 683 bp, Oryza sativa
gcagctcataattttaccttctctgattgtttggaaacggtaaattattggtgctgattgttggtgcgttggtgggtgcaggtactcgccggagcagatgttcgctgttgtcgcggcagtagacctctatgaggattttgtgccgtggtgtcagaggtctaggattatcaggcgacacgagaatggctcgtttgatgctgaactcgaaattggattcaagttccttgtcgagagttatgtttctcatgtggagatggagaagccaaaatatatcaaggtgagaacttcatcatggtactatcaccatactttattggttagtacataacataccatggaacacaagcatatctagaataactaaatggttctgaaagcgacaaattaattgttgaagccgcattagttaagttttgtcacatgggtcaccttagtcatgcgtttttcttttgtgttgtaattccttagcacattgcttcacaactatctgctaaaggtttacttcttctaggattacttgtagtctatccaaacatgtaaaaattctgtcgtcgaggacgtgcctttcatttttctttcttcaatgcggctatgtgggccaaatttcttgaaacagtcagatatgatgttacttgtgccgactagtagtgaacacattgaattgcttgcaatgttggctataa

SEQ ID NO: 26693 - DNA, 16914 bp, Oryza sativa
accaataatctgcatattgtccatcggtccatttaaatattagctgaaagaaagcatcctcaattatagtactaattgagccattgatactacagtaaaatgtagtaagatagtactattttagaaaaagaaaaagaaatacatggaggaagatttgctatatggtacagcatatacgtttggtatttctctttcttccccaaaactctgtagtatacgcattcatcaaatcattctctgccgatgtgagagtttaggatgttcttgctgctacgtttctccgaacatgacactgaattgcctttgaatccgacagctggagcattcaatcctttttgtttttcctcgtattccagttccctgaggttgctgatacgaaagaaatttataggattgttaaattgtttggtcccagctagcaaccctggctacctctctgcccaacctggcatttcctagctccctccctggatggctggaagatctctgaatgttttctttctttctcttttttgaagaaaaatactgtaggaaaggatcctacaatgtatacttttaatttggtcaaatttgtttttgcaggatttaattttgtcaagttactacaatccaattggtaatgcattgggttgttctagtaagattcatggctttatactcttggggaaaacacactgcttaattacttggtaatccaattggtaatatatttttttcatatttattttctttagagatgtgtattttctgagttcagtgggggagatactgcttaattacttctcactgtttttatgagacctcaacaacgatactgaatttgtttgtacaacttgtgattacaatttttttacaggaattcaggtttttcatgttattatcacgaagtttacttgtttttttcttttggactgtacttcaatcctgatgagaacagatcgagatcatttgatgactcttctgtggtgtcagcttgattagctggcttttgcaccggtagcagccggcaaaagtaatctaagtacatccttaaatttataactacatggacatcagggcattcaagaattttggcagcctgcctgctggctggaaattaaaactcaagttttcagcttgcaagagtaacaaactggtccaaacaccgtgcatcttttaagtcattgtcgtttgccttttgctctggctatttgatgctgtcttgaaggcatacactacaacactcgtttctaacatcatgtcaacaaaacttatttaaaattgtactgaagtagttttaatggctgatatgttgattcattttcatgtgaagaatacaaacaatttcatccatattgtaattactgcatgaaaacatatcactataaaaagtgatgggaagtcatattactctgtcagtactttttggtacttgcatccaaattgttggccaatcactgcagagcaaatgttgccggacagtaattcagtgtaagttagatcttgaaagtctttaactccaattgtttgaccttaatctattctcatccttcaaccatgggaaactttattatattagagaattcctttcctctgaagtttctctatgattcgtagtacaatgcaaaaaaggcctcgacctttttaccactctcacctaatctaattgttgtgaagaaaaagagagagagagagaagtggcagttgatgatgttagtctctactgtctgggcccagtatgattacaagaatgacatgctaattggtttgttaagctgttatggaagtcggatggtgccttatcctatcttgaggctacctccactatgcacatatataattgtatcaattaatcaatttattaaattaaatgttaaaataaccatatgaaaggaaactcatgattttagaattgataatgtttaacgcattactctcgattgggagaatcgaacccgcgcctcgaaggctcgaacagacaatgtgcaaaagaatgagactagggatttaccaccaatcttcatccttttagcgtgtattaggtgtgtaagtgtggtgtacacatatagtagcttgtgcgcttgcaccttcagcataaccgaaacaaagtaatgtgaagaagactacctgaaacaactaaatgcaaaaattgtgcacttccactatatgtatatgaaattctagaaatttctctctaatgttgtgaactttttacttgtctggtatactgcatcatcgtagatatcagagatacttgactattttctgtgtactcccttcgtttcatatattataaattgctttgactttttgatttttattaaattatagaaaaatataacaagataattatagttttattaagtttagcattgaatatattttgatagttttatttatgttgaaaatattgttatattttttataaatttgatgaaagctaaagaagtttaacttagaaacttataatatgaaacggaggtagtagttgactagtattttctttcttttgataagattttccccattatttaagacccctcttcccacaatcccattgttagattcaatcgagcctgaatctaagccattctctgccccccggcccagagaaccaggtcagtcaaaaccttctctttctcccaaaaaggcaaaaaaaaaaaaaaccctgctgagagagacacactgagcaaaaaaggctatataactaacatgtgcatctaattcaagagtaatccctcttcaaatccaagagtttttttttctccctcttttttctttggcatttcaccccagagatcagaaaaccaaagccaaatcctctcctcatctcctcgcatgcaaccacgtacacctcctcgtctatgatggcttcctcccgcgccgcgctgctcgtcgctgttctcctcctcctgctggtctcctccctctccgtccgagccgaggcggatcaggtggcgcgagcgccggcgctggcgccggacgttgccgcggcgagctgggtacagcagggatcgcaggaagcggcggcgccggggcggcctggaatgggcatgggcaagaacggcgcggcgaggtggaggaggacggcggggcggcgcggccggggaggaggaggaggaggcaccggcgcgtgggcgttctcggcgatgctgccccgtgggttcgtgccgccgtcgggatcgtcggcgtgccacaacgacatgccggccgccgccgccgacgcggagttcttcgtgtgcggcggcggcgacgggagcccgtgatcgtcgacgacgacgacgacgaagacggccgtgttcgttcctgcctgcccggtgctggacttgttcgatcaacaaatgaagatccagttccaagagctcattcaagaataggatgatgagttagttcttgtttcgattcgtcaccttctcggcttctcccctgttcttgaatttgtaaaaaggcggaaaaaaacttttgtcctccgaaaatgagtgcttacactacaatctcttggacattccagctctgtaaactccgatcttctttaactgctctttgctctgaacctgagtgaacttcagaaaggagtttcttttgtttgccattgttcttacgaacatcttctctgttattgtttttgttgttaaaccatctgatctgatactaactcagaacatcatctgaatacgatcatacagatgactctcaagtgttaattcccgctcgttcttgaggccgtctgatcatgtctgaaccggtactaaatcttccggtctgtcactgcatttatcgattcaatctctcttgtccatgtgagcttagcacacacaaatgcacacaacgcaagaaaaagaaaaaaaacagagaggatgctttagtcgtttctttaaaggagaaaaaatatagtgattaatacaggtaatgatccacttgttccagaaacaacaatgactagctggtcctgcattccaccatgggtgagggtgacatcattaagctaagattaagctatgcttaggctgcatgtcaagcagtagtagctctcgcagtttcttggaggcaggagcagatcaagctagcttggtgatgtgatgctttccggcgcccttccgatcttaagcgtgcggattaagggaggccaattgaactaaaccactactaaactggctagccacaatataatcaaatcaattactaacattttcaaggaaaaattaaccaaatcgattatcatggtgagttcccatgaagcggccggccaggtgactgataggaatagtagtagtaatctatctagtgctagataaggggagcatggctagttagctggtgtcgtagcgtctactccatgcagcaaacaacgtcgcgccgctagctccatcttttgcgaggttagagttaacgtacgtacgccccatgtgaatgatgatttgtgggtggattaattaattctttaatagcaatatcacaggtatcagaggtaccatgcagctggtaccataacatgtatcaggtagcaggtactgtctcatagaagggtatccagttccaacgggataccgttgtctaggttttctgattataaattattgtttggtagcaaataagtggtatgacttataatcgttttagatgaacttatgctatctctagccagcagagatatcacaagatataacccataaggccattaacaatgcaagctacacaaactgaatggccttgtgaaaaaagtgtttccacgttggatataactactcaaattgtttccacgttggatataactactcaaacaaactcatcctacaacacatgcatccctagcaatactgacacgaaattttctatttcagcccttacgttttctattacagtcctcccaaataataaatccagaattttataaaagggaccccagctatagatggccataaggtccgcccggcccaggcacgggcgaggcacggcccaaggcgatcgggccggcacggtacggtcagcacttcgggttgtgccgtgccggcccatgggctgcacctcaggcccaggaacagcccaccagtagtcgggccgtgccgtgccggcttgaaggcacaggcggcccatcttgccttttctagaataagtctatttcctctccctcctctttgggctgtgacatatatatagctaaaataagtctatttacaaccctactctttgggccgtgccatataataagtctattttgcctccatattcttcgtgacgtgcattacatatggttgagaaaaagtctgttcgcatccctaaacttcgggcctggccgttccggcccagtgtgctgaggtagcaacccaggcacgacacggctgttgggccgggccggcacgagcacaaccggagtcgggccgtgccatgcctgggccaggccaaaattaccgggcctcgggcgggccatcggtcctcgggccatatggccatctataaccctagcaaccacaaaataatcacaaagggagtaaaacaaccgtcactctccactccccaaccgtcacaagggagtgtgacatcctattctgcctttttttttccatttctatatttttaggatcttgcgttacaaagaagctgtaggattacattatatccctaagcaatttcttattcatgcctcttgaacaacatgtcactttttacattttttttaggtaacataactttttacattggtctctactctctgctaaaagtgggatcaatctaaatctttcatcgttcttttccagtggatcatgtttatttatagcactaagcttaattgctcagtatgtacatacacaaagaactacaggaagttggaacagaggatttgatctcaccaagcttctatagattgactgcatcgacaatatagcaataggaaagggtcttaagcccttatggcatacttatatattatgagagtggttcttaattatagtagtcctttggatgagctaccgtatgcctaaggactaaccaccaggggtggataacgagctagcttggctcgttaagtctcggttcatttgagttcgttatctttaacgagttagcttgtcttggttcggttcgttaaggttaacgagctaaaagcctagccctgctcggaagctagcttgttaatcatcaggcttgtttaagtatttatatcatctttataatttttaatatactactttaccaactaatcgattcattaaacataaatagtttggatggaattaaaggacagatcactagttaattaagaaacactaagtatgtgaacataatgttgatcttttgaactaacgagctaaacgagtagctgtgagttgactcgttaagctcctgagctaaatgcttagcttggcttgacttattaagactacgagttcgagtcgatctgagccgagctcgctacagccgattcaagccacgagatttgagctttttgtccactataactaaccataaggaatacattaaggttatctctctctcccctttgccacccccctcgctttcttgtgtctttacttactgttacttttttatgtcttaataggtctcatgtctaaagtgcatctagagctcaccattatagcaacaaaaataactgaagaccattattatggggcctacccataaggacaatatccatacacattacccttagtgcccttaaattccatataggaaactaagcaatgagttcaaacctcgttttacttttcctttgaaaagcccaaccggcaaccatcttctctctctgtttcctcttatcccacttggaggattaacaaaatccccatgttaaatgatctctgaagaatatatgcataaggagagattatgtgtcgcgagtttcttactagtgataacttgcgactttgtgataacaacgaacctgacgttggaggaaagttttgaattcaacgaattatatcatgtttgtttatggctttatttgagaatcaagatagcttatacggtcgagtacggtactagttgactttagcaaaccgccaaacgtcgtaggtatggtgagcagaatgtcaacgaagcttgcttccgtaggttacatggaagttaaaagggagctaattaattaatcttcaccgccaaacgaaaaaaaagatctaattaattttgttgttattggagaaaaaagaactataatttcacgcaatgtcaaatctgtatgccaatggaccacatttcagatgataaacaacagttaaactaaatgtctgcctgtttcaagcagaaaaaactgcatgaccccatagaactaattcatgccatttgctcttggatcgattcatgatccattttgtagaaatcagaggacgcgcaaagaagactgcagtcggagtgacgctgctaagaagttgtaacaagactctgttagaatctactgtctttcgttaatgaaatgggagagggctagctccctctctttctaaaaagaaaatcttggaaattctataacatattttactggaatctttaatttctcagtgttctttaattacaaagctgtaccaaagtatacttgccaatctagattaaggttcaaatcaagaaatgacatgcaagtggccccatcgtatatgaactaatactaaccatgatatatactcctatatgtgatgtgatgatgatggagatctagttagctagcacagagctagctacaccggtggcagcgcctccgtcggcgacgactcatctgccgccggcgcaggtcggccgccgccgtcccccggcggcggctcgacctccgtccggcagagcgggcacgtggcgtgcgaggccagccacatgtcgatgcactccacgtggtacaggtgcttgcacgccggcagccgccgcaccgcctcgccgccctgcaccgcgccgaggcacaccgagcactcgccgccgccgccgtgcctcgccgaccccgcgtacgcgaactccgggatcttggccgccacgtcagcgacgccacgcagtacgtcgtcctctcgcccgccggcgccgccggcgccctcggcggctacgactggcgcacgcctccggacgtggcggttgcagtagaagacgacgacggcgacgagcgcgacgcccgtgaggccgacgcaggtgtagctgaagatggccgtccctttgccaacggactggttctcctgcggcaccggcggcggcatactcatcgtcgtcgagccggaacgcgaacccatggcgatggcgatggcgatggcaatggcggtgatttgagctttgtccgtggaggaatgagccgcggcatcgggtgatcggggagagataaggactgtggtgttgactaagtggagaacattattttttaaccagcgttgagaattgagattgcacaggtgtgtttgcagtgaacttcctccgttaaaaaaaaaaaaacctgagtttccatgtccaatgtatgactgtccgtcttatatgaattttttataattaatattttcattgttgttagatgataaaacataattaatattttatgcgtgacttatctttttaatttttttcataattttttcaaataagacggacggttaaacgttggatacggaaacccagtgtttgtcttttttaggacggagggagtacctctcctgaatgctgatcagattcagagaatcagagtggtatattatcttcgccccaaaacacttgtcattttgagttttttttaacgtttgactattcatcttatttaaaaggtaatagaattattatttattttgtttgtcaaaatacttttaagtatgacttatcattttctatatttacactaactttttaaataaaaacgaacggttaaacattaaaaaaacaaaacaacatctaatttggaatacagggagtacttatcacggacgagaagcgcttaattactagcgcgaaagtgacgcgttattaataaacttgttttgcaagtaactaatagttctccggtcaaaatagaaataacatattactttgactctatgaaatggttagttagggagggaggactatagcaaaatacacatattactaccgagattgctaatgggtgattgatcgcccctagtgatcagctcgtgccctctcccctccatccacctggtttttttttttggcaccgtattacttttctaatttagtaaatttatgcacagtttgtacacctcaagtttacatatctaaagtttagggacccaaagtttataagtcaaatttatatatccgattcaaatttaaatttgaattcaaatattttttatatatagtattttctatacatctaaagtttatacacctaaagtttatagacacaaagtttataagtcaaaagtttacatacccgttcaaatttgaatttgaattcaaatattagtttatagaccaaaagtttataagtcaaaagtttacatacccgttcaaatttgaatttgaattcaaatattagtttatagacccaaagtttataagtcaaaagtttacatatccgtttcaaatttgaatttgaattcaaatattttttatatatagtatttctatacataattttttccaactttgtttttttatttttttaaatttttatggtgtactatagtaggaagagaagaatgggaggaggaagggggagagaagggagcgtatagggaggggcggacgatcacccgcccattagccttaccctattactaccaacaatatgtgtaccgtgattcatttattgatggttgtttgaccattcatcttattattttaaaacagtgtaattattatttattttgttatgacttataccattaaaggtatttgaaccatgacttatatttctgatatttacaataaattttcatgacttatattttttatatttacacaatttttaattaggacaacacataaaagaaaaactacatgtactactagtagtaaggtaaataagggaatacaaataaataatggtaggaattatttttcttatattctcctatctccatgccttattaagacactctttggtattttctttctattttaggagctacagagataattctaaaaatacaaagattattttagcaattattctaaatacataagcaaatccttccgttggagttgggttgatttcagcctactttcttccccgtccaccgttgagagagaaggaaattggcaaaaatcagtagactgtacactgctacggaaatttatctagacgagactccctttagttagtttgccgatggaccataactacttccacctacaaaatttgatctctagagcacgttttaaggaccgcatacgaaaatcaattttcgcagacgccccccttaacatgcccgcatgcaagacctcttaagaagccacatacaaaaataccccactctttttactcccgttccctctctctcccactaaggcctcgtttagttcccaaattttttttcctaaaaacatcacattgaatctttggacacatgcatggagtattaaatatagattaaaaaaactaattgcacagttagggaggaaatcgtgagacgaatcttctgagcctaattagtccattattagccataagtgctacagtaacccacatgtgctaatgacggattaattaggctcaaaagattcgtcttgcggtttccaggcgagttatgaaattagttttctcatttgtgtctgaaaaccccttccgacttccggtcaaacatccgatgtgatacacaaaaattttcttttcacgaattaaacaggccttaagtctctccactccacttctatgttttttctctcccgtccaccactcctgtcccttctctctctccctttggactccctcgccttcccccccaccccctcctctcctgtctcctcccacttcctctcctctcgacgaggcagcaacgggctcaggctttggcggcggcggtcttgagctcgagcttgggcgtcagtagtgggcaaggatgagagcggcaggctcagggggaggaatcccactaccggcggcgacgggaagggcagaacctgtgcccctccccctcttgcacggatcccgcagcctctctgcccccacgagcgcagatctgccgcggggcgatgacgatgatggtggcggcggcgatggcttctggtttctagggttagagttccgaggctaggtttctattttcagaatttttttttgcgatttttcattttcgtagtcggacggcttaagcgcccacatgagaaaatcagattttcacgtggggttgctctattcccatgcaaaaatatgatttttgcagacacctggtgcatgtggataacacactctcgtgcgaatatcgattttgaccgcatggaaaaaaatgattctgtagtggtggtagacacacataggccgaccagttgtaattttgtctttttttagcaaaatacatcgtattatctaaaagaaaaccatcaatagatgtgtagacttcatgaaaggtttgtacaacagtttcactatatcacaaaccgtagctcgaagttgttaaaaacatttcacattttgagtaaatgatgtaaaaccgtactcgattttcttacaaaaccatatatatactagtactgtctatattggtggcttcacattaaaaaaagtcaaattgtttttataatgtgaactcctaatagagactcgcacaagtacttagaaaaacggaacaaatgatatgagcttaccaagttcctttaaactagcttattaagtcgcgttttcgtgcgactatatataacctatctcgctgttaaatatgtttacatgttatttatggttgtggatttatcttgatttatccttatgtgtgaataagtgtttgtagagcattaacgggattaataatattcatccaaaaagggagtaacaatattatcatatatcaaatatttaccgtaggtacatacaaaattagtatttgaacaataggcttgtagtttgaaacagctaacacatattttgacggaataaaatgatgagtgtaagaatcaaggttagggtttttattggtcttatctgctggtatttctccttcctatctttgcatctataaccgtcttctcttctatgtttcttgagttgtgtccttcccttatatatatcctcctttatatctccgcttatggtacatatatttttgtaaattcatttttgtttgagatgctaaataggtgttcaaagaggaattttagttataaataaatagatatatcttctaataagtaaatcttaccacgaaccaaaatcagagaattttgcttactgtctcatgaaatttcctaaattatgtgcccgcctgccaagaaatggaatgatctagtataagataattacgtagccgcttgccatgctctagtattcattgtaggtttcgaaaaaaggtgccaagcaaaatcacatatgtaaagtgcaatacacaatggagtaaattcaaaatttataaggtccttgatgtaaaaaggtgagtaataatatgggagcatttgctaaagtacttttaattttcaggggagcataggataaaatatactaaagatgaaaatgaaagaaaagttccaagagtcagatgtcacgaacaggtggcattaggacttgagagctagctgtgagctgcacaaccctctttctatctctctccctctctcattttctccgtttgccttgttaccgacgaggtttctctagttctctctgactctctctcattctctagctgctggtctccaatggacgagctaggcccgacggaaggtggacatggaagccaagaagacttcactcatctttcccttgttgtgctcccacagtccctctacgtctcatcgcttcctctcctgttaattgctgtcgtgagccgacaatgtcaatgatgcagcagtgagttagcgacgttgcaggtgaccacttgagcactggcggagcggctggatggtggcggcgatgatagcacaacagtggggactggtcctctctctctctctctctttttttttttgattttactaaacttttccagattcttctttgccccaagattattttcagaccatttatcttatcctatggctatgatatatactttctccctatattatcgttgtttgaatcagacggtcctatattatcgttgtttgaatcagacggtcattattttgttgcttgcgtggctcatcctcgtttcatattgagatttacccgttcatttgtttagttttggtccctatgccctttttccatagaaaaccaagcaatgagctagctcaaacattacttttatttcccttttaaaagccaaatacttctccctttggttctcttttcactcttagcttggagcatcaataaaattcctatgttaattgatcaatagagaagatatctctatctctactacttcaaaaatccatagtggtggtcttgattcctaacagagcagacgcatctgatagacacacgtaatctcaaccatccgaatgccatatccaacagcgtcaatctcctcccccatcacgcgatcgctcatctcctctctcggattgatctcctccccacgccgctgcgtcgcctcctcgccccgccgccgcgtcgcctcctcgccccgccgccgcgtcgcctcctccacgcccgtcggcctcctctccagacccgcgatcgccgccgccctctccaatctcctccgcgcctccacctcgcatcggattgatcctacaccttcgccctcctccctgtgtcgcctcctcacctcgtagccgcatcgcctcatcagcagccacggctgccggcctcctctccagacgctccctcgccgccgccctcgcaaatctcctctgccactacatgataattgagctattgccaccaaattattacaacaaaaaataatacgtagcaatatattatactattacaatgataatttttctgtggcaaataattattttttattgcaacgatctacaatcgttgttttatttagtacttttgttgcaatataaaatgagatatcgccataaaaaatcgtactgttgtaaaaaacatgttctatcgccacaattttaatttttgtggcaatttatatagtacatggtacttttcactattttttgttgccacgatcaacaaattcattgcaataaaaaaattgtcgtctcataatttaacttaattttttcatatggacacggattgagacaaattttatatggaaattatagctctcgacgagatctacaattttgtaggtgataactttttcatttgaaatcttttagatattcaaatctatgattcaaatcttagttagctaggctcaaatggaacgatatgcattttccaacagaattgatgcgtaggtgagttggtaaaggagagcacgcgtgaaggataggtcttaggttcgaatcctagccaagacacaaaatcaaaaaaataagtagataaatagataggatgatagattaatatttgaacttttaatttggtacgtaacactaatgccacatatggagtggtggcaataatttttattacaacgatgtaaagtgttgcaatatgactttttgccacatccattccgtggcaacatctaaatttattaccacaaaataaaaatcattgcaataacctattaccacgctgtctattaacacggctagcaacgattttacaattgtggtaacatgtatgtattgccacaatttaagtattgatgccacgatttttttcgtggcaacaaatgatttttctagtagtgtgcgcgctctcatccctcccttaaccatcaccggccgctctcatctctcgccaggtcgtccaccagcccgcggcgatctctcccgccggcgtcactatcgacgccttcctcgccgatctcctccgcgccctcgccgcccccgatctccgcctgggtgcccgcctccacgcctcccccaatccgcgcctccagatcaccgttgcccggagtctcatctagccgtctgcaatgggcaggcacgatggatcagtgtttggttctttttatggggtatcatcctgcatgtgcagaaaagtaaaggtgaaacacatcaatcctaactgctttttcagtttttagctctccttcgtggatttagtgttctgatagatggaagtgctgtttcagtttttagctctgtatttcatgggtttagggttctaatgagtggaattcctcccgttgccacagaacaagcgagcctagatgatggagaaggagaaccggtttggacaggatcaatccaattactaatgggcgtgcaactactactgcgacagcacagggaagtgtatgcatatgtttaggttttcagattaaaattttgattttacaaatgtttcagtacttcgactcaatgccctgcaaccaatcttgtattcaatccaatttaataatttacccaattgagtttaggatagtttaacaaatcaatcgggagttcaactatgaattgtttcgctgtttcaggtcttcagacttaactgaagtttcaatgtcgccgccagatcaccattgttttcggtgttttaggtctgactaataatttcttttgctgatcagacatggattgatgacctccacataaaaatgcatacaagtctaggctttatgtggagggctccatggatactaataactccaatgctaacatatcttctgaagaatgaggatgatggttttttgaaaggtaaggtatatttctgtctccttagctttccgagatatgctgtatggcacagcgaaaaacatctgattctttccgtcaatatttaattgacaaatatatgaatttcccctatttgttggactaatatgtgtggtgcaatatttacaactgttagataaattcccaggtaacatatgagtgtagctttcataaagctcacttcagattgtttattttcaagatagctgaacgtctgaaccgtcaacttgtctcaagtatgagtctgtagtaggtttcaaatgtgaaggttttactatagactaggaagatctaattcctattttccagtattctgctttgattgctatttgtcttccaatgcaacagaaaagtgcctcaagccacaatgtgttttgtatatatatagctacaactttgatttgagacatcggagagtcatcatagtttgatcatttaccacactttataaatgtaaaatgtaaaagagtaaagtgcacatgcggttcttaaacttgtaggggtgttttatctaagtccctaaactctaaaaatgcagatccaaatctcagaatttgtcaaagtgtgttgcttaggtcccaatttgtcatagcccctctaagatcctatgtggtgttgacgtggtatgccacaaacacggacgtgacatggcatcatcttgactgacaaatgggaccgacttaaaattcattttccttttttcttctttccttctcatttttctctctctttttttctttttttctcctttctctgtgacccgagcaccccgtgcggcggtggcctacagttgtagatagagaaaggagtataaagggaaaaaaagagaagaatgagaatgagaaggagaaggaaaagaaaaagaagaaggaaaaggaaaatttttaagtgagtcctatttatcagtcaatattatgtcacgtcacattcgcgtggcatatgccacatcagcactttatcttcaagtaagaaatggacaatattctttttttttgtctaaatacaaataataactagagtgacaatatacattttggttgttttgtagccctgtccagataatcaggaccacatgaagcgaaatggatggtttaagtcaagctaattttagatatttattattttgtgtatttgataggagcaatacatgtactttatagc

SEQ ID NO: 26694 - DNA, 685 bp, Oryza sativa
tagtacttagtactaagtaaggctgcggcgctatgactagatgggctatgaactggcaaaattcccattctctgggtttgattccacccttgcgtctgtgtgtcacagccctttttcagcatacatttttcagaatgcaaaaaagttcaccaaaaatatttctgctatactaccattataatagaatgccaccagtaacagggagaacatgcacctcaaggtaattgtaaatcggttccccatcagttgaccaagagcaagaccttccttcacataactagaacaggttaaataaattactgaggcagtcaattgcttttagtcaatgacattacattgatgctgaaagagggatgcactttcttacctgaagtctccaactttaatgccaatgagcttactgttaagagcaaccaacctactagcttgcaccttgaaaaccgtgacctgatcagaagttagagaaccagaaaaatcatgactgcaagaaatgttgaaaacatagccctttctgtttattttcaaaccatagcacccattcttccttgagatgacaacagccaataccaacaacctctcttaatttctttccatataaatcattacctcatgttctttatataacaagtttgttattttaaatatcacccagattgcccatcaaacccatgaaaagaaagtcaga

SEQ ID NO: 26695 - DNA, 4526 bp, Oryza sativa
aaataaaggatttggatttctaaggatgaattcctatggatgtcatttggtttgtacaaatgagatataggaaaattagagaattttttttctttcctactccctttgtctaaaacaaactcaacctaggtgggatgtgaccccatttggtacaacgaatctgaaccgtcctttatccagattagttgtattaggaggggttacatccccacctagtttgagtttttttttactaagggagtacaaattatagagagaacatagaaaattttccatccaatcaaaacttatgaaaaaattcatatgagttaatgtatgcatttattcctattaatttatttttccttttcctacaaactaaaattcctctaaaaccaacaagcccttaagactctagcaccgcatactagttctttcacattatcatttttatttaacaactaaactttaaaggtaatatgtactagatttcttaacgtttttattcataaggccatattcgatttggaggggattggaggggtttaacggagaataattccacaccaggtgtggaataaattccgtccaatctctccctcttgggattaaccgaatatggcctaatgggtatttggttgggttttaatagaccacaccgctttctaacaatgcacaaatagtagaaccaataattcgattgggtaaatgagagaccgataagtcagggaaattaattgtgaggaaataaaaaaaaaagaccaacctagctaattgatgaaactgaaaaagaatatatataatcgatttaaaaagatgctccctgttgatgaaaatgacatggtcgtttaatactccaatatggacttggagaggggcgtacatgaagggacgacgacccactgggtgggaaaaagacggacataattgccgataatttaggagccttcctctaacgtatttccgtgtactagttttctctttagacaagcaagcaatggaagaaaaagaaacaaacaaagaaaagaaagaaagtgacatttaattagaaagggaatatatatttgaggcttgccaacgacccggagatgtcacctttttaattaagataatagaaaattttattgaactcagccaatcacattaagatggttaaaaaacactgaatatatttccgacatctgtataattagaatacacagtcaaaaaaacacacctaaaagtttataagatgaataagacgaatggtcaaacatgtttaaaaaagtcaaggacgtcaaatatttagggaaggagggagtatgttattttcgtcccataaaaatagaaatagatacattagtcctagcagatgttgggatgaggttgacaaaagccaccaagaatgaactggagatgaaaaggagagagatggtggtctttctcatagtctagatgatccatgtttaaatcgtttatgatatgttctcttagtttcaatggtttttttaaaacatgtctacacagcctcaatagtctatagtagtcaagggaattattcaatatataatcctgtgaaaacaaattgtacattattttctttgtgcacatatacatatgaacggtgttaagcactacctataagtacttaacgcagttagatcattgtctttacttaaaatatcacatatctatatatgcttatctctactaccataaaagggagttgtcctccggtttccacctatcccacgttccaaaaataataataaaaaaaactgttccgtctgcacccttttcaagtcccagaaaaccgaaagaaaaaattggaaaagaaaaaaaaaagtcccataacccgttacaatgcgcctccacatcataacttaaagaaagaaaaaacaaagaaaaaaatattttctccatatcccgttgtaacaatgcacaggcatgtgactagctagtcatcctaaatatcccaccggcatcacatcctccaccatatacaaaatccttttctccgtgcagtcaaaatccatttttccgtgcggaggtagcacccgtctacacccaggggtctgaaaaaaatcaatattttcacgtgcggcggcctaaccacatatgttaagtggactgcacgagataatcgactatcccatctagtcaacttataccgcccgcatgcacaaaaaaataaaataaaataaaaacctaaccctaaccctagaatcgctcgccgccgctcccgtcgtcgtcgtcgtcgccgtcgtcgtgccgccacatcacccggccacacccggccgccgccgccgcaaccagctgccagcgcaactcgtcgtcatcacgacgccgccaccgctccccgcagctgccgtcgagcccgcccaccactgccaccgtcgtgccggacgccaccgccaccggatccgcacggatctgggcgggggatggccaccgccaccagatccgggcgagggacagccgccaccgccggatccgggcgtggaccggttgccgtcgcacccgagccgctcgccgttacgaccaaccgctgccgccgctctcaagcccaccactcccggccgccgccaccattgtgccggcagccaccgccgccgtatccgtatggatccgggtagggatggccaccgccgctagatccgggcgggggatggccgctgccgccggattgagtgggggccaattgccgtcgcccctcgcggccactcccgagtcgctcaccgccgccgtctaccaagccgctcgccgtcgcgcccgcccgatcgtcgcctcgtctccagccgccgcatcgcctcgcgcccattcccggccgccacctcgtcggcggcgccgccgagccggccgcgtcccgtggagaggagaggagaggagaagataaagagatggaaaaagagatagagaggagggaagtgagagagagaggggagtgaaaataaaaaagtaaaggaagggagaggaggtgtgaaaattttgaagtgggtgagagggagaggtattttcgcgtgcggtctacttaatatgcccgcacgcaaaaattgatttttccgtacgtttctcttaaggagccgcacgggataatggggatcatccatgcggtcggattaagacgcccgcacgggataatgcattttcccgtgtgggcagcagcccggtgccggtcgaccggtttttccagacaacaccacttacggttcgtctggaatctaccggggccagcgtccaggaaaatattttgtgtaccagtgtacctccctctcaataccacgtatttcttcttctacgaagctatatatttggccacaaaattagaagggaaaagaactagaaaatagaaatgatgtccaataggtatgccaatttttttttgatcaaacccaatcaccttcacaacaaatatacgacactgacccggtgacttgaccgtttaaaaaagccattgtcacacctactttctttctctttctgcatcttacaaatgctcttgcctcttgtaaggatgtaaattaaacgcggttataaacacatgggtaacacgaggtatacatataaacttgtacgctatctagttttttttttcgcccctcccagtgacacactatatatacgaaggaaaggcccgtcgttgtctagctactagttgagttgtgcagccaagtcagctgcacatggggaacaagcgtgcaacagccagtacacgctactacgtactacatgttatcaactctaaccctccgtttataaaatatatgacaatacagacttttaaacactgttttattcagaaatttagtgaaagtatgaaaaatataagccatatttggagtaactttaatgataaaataagtcgcaccaaaattaattatacttacatatttctttcgtcccaaaatatagcaatttatgttggattagatatatcttgtgttaatatagacagtcctaatttaaagacggattcagcgtgggtgctactccgttgaataaccattgagaaaaaggggacagggaaggaggaagaagagggagagaataaagagaagtggggtcttgaggaggaagtcggagataagccttcccctctagtagaattgtggatctgctgatcttggcccaatctaaataggtggctgcttaaatttgtattgctagatgatatattcagtattaagtttatattccctccgtcctagaatattagcatttctaacaataaatttgggcatatatatgtttagatttatagctgaaagttgttatgttttacgatggaggtagtatattttagtatagaggcggtagttttcaaagagacgaaaggtaaaacttcatttataaaggtgaacggtcgtattaaacacagagatagtatagtggcactgtctaattaagtaaaccaccacccactctcgtcgtacgtacgtgtcctcggctatatatacctcctccgtctttctcgcctttcgccaccaccaccaccaactcgatcgattctttccacggtttccatactacacgaatggatcgccacgtcttgcagggcggcggcgccg

SEQ ID NO: 26696 - DNA, 5868 bp, Oryza sativa
gtccagttacggcggcggcggcgccggtggtcatcaggcggatgtggtcgtcgtcgacggggcgttcctgatggagctgctcgacgacacgccggcggcggctgtggcggcggagcagcagccggaaggcgacgacgccgacgaccggctgagccgcgtcatgcggtccctcgaggccgagctcggcggcgccggggctgccccggcgccgacgtcggcgccgccgttggggtcctcctccggcgacggcggctcgccggcgagcggcgacggcggcaggctggatcagctggatgacgtgctgtcgctgtccgacttcgacggtggtggcagcagccggccgggctcgtgctcggcgccgccgttcgagtactgggcgcgggcggagttgccgccggcgatggggcacgacatgggcggcggctggtgcgtcgacggcgacggcgacggcctcgccgccgccgtggcagggtacgagttcgtcagagagccgtgctactacacttacggctacggttacaacgagagctcacatgtcgagcagccgtacagcccactttgggaataattgacaaattaaataaaatttaggaaaagaggcaagaaaaaaaaaagatatgcaatcatggactaaatgagggcagatatatcttcagggtttcttcggatcgtaggaactttagaagaaaattggaggatccaattcctacaggatttaagtattgttcactcaattcggtttggaggaattgggcatgtgaaaattggaagattttttttccttcacctatgatttcataagaatttcataggaaactgaacattcactgggtcctctttttcattttcctttgccaagacaaatcctcaattacattgatgaactgtgcaataattttttactcgctactaaacttcagaggggaaaagataagagagaatgttcagttgcctttttattatttagccattttatatatcttgcaacgatattaggacatgtcaaacatcaggctgtttttacagggaacatatcttggcatgaaaagcaaaagggggaaaatggggagacctaaaaagaagctgctaactgtgcaaaaggagagtgcataggacgtacctgtttctgactttccgctcctctgaaatttatgcatctcagattttacttaatttcaaccaaaacatgcttattgcttgtcactgatgaatggcaggctgccatcaactacgtcttccagaattctgcctatctttcatgtgacgttaatgttcttgcaaaactttggtgttagcccctgttctacatgtaagattcgccatgtttcctctcaaaaagaacaaaaaatatatcgcaaatgttggtcaacttgtagctgtatccctaccaattcttagcttccattgtacaagcttaagcaggcagatcaaactaagttttcaagcatgccatctcagcctgaacaatgaactcagaatttccacaatttgcaaccaaaatggcaacctcactacacagctacaatcttgtgcttatgaaaactttagcagacaccagctttccaacaatccaacgtgcacacagcttttctaccacatctctagtggttttctccacacatgaacagatgtctagtgttgtgtcagctataatctaatgccagccaggtcacagggatatcttccaaatccattacctctcactcattggtataaccgaagacatgacaatggaagaaaaatctacattacgactgaagtactgaactatcattgcaaacagaggatgagaatgcacaattttgttctatccaacaggagcccagcaaagtgattgcgtcaaaagggcatctaaattaagcactaaccgtttaaccgtccttgaacaaggatacgttacaagtgggattaatgccgatctttactagaatataccaccaggtagctacatcgctgatgcgcgggcttgacatgaaaatacccatcgaattggagtgcatttctgagggagagctcgtcagatccacaatgacattgccgtagtggggaggccagtaggcatcttcacatcagaacctagcacacagagaatgatgttagttcccggaaaacatggctcactgaacatcctgctaacaaacaaataaaatctataaataatgttgaacattgatacaatttatgccagaccaaacatatgcaagatcaaaaactcaataaggatagtcgtgatcctggatactgcatagttgcacatgacaaacaaatggatggcatgaacaaaaaatgctgaaactcagtcacaaaatgccagaaccatgcacattatcagcactccagtcatgtgagttttagaacaatttaataacttagcaacaacgaatcaaaacaaaaaattatagcataatcctcgaagttacctctaattggcaggtggcattgtaatgaatgcagcatgccagcatgtggtttcaactcatttaaaatataaaaacgtaatggttttcatgactgaagtttcatcacttgtattgaatgtatcaacatctaaaatccaataaattatttcctctaatgaagtgcatttcaaaacatgaccaaacaaatacaccattagaagtgggactcaggagtcgggacctccgctatttaccattgaaatattttggtacactttaataccatgaaaaggttgctctgttcatattttttaccattatatggtagtcaccatctgccatattcctgtattactagccaaatacatgtgcagtgctacagaacataacaatatacgagggacagcagcaacatgtgggatctctggtgagggtggcaccgaaccaagcagatctgaaccagtttttctgggtagctggtcttttggggaagttggctttttcagttttgtaggggataacaggaggttacgcacatagcgcggtggagtttggagagccaacggccgaaaactcatttagaccttgttcagttattccccgtgagggaggggttggaggggattgagggagattaattccacatctcaatatgtatggaattattcccctccaaatccccctcaatccccttgtgggtgggactaaccaaacaaggccttagagtaatagagatttttgttctttagaccaatgtgccctgtgaaatactacatagcaaaaacatctagatgcatcttggtctatcgatgattgattgacctgcaatggaggcatggatatagtgcaggtgggctaactcatctctgacaggaactggagatagaaccaggttggtaagggaccttgtcccatggagcagaatttgccctcaattttttgcttcattctctgttctagacacccgttaaatctttccatatgtgatgatctagctgtatcagagaactctgagctgtcaaagtgccccggctatggtattccatgatggcaacctagtcgtctaaacatcgcctcaaactaatgcaccgcatttgcttgctcacctgcacaacacccgcctcacatgtgcaggagcctttgccggatagagcacttgctcccctgctgtttcattctgaccatcatcacatggggtcttctaaccctgatttcaaaaggaagggggtgattttgaggaaaggggatgaagctcaggctagaaccaagaaaggtgagtgcggaacggttgggaggctcaagctgacagaactagtaaaaacattaacaggtcagccatttgaaggtattaagtgtaacagaacattgatggtatatggagcaacatcaatgaatttttcatgctatagaaccctttttcacttgagtttgaccacagaagtatgaggaagtcatgtattgtggatttttctcatatttaaataagtagaacaagtacataactacatattactaatgaaaggaaattttgctgcagggcactccaaaattgtgggatttgctacaagacattccaaaattgtgttacttgctgatggactctgcgagcatcattatattatttccacccaagtgaagaaagataaggtttgcagaaagtctattttgcccttggtacatgtattcagtgttctaaaagtttggccctagtcgctaagcgctagatagccgcaccgattagccattagatggctcattaggcagctaaccatccttggaggtccttgtgctgctacttgtttgttctattgtgtaacttttatgcaatatgcttgctaattgcttggaattcactagtcatgttggacctagccaacaccctgtcgaccgtctagtgcacagcgccttcttgaacaatgcatgtataatcatcctctttggacccagattgtgtaaagagagaaagcaaaaaagaattcaggctaaacaagttcgatggagaaaacagaagcagtgaggccattttcgaaagttgctccctgaatcagtcaaatatgttattttaacaggataagtgtccagtatcaaattactacgaaatacaaacttaaagagtgtcttctagttaataagtgaaccatgttttttgatatcttgtggcaagaccacaattttagaatttcctttagcaaattttgccttacggaaaacatcaaaggattctaactatttcagaacgcatgaggtgcatatctgcatgttatttttcaaaaaaaaaaaaaaaaggaaagaagaagaagaagttaactacgcatctaagctcatcactcatgaatgcccaaaaatatgaatggcaatctcctctatcaaatcaaggttgtgtggatgcaaaactggccccaatagtcagttctgatttgaaatactaagttgactaaggtcctttataggaagatagcttactccaaaaaaaaaaaagcaaacaagtataaacaatctcagcatgaaatttatgtatcaactatcaaccatacattggcattttctaaccagactctattgctctttatcacacacagggtaactttgggttttgcgcaaatttaatagggttgtatgaggatgataatgttttagtacataatacatgcatgtacctttatgaatcaacaagataaaaagaaaaatgcaccatgtgtaaatctagcaaggcaataactaattactaatatgatactgggactggttctacaaaagatttgatgctcaaaggcaatttccttttttgttttaagaaaaaaggggaaaagtcttgaactgtgctagattcagtttttcaccttgaactacctagtacgaggtaacctcggcattccaaattaaccccagcctccttcaagaccattacctccttattagtcatcctcgactgttaaaacagggaatacatcaagtggcataactaaataaaaggatgtcataaatacctcgtggaatgagttaatgagttcgtttcattattcaacctagagaaaattccttattttccatctcacgatgcactttccatatttttcattcataatttgttattcccttgtacaccactagttcaacttctctacccttttgtgacatccacatcaccaagccacaagagtaccacccttagagctcagaattttgtaaaaacagcaaactttgcccccacagttcaaagttagagctcgtcaactggtggttcaaggcagtggtggcagatctggaggatgggtatgactggcagctcaaagtttttttttacgagaaacggtaggagagactcctaccgttataatatattaaatatagatatgtacaaagttacatagctaggaagtcagcaggctcttctttgtcagtggcagcagccaatacatcaaaatcatgggagtagaggaagaccaggagatggcacacacaaccatcg

SEQ ID NO: 26697 - DNA, 6410 bp, Oryza sativa
gtgtatgtgtgtgtatgcgtctgactgcagaaataatggctggaaaaggctcgatcaagggaatgaaaaggaaatgcaaaggtcaggaccgatgggaccgccactatccacacgagaattaagtttgcaaatattaatcttgcttgcgttgtttgagaaacacaatcatgcatgttcctcgcggaaataaaagtaaagttaagtagataagggttaatcagtgacgggggctcataattttgtataagaaaataagagcaaaataagagcaacaacttgctgcagaagaacattaaaggaaagtcgtaaccccgatggtttttacacctttcagctgtaagctcaaagccgacatggatcctaattgtggactgtatgtttttttttttgctttgtagaagcatcactataacgtaaattagtgaacaaacaccaaatatagaatataattatataaaataagataaccatgatcttctccactggtgagtggtgactgacagcaagcggtgtagtaagaaaaatactgcataaagaaagggatatgaaatatccataatatgcatcaaatggacgctaagtgatcgatcttatacctcccggtccaaaacgtttcaaagtttgagttaggggaagccatgggccacccatcttattgttagcgacagatcaactaaaatctttcccaagttttgaccgaggttaaaaactaaatggttctgatagttcagattaaatagtatttgattttgaaagttatttgtttttcattcttcacaacgattcgaggttgcacaatggtcctttacttttattaatttctagggaccagggttattcacgtcattccaatttatgtacttggtcataaaacaacatatatattctttcataaatgaaccttgcaaaaaaaaaattggagaaaatattgtgcttttattggttaaataaactatttacaccaactttttcatccacacctctcttgtttcaaggaccgaaaaatcaaacaaaaaaatgaataagttactcttaatttgcaccgggtaaaaacacactgtttcactttacactaggtttagaacatactttcgttttacaccaggttgttttaaaataagtttcacctagcagtaggatacatcaccaaaaacctatagaaatttcatcaaattttataaaatacgaatggaactttgtaaatcatggtctaaattcaaaacatttcataagtttcacctgtagtttataacattttcctttaactatatgactcaatctagtaaatgtcaaacttattttgatataacatggtagaaagtgaaaatttacagtaaagccagtttgaaacaagatacattctacccagtacaaacttcaatttacttaataaaaaattcagctacacaaaaatgtcggtttgatttcgctataacgttagtgtttgactatataattcagtgcgccattgtaagtaacaacgtcttatagtccgatacatttggttggctcagctcgctatccagttattagctacgagcaaaccttgggggactctagagctacacttctgagctttaaaagtctaccaactgaagcaacaaatcaaggtggcatatctacctgatgcgtgagtcgtggatcgattgttcatatattttaagttgtgctcccctacgttaaataatatccaatgtcgggactaactaaaccccaaaaggtggagatcacaaatatgattcacacgggcagaacttgaactttttggtcaatatcaagtacgtactatggcatctaataattgaagaacccaaaaggaagaaaaaaaaaactacctcaattattggcatttcagtacagcgctagtgatgcatgtacacccatccaaggacaagaaaatatgcttggaaagctaggaaatctagcttgacacggatggacatccacttggcaggtgcatgcatgtgtggtaaacgactcaacactcagaggtggcctgtggccacccattttgcgtttgccattgtcctcctctgcatataccacagtgggagaaaattccacggataagacccccaatttggatgcattgctacttcctaagcttgctatcataaacatgctttgctgccatgtgctccatacctcctatagtgcgtgtggatcagaggatggtgcaacttgtatgtgtatctagatgatgtctatgtatgtgtagtactatttggtcagaacatgtctagcctcacaaactgccactactagaaaaataaattttaccaacacgaggacttttatttttccagacgaattaaaaaaataccgtttgcaaaaatagctagaaaccccctagatctagtcccgcctacgacaatcgaatttttctagacagagccttaagcactctgcctgtaaaaataattttggaaaaattttattatcgcaggagggaccttaagtggtctagcggcaaaatatggagatacgtagtagctattaaatccgctaagtcccaagacctccacctctttcccccactccctcttcctcagcctctctcctctcctacagtagaagtcagcatcagagaggggaggacagtggtggaaaagggtgcggcggttcagccctcccctcacccccaacctctccctcccaaatcccaccggagggaggagtgcagtggcggtggcggaagagggtgtggtggagcggccctccctcctcgcccctccctctctccctcctagatcctgtcggctggggagtgcggcggcggtggcggaagagggtgcggcggtgcggcccttccactttctcccggccagatcccgccgggaagtgcagcggcggaagaggttgcggcggcgtggccctccctctccctctcggccagatcctagtgcagcgacgcagccctcccctccctatttcttccactccctcccatcctctccctcccagatctggccagaggggggaagtaggcggcggcgacaaaagagagtgcgaaggcacggccttctcctccccttcctcttcctctcagatccaaccggaggggggaggccggcggtggcaactgcaccagtagagggcagcagggagaaggtaggcagtggcggagctgtgacgacaactccttcattggcaccacactgcgatgacaatgattatgtttctgtttgttgtttccatgttgattgatgttaacctacaagtcggtgttgtgaatttgaatccggtgctcttgtgttgatgtatggatgtttgtgattggaatttgttggatggatgaaaattttgtgagaattgtgatttgttatggtagcaaggggtgtgaaagcgggggggtctggtagggattttttttttttttgctccgagattattttcgtgggcatgcggctatagcgactgggaagatggagaggccgcctgtggcacttggtccacctactaaaagttgatgattttcatagtcctttaggtataggcggaagatttggccacttacggaaacatgttttggtcccctggaaaaaccacttctcaagttttatatttatatataatatataggggtgtgctaaaacgcaccctaggtagtaaatgttttactacgagttatatgttagacttagtacagggatttgtgatggcttcacttagtaaaaaatgcacactgaaagtgcaatcatcacaaatccctatattaagtctaacggtaaaatatttactgtccagtattagagaacatataacgcgtagtaaatcatttactatgtgggaagtgcgttttagttattacgcacccagggttcgttatattttacaccttttagtttgttaatttctcgctttattagaggctggagacctttgaaattagagagagaaaatttccatgtggatctcttggatagcaacacatcaagggcaatgtgcagggtgtctggatgactatatcttgttggaattgctaaatggcatttgacaaaaaaatcaagtgggtttcttacagattttgaaccacctaatttgctcgaagatttttgtatgcccaactcctcctcgatctagttccggggactagcagtgacccaatgagttacgggtcagggttttggattggggtggccgtgggatgggggtaacagccaacattggcaagcagggcaaagcaaagcgtgtggttatgaggcagcggtcatgagcaatggggagccgctggagacggggaagatggtggtgcaagggcacctagctgccggcggatagaggagaacaagaggggggagggggaaagccagccaggatgggccttactggtgaggctagacagtggcgcattggggcggtggtagcggaggagacagggttgaggcgtcgaggtcgctggcgttggtgcggggcgggtagagggaagaagcggaggagggggttagggtttttgggatgtgctcaaatttcaaagggatctaacgatctaaaaatcacaatatattaggaggcttctatcaaattgataatagatggtctcatttcttattgctagcaaccccgctataaggttctgtaggaggacaaaggcattattgtggtcacatataccatgcacacaatgtgcacatcgcaatatgtaaaaaatggctgtgcattgataaaaaaaaagaagatattatattctcggatttagggatatttgtgagcatcaggatttgaagagaatcatacattgcaatatatccatgactctaccattccataagaaatgaatcctccttgcttaccatctgtattacttagaaacaatttataaacatagatgtattgaatattctagccgaagttacaaaataaaagggccctgacagatagctctagtcactagctaccagaaactcaactagccctgacagcccaaacagtcagcaaaatgcataatcacgtcaggaaaatacatcctgatatggcactgttaggaaaattccgtcagaactgacttgtcggaatttttttaattttcctgatgtcgttacttattataaaaaaatatctttttgtcacctaaagagcttaagaaatatattcatgatatatgatgtgatggtcgatttagcacatatataaaaaatatcaaatatatagggttttttagatacaaattagttatagtagtaattttgttacgcatctgaagacacttcttccttttcataaaagaagaaaataattcattaggtaatgtactagtgaaggtatatatgccaggatttagcttgcataggtacgtgtatgatattttactcaatctgtaaatctctattttacaatcaatatgcaacaaataaattaatcattagtataattttactgaactttatttgaatttataatttcattttaagtgatgaaaattttgcatgagttagtcactccagctgaatgttgggaagtacaaagcaagcagttaaacatatcaatgagtgtgtctacattttaggcgacttaaattttaaattatctctgccacttttctcattccttaataacaatccaacagttctcatcacttcctgtaaagttcctcatttcttagatataaggttggatgataaattattctaacttaaatatgtaaacatagaataaacttacaattagtaaaagtttacaacattgcatggaaattattcaaacttggatagacaataaagcaagtctttctttcgtttccatcccatcctcgtgtcagaaaaaaccgcttagtttccaccccatcccacatcaaataaaacgctcaataaaccgaaagaagaaatatgagagagaaaattgaaccatgtttcccatatttaattgcaacccacgggtatatgtgagtcacgtaataacaaaattgaacttaactgagctaaagttatgcattacatacaactgaaattttaagattgacagatacaattctatatgactcaaaactatacaaactttaatttttggcgtgtcaaatctagccaacagcaacaaatagtcacaatttaggtacataggctattgttggttgatatatacattgtatggccactaatatgtcacgatgtaatgataaacacgagacaataaaatattggtaaagatgggtgttagggatgggtctggatggttattaattggatgtgacaatatttctttcatatagttttaaatttagggcctgtttacatcacctggcaagttttttcacactgttacatcaaatgtttggacacatatatgaagtattaaatatagaaaaaaaaactaattctacatattgcgtgtaaattgcaagacgaatcttttaagcctgattgctacatgatttgataatgtggtgctatagtaaatatttactaatgacagat

SEQ ID NO: 26698 - DNA, 583 bp, Oryza sativa
atcggatcctgttaactagcacagttccttttcccctcaactatcaactgctccgcagaaacattttaacttactttttttaaaccaatctttctattggcaatgtagatctataatgaagggtctataatctattgtaagtttttttttcccagcagaaggagaagaagccactaccagtaaaaccatcagacatgaaaagaacgagaagggatcgcagggaactggaaaatatcttattcaagctttttgagaggcagccgaattggtctcttaagaatctcatgcaagaaactgatcaaccagaggtattttttctcaagttatcctaattatgccgagggtggagcatttgttaagaaattgctagcaccaactctagttattgcatgtcctgatatcaaagcctcaactctcccggcttgtttctgtgcagcaattcttgaacgagatcttgaatgatctgtgtttctacaacaaaaggggtccaaatcaagggacgcatgaacttaatcctgaatacaagaaatctacagaggacgctgatgctactgctacttagaagtcttatgcttcggtctac

SEQ ID NO: 26699 - DNA, 14190 bp, Oryza sativa
atctacatgatccgatccaattgactacatgatccaaatgtactgctaattcccgaatacctgaacaaaaaaattctaatccagacaagtgaatttttgtctgtcactctatactggcgcaccccagtctcgatcgagtaggccgagagcagctgagagctcatgaaagtagacgagttcatccatgccaaacaagctctcgccgtcaaggaggcacccatccatgggcttcagatccgcaagaagctccggcgccggcggcgttgactccatgatcggttcgtcagacacgccggcggctgtgcacggccgcagacgttcttcctcgccggccggcgcctccggcgggctcgattcatgcgatgtctcgctgttgttctgggcgtcgtcgccggagcacggccaggacacagaagcatcgccgccgttgctggaagcgaagctgatgaccatctgcgccggcgagagctgatcctcctcctcgccgccgtcgacgaccatggcggcggcgtcgtccccatggcggcaggtgtgctcgccgaagtaggtgatgatgtagacgggcgaggcagtgtcgtcgtccgccgtctccgactgctggacttgcttcgtcgccgtgcagccatggtcgtccttgtagctgcaccggtagtaaaacctcgggtgcttgctgttcttgatctccttctgcccgtacttcctccacagaaatttgtcatccattgtcgctttcctctcaatccttgctccatttcctccagcattgctcaccctgcacgatcaaattacattggttaattctcaattattccagattagtctcaaatgtacacaaattatattaaccaactaatcgtgtgaacttaatcaagtactcggttaattactcacctcatccttttggagctcgctgcagctgaagcggcagtcaagccacgaccacgccccggcttgcgcttcctgccgttgccgttgccggcagcgtcgtcgtcgtcctcagctccggcgaggttgacgccgtgcagcttggcgagcgcgcggtcgaagcagaggaggatctgctcggcgaggcccacagggccgtggagcgccgacgagccgaccagcagggcatacaggcgggccgccgactccctcccctcggcgacgagctgagccgacgccgcggtgggcttcccggcgatggcggcgagactaaccatagtgagcgccattgttaattctcagctggacagttggtagcttagcttcagtcttagcttgtcacagttttggattggcgactgcggtacttatagatggccataaggcccgcccggcacggcccggcccaggcacggataggcacggcccgagagcgatcgggccggcacggcccgattggaatttcgtgccgtgccgtgcctgcccatgggccgcacgtcaggcccaggcacggcccagtagcaatcgggccgtgctgggccgacacgaaggcacgatcagcccattgggcctgggctagcccaggcacggcttaggaccagtggatcagtggaccagtaattcagtggattgacaaattcaatggatcaatggattgaacatgcaaaatttaaatttaaacatgccttagttaacaaattcaaatttcacaacttacttgacaaattcaaatttgaacatgccttagttaacaaatttaaattacacaacttagttgacaaatataaatttgaacatgccttggttaacaaattcaaataacacaacttacacaacttagttgacaaattcaaatttgaacatgccttagttgaattcacagttctagattcacatatcacctttacaaaaattcacagatcacagatcaaagattcacagatcacattgacaaaaattcatagatcacttgactaagatcacatatcacatggacaattcacagaagagtttcaaaaatcacagactcacagttgtagattcaaaaatttcaccaagtcaaattacccaaaatcacaaattttcacccaaactttcacccaaaaaacttgacttagatcacagatgacatggacaattcacagaagagtttcaaaaatcacagactcacagttgtagattcaaaaatttcaccaagtcaaattacccaaaatcacaaattttcacccaaactttcacccaaaaaacttgacttagatcacagatgacatggacaattcacagaaatcacagttctaagattcaaaagtttcactaagtcaaaaattacccaaaatcataaactttcacccaaaaacttgacacaagtatttcaatgaataaagtagctgtgtagtgcaatggctgcctcgttaaaaacctttctaggtaaaaactcacacctcgtgagaaaaccctagaaaggaaaaaagagtgcaacccacagcattaatcaaatgttcataataaagtccaagtccaatacaatcatccagtcccagtggcagtggttacttcatcaagaaacaaattgtcaaaagagtttataagctctaaattctccatggtatgttgcatctttgcatctgcttgctcccaatctttgattagtgccaaagcttgcaccatgtcaggagctagacgccgtcgtcgctcctcgatgatcctgccagttaagctaaaagcagattccgatgatatagtagaaacaggaacagtcaaaacatccctagctaatatggaaagaataggataggtgtggttgtgctcatgccaccagttaaggatattgaagtcatcatcgtattggttgacagtgtcactgtcaagataggcaaacaactcagatgcattcatgttagcagtagaagaaacagcctgaatcaaagcggtagcagaagttctcctagaaaatgcaccagcaccaagtccagatcctgcactggcaccagcatcaccaagtccagaacctggactggcaccagcaccaaatccagaacctggactggcaccagcaccaaatccagaacctggactggcaccagcaccaaatccagaacctggactggcactagcaccagcattaccagcaccaagtccagcaccaagactggaaccacaagcagcagcaccaaaaattttcccccaagctgtctttttcttaccagaagaagagcttggggtttccctttgtaatctcacagcaccaaatttactttcatacttagcatacatgtcagacaatgcagccctaacctcatttaaatatgcagagtaatcaccactaataagttgtcccataatttggagaacattgctaaaacccctgatcttggccctaggatccaagataaaagcaaatgaatacagaaatggaatctcagaccagtatgacaagaacttatttttcatgggaacaacaacatttctaaggttccaatcattctcataagtatttagatgtccagcaatctcaagaatgtgatgcataattaatggagatgttggataataaacaccagacaaaataacagttgaatcataaaattgttcaaggaataaaagaacagtttcagcaattgtccagtgtaaatcagtcagtaatggctgaccatcagccattggatggtgagatgcaataaacactgaaaaaatgaccctatgtggcaagagatgcttaagcattagataagttgcattccatctaacatccatgtccaaaccaaatttacgaggacgaatacctttagcaatgcagaagtttttgtataaagcaatgcgctgattagatgcatttataaatgaaatagcagttctaaaatcttgaagcatgggtttgaagatttctagaccagccttaacaattaaattgatgatatgacatgcacaacgctgatgcaaatataaatcaccaatataaccagacagagcaggtttaagactatccattgctttagaattagcagaggcattgtccagggtaatagagaagatcttattagtcaaaccatattcttgaacaacagaaagcacacgttcagaaatattttcagcattgtgtgacacatcaattagcaccagtcccaaaatcctcttctctaattgccaattagaattaacaaaatgggcaacaacactcaaataatcctccttagcattaccagaccatatatcagatgtcaaagcaacagagctaacagacttcaaagtatcaataagcatagcacgtctcttgtcgaagaccttaaaaacgtccctactgatagtttgcctagagacaacactaaatctagggttgtgagcattctgaatatactcctcaaaagcagcagattgaccaaaagtaagtggaagatcctctctagcaatcaacctaaccaactcagttctagccacatccggtttatattcccattgactaacagaaccatcagcattaaacctaagcatggactgacacaaagcaccaacatttctaggtttgcacgatttaatatgcctaagcaaatgtccagtaccaccagttgaacgagcagacaatgttttatgacagtaattgcatttagcagaaacgcgaacctgagcgccattgcgctcttcaaagagttcttcaaagtcgtcccatacctcagacctggacctcttgttgctagcacttgagccagacggagcaccgttgccatcggcaccggtaccatcatcgtgtggctccggctgcgacagatctctcagaggtgaagcagtgttgccaaacacctcgatgcgttcctcctccaagtcatcttcgtcatcaccctgcgtccccatcaccctcgcctcgtagttgcatgaggttggatcaccatccatcgcaggcactccggttcctcaacggtggctgccgcctgccgctcagcgacctgcaagaacaaatgaaacaacgacgagagcagagagtagttacggatctgatcgaatagagaaaataaactaaaaaaaagcttgtacctgcgcatccggagcaccggagttgccgttgatgatagagatccacagatctacgagaagacaagaggagagactagatttggggggtggatgagtggatctgagtatctgacgaagagaaacgatgagggttgcaaaaaaaagtacagaatggagaggaaatcgacaatgcgaccgtcgatccggtgaccggagaggcggagacgaagagctcacggtcacagatcagccaaagagatgaaagaaaaggatagagaagagacgaccctcaagcccccagcgggagcccgctgaccctcggtgctagatccggcgaggcatccatcggagacgccgacgaagagggatggaggcgtggagggctgaggggtcggagcctggaggtggaggcggagcgggcgagcggcggatcggtcgagactccagactgatgtggctagggttagggtttgtcggtttgatgcggtttggggtatttatacccacccggcataacaggcctcggtcgggccgtgcctgccgttggaccgtgccgggccgtgccggcccaccgtgccgacctctttcgtgccgggccgtgccggcccaccgtgctgagggagcggcccaagcacggcccggctgttgggccgggccggcacgggcacgaccccagtcgggccgtgccgtgcctgggccgggccaatttgtcgtgccttgggccgggctgtcgggccccgggccttatggccatctatagcggtacttatataggacaagctccaagatggaatttgtttttagtttgagatttggacagtaataattaacaagtttttttttctacgaacacaacacaaatacttttttcacaaacgcgcaaaaatattacacgtcaatatattagaagagaaaatagttttttttgttacgtaacgcaatcagtccgatcggcttttgttttgctaggggaatgaaaaaacaaaactaaaactaaaactaggaaaagactactacaacggctaaacacaacacaaatacatacgcttataatatgcgcacactcatccctataatacgagcacctccgaaagattgtatcgatatactttgagattaatgaaatcactaatgaaatcactaagaatatctcgctatcagttatattgtttattattattgaaaaaataattaaccataaatacaagtattcatatcaaatcttggacacaacattaattagtaatgaggtgctatatagctggactgcgcacactgacacaagttaaattaatgaacacaaccacagaaatatggtgatggtgatgtttcactgaaccaacagttagcaccagtctagtaaaggcttccactgcgagttgaccaaaacaaaataaggatgccaaatcgcatgaacgatcgatttgacaatttaaaattctagttagggcttgttttatttccaaatcaagctagaaattaaggagggtatatgatgactagaatttgtctccatgcaccagttgagaggagccgttcatgtggatctggatgctggggattatatatcaacaactagcaaggttaattccagtgaaatggggccaaaaatagggaatgtcaactctaacctactaacctacctaattatagtttccttagctaaatatcaaatacttcatctgttccaaaataaacttgcctaaactagatatgatattttataatataataaatctagatatgtttattgtactagaaaatattgtaagatccacgtgtgttttgattcttattctgtgatgaataattggcatctgtgattattggttttgatatttggagattactgttgaagtggttttggagatgattgattttcagatgatgaacagggtttgctgttttgtcgggaccgatcagactgggcagtggttgccggtcagaccggcttgtgttgcacggtcagaccggccggcccgcaatctgaccggccgacgctatgtcggtttcagttttgggttgtttctttggatatccgtgattatttcatggttatggcttctagatggatactatacgtatgtaatactgttgtttgctaacaatgagtcaagttggtgatagcttggtctcggaatatggtttctttgtttgtttcatgtgtaggtggctcgatgcctcgggagagtatttgcagtgatggaccaggagtcggcttggtggtaagacgatgtccgtggtggtcagatatcatgcgggatactaaggctagagttgatgcacgtggttgatggagattccatatggcatacgatagaagtattgtgtgcgtatgggatacggagtcgaatttggaaggagtccaaatttggtatgattggttatgtagagtttgtttcttgtactaggaggtttcctatggggattaggactcttagtatgagtttggttcgtggctttaggttgcctacctcatgtataaatagaaggggagcgtgaggcttcccggtatcgcttttgtgtcgcttttcataacgttgtgttttagggtttcgagtttagtcgagatttttgtaaggagtactgttgttgcactttataaacacagagagaagtaataaagttgtcatctactttgagagttcttcgatttgtgtttcatcgggtgtggcggtctaaccggcgactcaacggcggtccgaccggcgacaagcggcggtcagaccggcggcatacgggcggtcagaccggcggcggcgacagcaagcggcagctgatctcggcggtcagaccggagattgaatctcggtcagaccgacggcaaccaggcggtcagaccggtgcatctacttcggtcagaccgcgatccatcgatttcgagggcaacttttatttccgctaaaagttttcggtttttgggtataccaaccattcacctcctctggtgggcttagttcttgtgattcgatcctacaaatataacatcttgttctagatttgtttattttggtatgaagaaagtatatacttaaggacagcatggaaatatatttataaacataaggaatcgagcctagatttgtgtaaaattctggcgcttcactccagctcacaacagcaagatgtggccatgatcagttagtctactacactgaaatttgacatgtgcactgaacactacagtaatatatacacattacatttggataatacttccacactttctcaatgtaattttgtaatactttcacactttctgaatagtacgtaacgtggccagctgtctacttgtatatacaaagatgattaaacttctgcttgcttccaaattagccccctttcctcgataaaaaaaaaatagcttcagccgcgtgcaagcatttttaaaacttctccaactttgcatgcagatgtgtgtcatgtgaacgcacgctgcagcttaactaccggtcatgccagtgtgtcaatgtgtgcacacatgagctgatgcttgtcaacgatcgagctgattcctgggaaagacaattaagatagatggctaggctacatatatcgcctatgcaacctaaacactcatacgacgaagtgtttagttaattagtagccctgatgacagagacattagattatctgtcgccaagtttgttgggataattaactcatagagtgtctgtttgactgaccgcatgtgactagcattcagatggagatctaaccatggatgcagtcagaccgtgtttcggtttgctacccctgtggaccaaacctgcccctggatcatgtacataagcttgtgcatatcactgcatttagtttggttgatcatgtatatatatttttttgttgtaaacatcgctgagatcaccaattaatcaaattaacagaggccgggcgccccttagtcagcagcttcttttctctttccatacatcttcctttatgcctttaatttaaaattaattttcaaaaagaaaaagaaacaataagcgtgtatgcttgacatctgacgaatccttaactaatgaagcccacttaagtcttaattagggtattttgatcatacttaaaaagttagcgcgagtgtaaaatttacctccagttattgaacatctcaaactatcttttagtgtaaaattaggtatatatatctcgaagtcctaaaattaaatatggtagcctagctgcaaaatacaagaagatgcgtgtgcatatggctggttaatttggccatgtaatcaattaacgcaagcaatattagttgcatgatatgatgcgagctgcgacgtcgggtggtgtggcgtaagcagaagcgtcgtcagcaaatgatgcgagatatgcagataactattctattcggacgacggccatatatatatattgatacgatgagatcgaaggcgtaatccgaatgcaatgcaatgttaatgaaaaaaaaataaaaggtcaatgcatgccgtgatgctctagctagctcacatggtctctgatgctctcctttgcttacttagtttggttgctgatcgattaagcatttgatgatggatatatacagggccggggaatcttggtcttgggatagatgcatgcgccggccggcgccgtcgatgcctcgatctcccatggcagcggggcagggtgcagtgggtttgccggatgcacatgcagtgatgcaggcagggcgtcctggaggaggagggggccgatgcaatttcagattcggccatgaagctcctggcatcaaggcccatctaacgatattcctaaatccaagggccgtattggttatatatgggcctcattagcccctcggattcaataattcttgtgtcatgggatgtgttatatatgaaactagaaaattaccccgcacgttgctgcgaaaacttatttaaataaatgtatgacagtaaagaaatgtaaggtgatttgttgactaattgaaagaagaaatgctatgtgctaaaaagtatacaacccatattctgaagttagttactctctgtatctgtatttaataccacttatccgaataacacaacactctatagatctggtagataatatatacatagactaaagcaacaataccctacatacctaaatagttgataatcttttcggatatgattttacaaataattaaaatatattgactatataaaatataattctggtatcttctatcaagtcaatgaggtttagcattatcaatatctagagaaatgggatagagcctaacaaataggcatctgagagaacgtaaaatataggcaactttggataatcatttgtgaggagattatggataccccaatttgtgaggagaaatgtagttagctactgtagcttcctggcagtcacagcacacagcactcaccaatgacacagttttctcctctaatcttcgtgcagaaatttgggtttgaagaagttttgcatggtcacctggggggataaagtagccccttacttataggactttgctccaaatgaaaaggatttttaaattatacaagttgtgaaagttgacgttttttagctggagattcggaccgtacttaataagattagaagggaggtgttacttgactgtgttcagtacactggcacacttcgttttcgtcgcatgagagatgggtagtacgcacccacaatttatctttaatcatgaaagacgcaaacacacgtcatgttgtttgtcctattaagatctctcattgaatctaaattgtatagtaattagccacagataattaagattgttgtacagaactattatatttgattaaaaagtggcgtgactagataaaattatcactcccgctatgtgtaacgtgtcagtattgttttaccatatcagctagactggcgtgatcaaaagattcatattctggaaatgagttttgaaagagtctatttttaaaattgaaaaataaaaaaagttcaaaaataaaaaaaaaatcctagctgcccagctttcttgttcaagcttgggctgacagattcgcccttagtatcattccaattctgggttgaacgttccctcaaaaaaaaattctgggttcaactttcaaccttgtgggtatatcaaaaaaaaaagcaccccatactttattagtattttcttcctggagaaagattttgaaattccaagttgtaattaagtagtggttgctagagattaggatcgtactaattaacaagattagtaggattggcggagaagtgctagctggaaactgcacactgtgcccactaggccactacagtccaacacaaccccagaggtggcgatattcattggaccggccggagtacctagtaagcaccttgctcgagtaaaagctcactgtgggttagttgacaaaaataaggatctcatggccaattggttgacaatttaaaaatgcatctcttgcgttgttgtctaatcaaggctagaacaacgaggttcactatgaccagaactatttgttgcaaatgcaatgcatacaagtgttaagagggacactgtccatgtggatttggatgctaagggattaaatcaaccagcaacgttccagtgaaacgggacaaagagaatatttatgaagtctaacctaccatcctagtggtggtttccagtgctaaatatgtccttgaggacaggttgaacattttataaacccaagcaaacgatgaaacgaggcagctagatttgtaaggtggtttttgacttaactttagtctatatatttagacactaatttagagtattaaatatagactacttacaaaactaattacataaataaaagctaatttgctagataaattttttaatcctaattaatccataattagaaaatgtttactgtagcatcacataggctaatcatggattaattaggcacaatagattcgtttcacgaattagaccaagattatgtatgggttttattaatagtctatgtttaatatttataattagtgtctaaacatcctatgtgatagggacttaaaagttttagttccatctaaacagggtctaaatctatgatctatgcattaccttcttaaagtatgttcgaaggtagaatatattatagcctctagtttatttagagactatcctcttataatagttgagacaacaaaaactaacaatcaattcactaaaatattttttattatttttttcctttttatccatagtcaagcaataaagttttcttttataaacgctaagagtcgatgttagccattgtcatacataacaatgatgtttctctcactttctctctcttttccatgtcaacaaacttattacgtactttgttaacaattctaaaaggttcctattaattatctatgtacatgcccttaatatcaaggtttggtggatattcaggatgacgacccattaaaagtgttgcccataaattattgtcgattctttcgttcaattttttcaatggtcgtcatcctgaactcaaccaattagagctctatactatatactatgcataaattggcttgtgcactatacactatattatacattacattacatgaatacttcctcactttcttgtaattttgtagcagtgtaacgtggccagctagaaagttaaacttgcttccttaaaaatttgctctcctcatcgcaaaaattagcttcacccgcgtgtgagccacttcatgcacgctatagcttgtcaactaagatgagtacgtggagtaagataagactacgtcttatatgatatcgcctatgcaacggaaatactcacaagagtacatagcctgatgagagcgacattagtttacttgtctgtctccaagctgttagtaggctaattaatccacattctgtacgtagctatagctagggtgtcatcttttacatttgacgacctgctttcagatcgagatccaaccatgcatttagatcgtggttttggttgctggtaccctaaagtaattttaccgtacttaagaagatactctatctgtttcatattacaagactttctagcattactcacgttcatataaatgttaatgaatctatacacatatatgtctaaattcattaacatctatataaatatagacaatgttagaaagtcttataccctgaaacaaagagagtaccgtataaaaaaaagttttggtaccttaactgtaaaatatgaagaacaaaagcttagcttagacatgactgacaaaagcccttatccatcgaaatttcgagatggcccgtacatcgcagacggagaaatgcgatgcttaccatcttttgaaatgggcctttttttagcccggcctgcactacagttcaagtgcagcccgcagtggcgagttgcaggccaaaataccggcctttgtacaagacgggccagcgcatagtcccatatacaatttgggctgtcctggcggtggatacaagttggactgttagctctagttggaataagttcattttggatccctctatttctagtccagtccgatttcgtcccttgaccgcaaaatcgggtacgacccgtcccccaacttacgaaaaccgggcaaacgaggtccctcggcggttttgaaggcggttttggctgatgtggcgcctacgtggcttgtttgactaggtctctgtccgacgtggcattgatgtggtgcttacgtggcaattcaactcgaaaaataaataaatctcgtgggacccacatgtcagtttcacatagaaattataaaaaaggtagggcccacgtgggccccacatgtcattcttttttttaagatgaaaggccagaaggcccggcttttacttgaaagccaaaacggcgaaactcgctggggatgccagcatacaagaagttcttacagaaacgactgcgaagcacaactcacacagagacccagggacagaccccctgtgtcccctagacaggaaactgaaagagggactccagcatggggacagaaagaaaactactaaaaacagagaaacaactctaaacttccaaacgatctcatcctaaccaacaccaactcttggaggtcttagactcaacaccaccgatctcatcctttccaccagcgcgtccagcttgcattcttcctcagaacgaaagagttttctccactgcaaaagattagaaataatttgaaaaggaatagttagtggagagtaaaccagtttccctctaaacaccatggtatttcttgtaatccagagattccaacaaacagcagctaacagactaaaaatgattctaagtt

SEQ ID NO: 26700 - DNA, 5851 bp, Oryza sativa
atcgtccacagcttcacacacggcaaaaccgacaatgctcgtggctgcagaaaggcacgacaagcatgcccccacgaacatcgccggcccggtgcccatccatcccatgtgacgagaagatacgtacggccggggggattaagtacgcatcaattaaatccctcacaaaggaataagtacaccttaattgattactcctccattacacccaaacaatacaggaacagagaagctacagccgctagctacgacaaagtacaacatcaatagtccccttgataaataaaacacggcctcgcggtttttaattccgttgcaaggccatcactccggtacaagaaaacgctcaaaagtagaaatttaatcaatacaattattattgattttttcttcaagtagtactaagcttagtactcccctttactactaccactacacttgatgatggtggaccggtccagtcattattggacgaagtccagagaaggaaaacgtctaagcgggtgctaattagcagcctcagcatagcccaaaacctcttctccactataacgaagaggcttttctttctctcttgctcaaaataaataatctctcaaggaagaaagacgacgacgagaacgaagacgaagaaggacaccgtgctattatatgtgggtgtcggagacggcgatgtcggtggcggctagaactggccaccctcgaaggtctggccgaactgccagccggggtgggcgacgttgttgctggtgacggtgcggccgtcgctggcggtgacctggaaggagaggctctggccgtcgaggaacgcgttgctctgccagttctggccccagttccgcgacatgggctgccacccggtgcgcgaccccttgatggagacggagcggacgtcgccggcgccggccacgttggtcaccagcaccaggttgaagtaggagtgcccgttcacggtgaacctgaccccacccttcttcacgcacggcaccctgcagcaaaaaggaaaatcacacgagaccgcgcggttaatactggagtacatatgttttttttctttcttgctcgatctcgcggtgaggtgaatcccgcgaccgaatcggtgtgaggcagtacgtgacaatggcacgacgcagcatgcacatgcgtagccactgtacgtggcgcagttgctgctgcagcagcagcagcggcctatctgcatgcaacgtatcaaatccgcaggctggtcccagcggaaactaatggtcactcatggcacgcggccgagcctaatgtggggcccggcgtaaagttgaaaccgaccgacgtcgcgtgtttaattgatccggccgatcgtgccaggacgtggcggtagtacaggactaaagtcgcaagtcataactgaccactattggtacgttttaagttttaacgtgtttttttttctcaaggttgtttaaacttgttcgattctactactacggtagaaaccagctgagagtctgtgaaggcgaagagaatgtgacctgcggaaggagacggggacgatgccggcgcggtactgggcgatgtggaggaatgccggctcggccatgtcgaagtgagggcggggcgggttgcaccagccgccgtcgtcgctggggaggccgtagttgggcgggcagaagttggtggccgtcacggtgatggagcccggcaggcacgaactcccggcgttgtcgcaccgcagctcgtagcacgacccgcacgccgcgccgtcgttgaacagcgccgtgctcagcgccgcggtgttcgtgccatacccttggctgtacaggttgccgtaaccgcaagccccgcctgcaaattaaagaccatttcgatcgtcattctcgccgttgagctacagcaacacgctgcattcgccggctgcgcatgagattctactactcacccatggtgccggaagcatcgccgccgccgtagaacgtggcgtgggcgctctgccacccgccgtacccggcggcggaggcttgccgtgccaagaagaggaggaagagaacgccagcgatcgccattgctggtgatggtgtctaaacgctggctagactagctcacttgaagcggagcttggcagtgtgaagaggttggccctccaggcctaaggtatttatagccagcaagccaaaagccaagctagtgccggtggcggttggatactctcgtctcggagccgtgcacatcttttccttccccccgatttggtgagagaaagtaaaaaagctactcgtataactggtaggagtagtagccagccagctctgttgcgagtgaccacggccggccacggtggccaccggcagttaatacatacaaatcaggcgcacatgcgagtgtcctccccgcaccggcgcggccgcgggcgcgcgcgcgcgcgcgcgcatgtagtacgtaacagagccaccaactgcttggtgaagtggcgcgcgtgcgggggccccgcccacatggctctcgctagccgcagacgggaaccatgcgctgcaagcctgcaactggcgccgcggcgcgtgtggaccataagcagatgggcgcccgcgccgctgcgcggtgcgcggtgcgcttgggcgcgcggctcgaacgatcgatcggctcgggtggtgtcgcgcgcgcgcggggcgccgcacggccgcgcggcatggggtggtgtccggtgggcgagtactgctgctgctaccaccacgcccacgcgacgtgatatgctgttgccttgcctgataacgatgtgatcggcatccgctgggggcgcgtgcacgtgcatgtcgattccaactcggtggcatcgtttaatgctaactgcttgtgttgtagtgttactggtgcccatatgtggctgtgggtgacccggccatctctgataatctggttgccgtttctacttgctagattttgattttttttctttgtttgatcactcgtcttatttaaaaaaaattttaaaaaagttatgtttatagtactttagataataaagtaagtcacaaataataataataatttcaaaattttttgaataaaacgagtggtcaaacagtgcaagcaaaaactcaaaatttcttatattatgagacggagggagtatattttttcgaatatggtcgcgtgaggtgggtttagggtctgtttggcacaactccaactctatgtgaaatgagagcgaagcaaaggtgaaacgctctcacaaaataaactagagaggtaaaactaggtttaggcagcgccagaattctactccaaactcaacttctgaaactaaatttagcgttagctgatgacagaagctctcggtcccttggatggagcggacactggacggcctgaagccctgaatgctctgccagtgtcaacaaccgttaattcagatcggatgagtcgattagccctacaaagagcacactgggccgtcgaataatacacataacagattaaagcgtgttattgtcggggcacaaacgcacatcactacatcagatcgccagatgaaggttaagctaaccccacacacggaaggaataatccttctcaagctaaggggagatggtcagatggacaggtaaagcaattagtactaaggaggctagtattatataaactttagattactggcttcttcaggcgttcaatgattatcaggcgcaagttttaaggtggatagggtgtgaaatgggcaaaaccttgccctgtgggctcatgtccctctgaagcatatgcaactaggagaaagattggatggacggagacgccgcacatggacacacacgctcacatgcgtggaacatggctacgaccgtgtaggctgtatataaatccaacagcattcaaacaaagctgctccctagcttatgcatatccatgcacaagtccaagtttgtaaacttcaaaaaaacctcatctttaccgatcacgtagaggccgtgcgttttgttgacctttttttgtgcaatcgggaagttttgatttttcccttgcaaaaggccttatgctttgtgtcaagctggtaatactagctacgtacctgagctgctccctcctcttcggtttcagcgaaagcaacacttctccggactcagcatttggtgatggcccccatgccatgttagccgcacatggcgtggccaccccccctgccattacggttaatctcctgtcactaacctgatcacctccctcttggacccgtcctgagtgctctgaacagctctgagtttgatccatgctgaattgtggtgctcctgcaatccctacacaccccaacttgttgcctagcaccatcactgctacagaattattggttcagattagtataccatctctctcattattgatcatatgttaccacttgacatgttcagaagaatccgttagaattaagagcggagggagtactttacagccaaaacgactcaatgtaaaaaaacaaaactgcagtaactttcagttagcattggtatagtagtactactagtggagcagttttgtgaaagttcagaaaggttgcaggttgtcatgtgataatttgccacggcgagtaggaacagagcacgtaacagtgtcgtggatctgctcgctcctgttccccggtgaatgcagaccgcatgaacaagtgacaaggacgcctctggggagagccatgtgggggggacacacagaaatacgtagtagatcacacgatcttgctctgacgggactcgtaagcttgggggaaccctcggccgcaagctcgggcccctccaaaacggggccgatttctctgcaaaatcacgcaggaatgaaacgtcctctctgtccgggaaggggaatcttgtgcccgatcgcctgtgatgatctgatcaatcatctcccgaggtgtatacgctaccatacttccctggttaatctactcgtctcgctgatcgtcagacacacaatcatgcgttgattcgttgcacagtttagctttttacagagggtactgcctacctggtgaaggttctcgcatgattgccaagaatattctttgcttggacaagcaagaattaatggctagctagtaattggctattctgaatttttctgacccagcatttgtagatacagatgttcaattctcttcatgaagatcgacatggttgacagaggaagcaacactgtcctaactcccaagaactccaaaacttttggtgaattacagctgaacctctctcatgagatgcaatcaccaacgttgagtgtctgaaaacttcattagccgatcacgtataactctgggcttgcatttgatcattgtcttcaatggaaggatcgtgcgtcgctgtctccgatccattaatttctttatggcaatcaggacggcgcatgatgtgtacaggggagttggaatactcccatctgcatgaatggtcctgagcaagtgtacgtactctctcatccgggtgatggatcatatcactggcctgcatgaaccattgcacgccgtgtaatagttttgaatttttgcttccaacgtttaaccactcgtattatttatttttttttgcaatatagaaatcgaaaagttgtgcttaaagtactgtggataataaagtaagtcacaaataaaataaataataattttaaatttttttgaataagacgagtggttaaacgttgtaaaaaaaaaattaaaatatcttatatttactagtgtagtagtagtagtgtgtgctagctaagctagctggaactaagctagctggaactgagcacgccgcgtcaccgatcgcccaaaagctgtggaataatctgaagcccaagctacccttcttttttgcgttatccacctcagatctttgcgcatcatgatgaaaggcacgtt

SEQ ID NO: 26701 - DNA, 19876 bp, Oryza sativa
ttcctgcagccctcctacttgatgcatctcaacattatctaggcctaagcctgaaaaaaaaaatcgcaatacaggccctgttcgtttctccaactaggagagattaaattttgtattatcatggctgctaaacgatgcgtttcgtgcgaaaactttctatataaaagttgttctaaaatatcagattaatctattttgaagtttgtaataattaaaacttaattaatcatatgttattactacctcgttttgcgtgaaacacttaatcttcatcttcatcttcaggagattcaaacaccaccgtagccgtgtaagtttttttatttactctatcatccttgctgatccccccctaaaaaaactatattatataaggctcctgtagcctttggctacctagataatgaacataagcacattattaacaagacaccgacactccgacagcttgtctagcgcccatctcatagtttaagaaaatgatataaaaatgatgcactttattcatgaaaacgaaaacgaaaaatattcttcaagattgttctctttttatatatggaagactcatatgcgtataattctttacatggcagtatataatattaaactactttgtttatcttgttaaagagatagacaaagcatccccgcaaaaaaaaagtagtttaatgggaaacgattttgctatatatttgtcgacaaattttcttttaaaaatttgacagatgtaattacagtacaatcgtagtgtaattacactgtaacttgcatgtaatcacactgtaactatagtgtaacttgtatgtaactttcaaaaatctctttgtaatatgttatttcggtaaaatggaggttgtgggaacaaatccttacacatgtttgtgctgtgattttttttcttcctcaccaaaacaaatcttgtaatagatttaacgattcaaaattacgtgaaacttatatacaagttacaatgtagttacatgcaagttagaatgtaattacatataagttacagtgtaattatactacgattgtattataattacatctgtcaaatttttaggagaaaatttgtcgacaaatgtataggtggtcccaatgggaaaatacacgcagtgtttcttacatgagttgccaaccattccagcccagaatttaagttagtcgggccgctccaaatacacaatagacgggcctggtcagacaaagcctatcattccagcccaaaaaggaaaaagtacaccgaaggtccctcaacttgtcatccagttacaaaatcgtcccccaaccgcaaaaaccgttcacaacttgcaaaaaccgttcaatttaggttctttggtggttttgaccccggttttatcctacgtgtcagctgagtcaacgtgagacccacgtgggccccacatgttagcgtggccacatcatcatcctctctttcccctcccctctctctcgcacgcttttctcctctctccacgctgcgccgcgcctccctcccggtgctcgcgctcctcctccacttccgcgtcctagccgccgccgcgggtcccacttctcccccagcgatttcccgcctcgcgggccgcctccgcctctccccgtctatggccgccgtcacgctccgcgcgctcggcaatggcgtgcccgacgttgcaggagggatggcgaacgccgcggcgatgagcgcgacggccccgacgacgaacgcggagacgaacgtggagacttcctggtggtgaagtgcgtcatgccgaggaagcccttgagctgctgcagcacgatcacgaccgccgtgccacccatgaacccggtgattgctgaccgcgacatgaaatccatcaggatcctgcagccctgcagcaaacacggatcgatatatcagtcaggaaatctcaggaacacacataaagatcggagagatcggtcatatcgatctcgcgttacctgaggaatccaagagtagcctacatgacgccggtgaacaaggccgacacgaagacgagctgcgtgtacagccgcgggtcgtcggacgccctcaccttgccgccgacgatggacgccaccagcagcgacgacgtggccaccggccccaccccgaggttcctcgagctccccatcaccgcgtacaccagcggcggcacgaagcacaaatctgtgttcgcaacaatcaatcgacaaacgcatccatcaaaggtgttcgtccgcgacatgaacggttaatttggcgtgatctaacagaggctgatgaccggagggatgccggcgagggtggcgtagctgatgccctacgggatggagaggttggcgatggtgacaccggcgaggaggtcgtaccagaagcttgccgcggagtaccccgcacctcagtccagcgccggcacgaagtacctcgccacccaccacgcgcgctgcgcgggcggcatcccgccgagccgcggaacgggtcatcggggaagagcgtgtccttcagccccgcccgcaccgccacgctgaacggccgcgtcgccgccggctgctggttcaacctggccctgcagtggccccaacgacgaacgtggagacgaacgtgcgacggcggtcggtgacaggcgacgcggtgtgacggcggcgacgctggacaagggaggaggccggcgggtcgagaggaggtcagcggggcgacgagagagagagaaggtccggcggctggctcgcggccgctcgctcgcccgccgctccgccggccacgcgcttgcttgccaccatcggccctccgctccgccggccgcccgctcgctgcagtgttctcccgctgcgtgtgcgcgcctgctgccgcttcgctccactccgtcggccggcgagcgctcacccacctcctcgggccatcctacgccccgtcccggcgccgctgcggccggccgaggacgacatcgacctcggcatcctcgtgcgagagctcgctcgtcgccgcccccgctctgctcggccggctccgctctctgccgctccgccttctttctccagccgctcgccacagcccactgccgctcacccgccgttgctttcccctctgcaaccggcgacctcccggagctcgccagccgccgctgctccgcctgtctgcttcgccacgctcctcccccgccagccgccggccgcgctggccctccatactgccgcgtcgaagatgctactgccatccacgcccaggggaacatgagagaggaagggagagaagaggggggagagagagagagagagagtggtgacgtggtcacctgacatgtagggcccatgcgtgtcccacgctgactcagccgccacattagatcaaaccgggatcaaaaccaccaaaagatgtaaagtgaacggttttgtaagttgtgggatgtcatatatctggttttgcggttgagggacgattttgtaattcgatgacaagttgagggacctttgttgtactttttccgcccaaaaactaggccattggagtaaggaaaaagtccactttaactcctttaaaaagtaggccgaatctaattcgtacccctcaaccagaaaaggaaaaagtgcaccgaaggtccctcaacttgtcattgaattacaaaatcatcccccaaccgcaaaaccggatatccggtatcccttaactaatcaaaaccggtcacaataggtccctcggcggttttgactccggttttatccgacgtggcagctgactcagcgtgggacccacgtgggtcccacatgtcagggagaccacgtcaccaccctctctctttttcccctcttctctcccttcctctctctctttttccgatggttgccgtcacgcggggaggagcgcggtggtcgtctgccttccctcctcctcctccgcgtgccgcgcgacgccattgccgtggccgcgcgtcatcgtcggggtgaggcggcgacgcacggtggcgcggcggaggggagggcgttggcggccgcggtcaccgcaccaccgtacgccgaaattcccccaccgtgcggacgccatcgcctatcttcatcttcccgagcgccaccagccgccgaaattcccccaccgctcgccgcctccccctccccctcgtaccactccctggcgacctccacgacgccgacgatgtgacgggaggcggcgccggcgccggagtggtagaacaggcagcagtcgccccggcgcatggcacggaggctgttgatggcctggcggttgcagacgccgtcacacggcgcgatctgtattatctgttcagattcaaggagatgacatcagcagcaatgtctactctgaacctgagttcatctcctctgaccaagcaacagctccgatttggagccaacacactcattgcagaacacgtcagtggattcagctctgcaaggccagctccattgctatgttggtccagctctcactagcgagcggtcaagctgagaccgaggcggcggccatggcagcgcgccggaaaccgggtcgtcgcgcaggccggcaactacaaggttgctatccttggcgccgccagtgggatcagaccacgaccactcccccggttccgtcttgagcagctagtagttgcagttgacggcggtggcgttgggtattgctttcttcggcggcggcggcgtcagcggtggcagcagcagcggcagcaccagccgacgccctccctctgataggcgatggcggccgcagtcaccgccggcttctcgtccgcatcgccgaccgcactagggagatggggaagccggcgagcccgcgcgctaaacaagtcgcatcaccgtcgccggccacgcgtgccgccgcccgtgcgagagtagagagcgagggggaggaaggaagaagagaaacagagaaagagaagaggggaaatagagtatacgttagcgtggcaccctaacatgtagggctcacgtgtggcccacgctaagtcagctgccacgtcggacaaaaccggagtcaaaaccgccgagagatctattgtgaccggttttgattagttaagagacgccggatatctggttttgcggttgggggataattttgtaattcgatggcaagttgagggaccttcggtgcactttttccaccaaaaaactggatagagtcgtcctatctggttctttggttgagtcggcctactttttaagggtgtcaaagtagactttttccttggagtaaaattaaccggcccataagacccccctgcgtgggcaaaacaaggccgtcttgatagtagatggtgggtcgtatgcaacagttctcaaagctcgtagaaggaataaattggtcgccgagtctaaaatttgtccctaaaccaaataccgatataatgtgtccatcaattttataaaccggatcacacgatgttctaggcagtattatacccgattttagctaacgtggcaagctaagtcaacgtgtgaccacttgcctgacacagccgcctgtaagaatgccgctgacacagttgcaggagagggaggagaacccatcgtcgccattttcggtcggcatgttgtgcgtgcatgatctcggcaaaccgacgcgatttatagtagctcccagcctccgacccatcgtcatgtcgctagcatgagaacgccaggagcttgcacgcccatgccacaaggatgaggtttagggccgagttcaagcagaagaagatccattggaggagagcctcaaggtcacgcatggtccttgaatctgacgtcgccggcttgatgcgcgctccctccgatttttcacctttgtcccattcccacaccgctccgtgttcacggaacagaaccacagatgacacaaatctagcaagaaaaccctcgcaacgtatcatgccacataatgccacatagacaccatgtatcacacaagaataactatattgggactttattactattcgcttttaaaattaagggacacttcatacataactatatgactggtattgtggttcagaaaggaagttcggactggagtcgactagtggtccactcctgtcttccggctaaagttcggcacaacatgttccagaagttttttgacctcgccagctgtccattgatctgtccctggcagcgacgtgacgtcccagagtcaattaaggtcgctggtaacagccagtgctcggctcgctccatccctccgtcttccacggcgcgagactctctcgaccgcttcagacttcacatcaagaatagatgcgtgtgtgtgtccaaacctgtatgcttcgccataacacacgacaattgacaagcgaaacgccatgggaaatatccaaaaaaactctactacttgccctcgcttgcacgtcacccgtaaaacgcaccgcaccgagcatcattcccagctgctagtgctacccaacctgatctcgcctcaacccctacatatacacgcacacttcagctctcgtcgtcatacatctgctagtgtgatcagtgtgggcacacgttgcacacaggagtttgaggttgaggaggagatcgagatggtgcccgcggcgaggagcgggtggccggcggcggcggcggtcctggtggtggtgctggtgctgtcctcgccgccggggactagcacggtggtggtggcgagggcggcgctgtcgtgctcgacggtgtacaacacgctgctgccgtgcctgccgtacgtgcagtcgggaggggcggtgccggcggcgtgctgcggggggatccggagcgtcgtggcggcggcgcgcaccacggccgaccgccgcgccgcctgcacctgcctcaagaacgtcgccgccggcgccgcgggcgggccatacatcagccgcgccgccggcctgcccggcaggtgcggcgtctcggtgcccttcaagatcagccccaacgtcaactgcaacgcgtacgtgaaaaccaaaaatcaaattaacctctactagtagtactacctccgtcccaaaataagtgtagccgtggatattcgtgtccaacgtttgaccgtccgtcttatttgaaaattttgtgaaaaatttaaaaatatttagtcacacgtaaagaactattcaagttttattatctaatagcaataaaaatactaatcataaaaattttttaaatgagacgaacggtcaaacgttaaacgtgaatagtgtaaaactacacttattttaggacggagggagtacttacttttttttccccttcgttttttgcgtgaaatttgttggtgtttttggaacggttttaacgtgttggttctggacttctggtgcagggtaaactgaggtggaagcagcactttcggcccgcatgcatgtgggctcaggggagccatggcccgtgggccgtgaatgaataatcaacgtgcttgtatgtaccatgtcgtgtactcagcagttcacaagtgtgcttgtccgatcaatcaccaaattaaaggactcttatgactgtgcgcaattgtgcatcgtgctagcgaccactcaactcaactcatgcagtttcgtagttagtcgcgtaaggcacgtggcgaggtgcagtgaccgtgacaatgacatgatcacgctgtatgttctgaatcctctcatcttcgatgcctttagcgtcaggaagtgacgcacaaacgaaggaaataatgggcaaagcagaagacacaggatcgaacgcagcactgctcctatcctccttagcacacatgcactacaaaaaagagagagcataagctcgaccgcaaaacacacaaactctccaaaagagcatttcaggagccccggtcggcgtattcagcagctaacgcaaggctgttcgtggcaattggagtagattgcagagacaccgacacgtttttttttttttttttgcacttctttctcgtgaaaggaggcctgcgcttttgctgttctgcacaggggcggctcacggccgtcgaagtgacgacggaccaaccaagctaattaccgcggtgatccagacgaactccggcacgtacgacgtgtggaaaaatctaatatgttatattatgtggttttctgatctattacatcaaccctctcatgtggtatatataggagtacatatgggataaagacttggagtacaatataggtaagagttgatttatctctagaattttatctctaggactctatcttatctctctaggattctatctctagaatatattttatctctataatttgtatttgactcttatctctaacaaacacattcatacttctaacacgacggacggtagtcgccatcagaaccgagcacgcagcaaaagctcggctaagctaagctagctatggctgatgcttggctttgcctacaaagcaagcaaacaaccccccccccccccccaaaaaaaaaaaaaagtcgcatgggcactagcgccatggcgtggcgcgcgtccctatccctgtaacaacttcgcgccatgcgcaatggcgcaattcaacttgggggggagggggggggggtgatgagatgcccttttacaagtacgctcgcgcgccccgcggcatccatcgccaaagatgcgcgtcgcgatcgctcgttcgccgcgcgcgcgcggctgcgtcttcgtatatatctggcatggccgcgcgcgccaggggctaggctagctacctccatctatctacctggagttagtgtaggtgagaggttaggtcgatcatggcgagtggtgttgcggcgccggcgccgagcgtgttcgaggcggcgcggccggcgttggaaaacggtggcggcggtggaggcgcgccccccccggcgagggcggacgcgagcttcgacaccaacatggtgatcatcctggcggcgctcttcttcgcgctgctgttcgccatcgggctcaactcgctggcgcggtgcgcgctccggtgcggggccggggcgcggccgccgcaggcggcggcggcggcggaggaggaggaggagcggcggcggccggggtggggtgcggcggcatcaagaagcgcgcgctgaggagcatcccggtggaggtgtactgcggcggggaggagacggcggagaccgacgtgtgcgccatctgcctcggcgagttcgcggacggcgagaaggtgcgcgtgctgccgcggtgccggcacgggttccacgtccggtgcgtcgacgcctggctggtctcgcacggctcctgcccgacgtgccgccgccaggtgatcggcggcggcgggagcacgccgccgccggacagcgacaccatcgccgtggtcgtagcatgatgtgagagacaaaagatatactactccagtagtcttcgtagctagctgggctcctgcctggcctctttggcgccaatcccttctaaaaaatatctcgctgatcgatctgatctctccggatattttccggcgaacggctagtgactagtgactcatcagcttgttgtggcgaatgtattgacgggtgcccaattggcccaaattggtcactgtatatacacgttcaacatcgccgtcccgaaatgtactgtaccactaacattttcgtacggcgcccttctaagaaacactgttacatttgcgtactcgcgtgtgcacgcactggattttctccgtggccacgcgggtgcccgtcgccgtcgccgcagctcgatcggcgggggggattttcgatcgccggagttggggaagatcgagcggccgcgccgcgtgcgagcgagccaaccgacggaacagctagctgcgcgcgcgcgcggggccaaggccaacggcatgccttaatccgcacgcgacgtggatcgcgttgcggcaaccgtcgagattacgccgtgtcgccaaccccgcgattgccacggctatctgctctcgcctacctgcaagagcacgtacgctcgagttcgtcctgtcatgttcatgtctgcctttattttgccagtggaacctactagtaacataaatatcagcatatcgccgtcaaattatccaaccatcacatatacagtacgtagacagcgtcgtgccggattaacgagcggctcgatcctgatcaagtccccggttaaagttaaacaggatgtagtcacgtgcagcgtacaacgcaaagcccagagaacaaaaaggaacagaacagtcaggatcaatcagcctcgccaccgttttgtcttttacttttccttttcttgttttttgcatggcatgtggatggatgaagaatgacgcagcagtagcattagtaggagtactttacaattaccggctttatacaggacaagttaacagaagtagtccatgagctgcacccgcggcaccgtggccggcgggcctcgcggcgcggcggcggcgcgctccatccgtcggcggcgctgctcccacgcgctcctgagccagcaaagcaccggcttcaccgcctcgagccaccggaggaacaccgcctcgacgacgtggagccggcaggacctccacggcgccgtgcagccgtctccctcggcgccgccacgctgcggcggcgcgacggggaaccttgccgggctcggctcggagtagcaccgccgcaggacgatggcgcggttgagctgcgcctcgaacgccatcctctcgtactcgtccagcagcgcgctgtgccgcccgccgcagccgtcgctcacgtcgaggctgtaccgcgccaccacgccgccaccgccgccgctgacttcgtcttcctcccttgctctctccatgtgtacagtagccgttgccaactgcgagtacacgcgcgtgtaccataccaccacattgcgagtggtatttaggcagcgtggtggtccatgccgcggcggctacaccatttttttggagcgaaagcttgtgcgagcttgacgtcgcaaggacggcaaggatcggtactactactaccggatgagcttgtttcgtacggattcttgtcaacgaagcacgcatacatgcatgatgcatcgcatgcatggttgtagccgtagattccgatgaaaatgagacggcgatcttatctcgtctagctaggcaattttggttagccagtagcatagtggatagagagatttgttgccaaattgatggatgattcttcgctgagctcgaatgttcgatgttgtaaatattcagtgagggacatatacgcaaggaaccaacaaaaaacttgcaccataactgtcatgtacgagattccacctctgtcgcttttattcccttggagagaaaattccatgctctttactctttagcaaaggcataatgtaaagttgcacactgcaggtgcattctgcaagcaacctgctgaattttgagctgagcacaactttttattcctgaagtagtagtaccactaccactaccacttgctatacttgctactgcatttgccgtttactatttttttaaaaaaaagaaaaatcagcgaggtaaccttatacgacgatttcagaataacatacaaatgatagttgtgcagaaggtatctcagttgccaagcccaaacgctccagaaggatagatgctccacattgcaggctatttttaataggtcccacaagtatctcccctctctgccttttcccaccgatggaggaagctgaggtgccggggcaccggacggaacggcggcaagacggcccaattgatgaatggatcctcgagcaggaagtgccaagcagagcgcggcgacacattgccacatctccttgttaagggcggaagtcgcgggataagacacaaatgatagcgccaccaagctcgctagatccagcccggggcttgtcggatctaaccttgggcaatggaggtagctcgtcgggcgcgacgcaaggatggcaacagctcgacacaagcgccacctcactcctcccttctcttaccgacacctccctctccccaccgcctcaaactccaaccgccgccgccaccgcctatcggctcttcaagacgatgaagccttcccactccccggctctgtcaccgtcccgctcctcatcgttgatgtggcacgagcacgggtggggtagatcgggccatcccatcgagagccagtgcagatcgaggtggcaacactagagcttagcggcacagacatggagctcggcgacaaacggacctagcactcagtggcgacggacatggagctcgatggcgatggcctcgtcgtccacggcaattcatcaagtcatttttcctcccttcctctctctctctctcccccctgatttctgcttcctctccagctttctttgacaatgcctctcactccttgtagggagacacatttttcgcagggatgcaccagttgcctatatggaggggaatcttctaggtgacaagttgaaactcaataccacataaggtggactgtaaaatggcctaacaagttataaacatgaagagatgaagaggctaagagaaaagtaattgagaccacaattatatctcgagctttgaatctacgagactcgaggtggttccttcgtgaaaatcacgagttatatactacttcctctgtttcacaatgtaagtcattctagcatttcctacattcatattaatgttaatgaatctagatagatatatatgtctagattcattatcatcaatatgaatgtgagaaatgctagaatgacttacattatgaaacggatggagtatatgagaattatgaaaagaaaaatagaaatcaagaaaaacacaagagccgtcttttgtcattctttgctctcttttcactcaatgattcattataatttctcaaaaaaaatgtatatgtctactcatagggctttggggccttgttgccaaatggtataagatggatcataactcgtaattatgaactgcatccttaggtatcaaagtatgaaaagatgcttttgttattcttaatttgcagttgcaaagaatgtggccctttatggtccatctaaattcatatcacatcctatactaactactaacttgatttattttagaaagaaagtactatatacattacacgttcagcccttttttttaagaagttaatggtaacaagatgagtccacgggaggagtactaacattttagggtgtgtttgtggagaaggggattgaggagatcgggaagatacgtaaaacgaggtgagacattaactcatgattaattgagtattaattattttaaatttcaaaaatagattaatatgattttttaaagcaactttcatatagaatttttttttaaaaaacacaccgtttagtagtttgaaaagcatgcacgccgaaaacgacgtgcattctcactccctatcacccaaacgaacgcagccttatacgtccggacgggagttggacggattgaattcaacgcccaacctggcccaccaaaattgccgtatctctcaagtacgaagaggagtttgaacgaaatttcaccaaaccaccaaacccaaagaccaaatcaccaagaacgctcaaaaaaaaaaagaaaaagaaaaagaaaaaggaggcaaaacgacccacccgcttcacatctcccaagctcctcgtctcgtcctcgtcgtcgcgcggcggcgcatccaatccctcctcgctcgcatcgaaagcgataaaaccctcgcgaaaatctcgaccccgaggcgcgccgatcggatcgcctctcctctccatcccctctccagatcccgatccaccggggagcctcggatctctcgccggaggccgggcccggagcgcgcgcgcgccctttttcgcgggcagatgcgatccacgccgcgcccccgccgccggagccgacgacgagtcggctgacgccgccgccattccctgcttccgattctgccccgcgcgccgccggttcgatgggctcccgcaggttcgccgcggttgtcgtcgtgctcctcctggctttggccctgattcccggccccgcggcggcggcgggtagggccctgcagggcgagaaggcccgccccagcgaggtgaggattcgatttcgaggtcttcccgttaattggtctagattacttagcgcaatggattggcataagccatagggaggacgagctcacttagtttgtgttgtttggatctctccaggcagctcctgcacctaccgtcgctgcaggtggatcacataaagaatcggcgaaatcgtcaaatggccagaatcctgtgaccaaggagacgcaccaccaaacgccaccgccggcaaagccgccgaaggatcaaacaccaccgccgccaccagctgtgtcggagagcaaggggcagaagggggatgccggtaataactctgggcacccggtgccaccgacggatgcgcataagacgagtcccccgcctgaaggtcccgggccaactggtgggaaggagcaggaaggaggagcgggtggggagaagaagaatccgacagaagaaattaagaaggtgttgagttgtgaggatgcagcggagaaatgttctgttccaggagaaattaccgcttgccttcaggtttttaaggatggtaaagccactaattaccttggaaacttcactatgttcaattaattgagtttctgtttgctaaaatttataagggtagacatatttttatcaactgtatctgttgagtaaaaaaaatgttcttctgaattagtaccttttgcaagtccatttgagccatgcttgcatagttgcattcaatttgagccagttttattgcaaggatccagccaaggacaaaaataatgggttcatttcacgtgtcttgtttataagctgcagtgtttaaactagcctattctgtagagcattgtgtgttgaatattattgatgatgtactcagtaacgtcaaatttataagaacagaacagtgcagtgttgaattaatcgcgatcgaaaactgcaggaggtaacgtgaacatgaatagatggtgagatttatacaaaacaaaatgtatatgatggaacagtaggaaacaaattgtatgcatgcctatggattaccaaagatcctatgagtcgtattgtatcacttggactaatgttatgtgcagtgttcacctagtcgctaaacgctagtcggacggccacctactgactaacgactaggctgattaggcggcgactagacggattaggcgaattagacgttttttctatttctttcacacaaaaatactgattctagacattcggtactcggtaaatataggcatttaggcaaatagcataaatcatagttaagttcagaaatcatcaagtccatacaacgcactgacactgcacacgaagcattgggtttagtacaaatctatagggatagcgaacacatcagtatagccactgtacatgcacatcataattcataaatcataactttatagatctgacggtctggagctaggagagaggaagaaaaaattaactagaactggaagaacagaggaggtgaggtggtggaggggagcctgatcccctgttggcctgatctagggttggcgtaggctgcttgagtggttccgtgcttgactgcttcaatcggtgtgtttgccacctcccattgacggcaaggatgaaggatgagatggagagcaggagcagcagaggagggggaagaacgtggagcagcagaggaggagagggaagaacgtagcggtgcggtggaagatcgatgggcgcggcgacggagccgttgctcgtggcggtgtgaaaaagggggtaggcagggattgcgctctctctccatgctctcaaataaggcaacctaaatccccttctataccaagtcggtcccgcgtggcgcttctaaattttatcacgcccaaattttgatttctatcgcctagtcgccgcctagacacactgtcccgttgtctaattgcgcctaggcaccgtcctgtccaggccgcctaggaccaactaggaccgtctaggcggtaaatcgactaattcactgcctagggtgtaaactggacaaattgtcgccgactagcgattaatcaccgtctagatgggctaggcggccgtttaggcgaacattggttatgtgaatggaactgaggagaaatttattttggtgtttgacacaaatgtacctcatattattctcatagctaaaatcagtcaaggatctctcggatgaagaacctatgagatgtcataatatggttttcaggtctaagagatctgtaagcttagacttagtttgttaaaagtctttggaggtatgccagtttcaaatacaagtacctttctgcaaagaactgaatgtcaccatagatcaataaaatggctatctacagtaccataacttatattttggtttaccatcgaagtgtattatcctgttataatttagaaatattagttggcgtatgctggttagtgttgcttttcttggtaatatttaaggtcaacattggacacaagggggaatgctagaaggggatatggtatgatgttgttgaagatacacaatttagtttcctcagagcgaaccaagtaaatactgcaaattgaaggcctcctttggcacataggaaatttcccgattcctgcaggaatcgaactgattcccgtgcgaataattgcttgtgaaaacaaggtctctagggacgtcgacaaacctaagaagattgtgaactgtatttgtaattaaaagaatttcaatttttgggtgctgtacagatattttgtgataaataatttcttgtgttcttatagcatttgtttcagggtagacagggatacaggatgggaatcataatatagatttctactctatgcatgaacttcacctttatcgatctaaaaaagctgtgtttatttttacaggttcaattaggccatttgttgtagtccagaatgaagggcagaatgatgttaaggtcgatgttgttattgatggtaaaatgctgccattacagctggccaagggcttctccagacaggtatccaagttagtttgttctaacatttccatcaagtttcttgaatatgctggtagtacattctcaaacttgaaatagaaggtgatagttacctgagccctggtgtgccatatattttatggttgatcactttagggcgttgcatatatatgcttctcggttattaatatgtgtttgcggtttggattaggcgatcagctagattgtctgtgcagactagtcccaggactccaagctgcataatagctattggttgcaactgtttttcccagaaaagagtggaggaccatcctcttattactgttaagagggattacagtaattttataactgtttacattcattctaagtgacacgggcaagaaactaggaataaaagcataaagatgtgtatgaatgcttgaatattttgatacttgacctccgtaacagaccagtacgcctaagtcccggagcatggcaatatttctggcattccttatgaatatttaaattttgatgaatgaatgctcatcttattcttctacttctacaacaccagtcttcagttccaagcaagttggggtaggctagagaagtagaggtgaagcttatcttattataatattataaaatattgacattcatgtttaacttaatttatttcactgtttttgtaaccctttttccatgcgattttaatatgttaaagatcctgttcttgatttgtatgatcttgctaaaatcaattgctccatttgtgttaccaggtaaacataacctatagcaatccaaatggtgtagaaattacagtaaaatctgggaaggggcagtgttccttacacaccaagcaaacagtttttgattggcaacaacagtttcagcagtttgcagcttatgcaacacgcgcgaatccaatctacggagcctccttccttgttttcactgttgtcttggtgggagtggtctgtgcttgttgcaagtttgcaagaaggcgtgctagtggagtcccatatcagcaacttgagatgggagaccaagcccccaactcatcaggcgtggaaaacactacaagcactgtggatggttgggaagatggctgggatgatgactgggatgatgaagaagcggcagcaaaaccttcagataagaaaccatctggaagtatctctgcaaatggcctttctttgagacctcagaccaatagcaaagatggctgggatgtagattgggatgactaagctgcatagaatgttgagaaatgtgatttggacgagctgcagaaaaagcacagacaaactgatagcatctgtgattgacaaggtcactcgcattctggaagataggtttgtctgtcttcatacggtttgtaccatattgttccactactactttttgtttctaggctgatacacaaactgttagtgggtacaaattgtaatttcggtagtaacacaacagcacggtttcttagttacatgaccaaaacacgaactgtaatttttttgacagaggtaactatcattgttttccattcgtaaaaaaatcagattgaaaaactcttgcattagtatgctactgtcacttcgctttagtctttagagctgtgcagaagcattgctctcgccctttccagcactagcattcttcaccttttttttgtctctttgtccgtttcttttgctctgtacaattcttcagcttttgcctgttggcttccatttaatattcagttcaggctgtattgaccttgcgtgaataaagatgaatatcatctattttgacgcttttctgaatcccgttgtttcgtgtttttgcataaccttttgatttccttgtcgctatctggttgtaacaatgatctcaaggtgtcaatgtaactattggctatactcatttccttttctcacatgtctcctcattaccaactgcaatggatgttttccttttaacaattagcgtacatatattggttctgagatctcacaattaagggtagcactttaatcttgtgagttgtacatgtcatgctattgtcgctgtaccaagcagcatgagtgacttttgactcttgagtggcaatcattgatacaattatgctactacctatagttcagtaatcagttgccatcatcagcctcgcttcagattattgatctgcaacagttcacatgtactccttcgtttctgtttagagtttcctgtagcaggcataaagcagtaatactgcggcttctggtattatgttctccttggcatttttccactcgagcggttcagtgatcagtactccctccattccaaattgatatatatatatatatttcataggtagctaataactctctcatactatatttactatagcaacaaactcaatgcatgcaccatccccactattttctagccaatagcaaattaagatattgcatttagattataaatgcttatgtgcatagatgcatgcatcaatgtccatttactccaacgcacaaataacgaatagacctaatgaatgaacacaaatatatagatcatttatgaataatcttaaaaaaattatatgtatatcaatttggaacggagggagtactaaccagaggtgcaggtacagctgcaggtgcagcttacctgctcaagactaaaatggcttttatcatataaactgctcttctctgatctgttccaagatgacaagaatggcaggagagagaccaacccttttattaccatctcgtctccatgcaagcagttgtactagttgttaccatcactgaacaaaccttttcttttttcctctgaacatcttacctaaccagcttatcacaaatcagacttcctgccattcttgtccaagtgttcctgagcaaagctatggcaagctaacaggtgaaaggcaaggggaccaactgggattgcattgtgaaaatgaaacacagcctgatgaactgggggacacaacacacacaccatcagtgatcagtcaatccatgtactgatgtacaacgtcaaccgagctgtcactgatgcttctttctttcgtctaccaaccacggcc

SEQ ID NO: 26702 - DNA, 4714 bp, Oryza sativa
ttactgaatattattacgatagttgattaggattgcagcgtcatgtcatgaggcgggtatgctccatcgtcagctacagtaaaaatttaaaaattttaaacttacttttagaactgattttgcagttttttttttgctgtaattcatgtaacatgttctagtactgttttactttatgtggcgtgaaaaagaacttggaaatgctcggatatttagcctgcatcgactagtcggcatatctgcagacttacataaatcctttttttttcaaagtttctgcatctaggcatgttgttcgtccaaaaatgttggcagaactctttttttttcctcagttttcattctcatatttcgtggtgtaccagactccagacagctcaacaaccttgtgtaccgcttgtcctacagtgcttcaccggcacaagtttgatcttatcgccggagacgatttcaaatcagaagttgttctgaaactgaacagaaacactgtatgttcggacaaaacaatgcggggctctgtttgcccatttgccaagcagagcatgcatgccactgtgaaagattccgttcttcattgctctcatacggtgtgaatgtgccacattgcctctgcgtggcaaaggtagactagagcagagcactggccgagttagaaattagtactaccaaggaccagtgctaattaatggattattgattttgtgtaaaatttacatggtaacttaaagggatttaaacttgcttttttggggcaagcgccctagctaccctccccgtctctgcccataggttagcagtgtgaaataagccgtgctttgtagtgatataaaataagagtaacaatgggtgggcattcggtctaaccgaaaatttcggtctgggtcgtcggtctttcggtttttttgtctttgaaaagtgaagaccgaatttcagcgcaaaaatgttaggatcgacaaattcggtcttggtcttttcggtctcggtcatgaccgaaattcaacgacattttcatatatgcaaagaaataatgaaaattttcaacacaaaaatcacaaaaaaaattcgtaagcacttatgagtaaagactcttattaggttgcatgcctagaataagtaggcatgtgaaaattaaagtttaatcctattaaacataatggactgtaggttgtatttagacattttttgataattcggccttttcggtctattcggttacccgaggagactaatcgaattgatcgaacaaaattcagtctttcactacgtaggaccgaatttttcggtctcggtcttttcggttctgtctttcggttcgatttttttctgcccacccctactgtaacatatacaattaaactatagaaagaggaccacttcacactttaagcacgaagattagtctatttaacccctgaagtatgaaattgggtattctatttccgaagaatagaaaccgagttaaataatcctatactaatgatatagctgtggtttttgccacgtggactatagaggagataatgacatgataataggggaatgaatattctttcaagaagtggaaaggctcgagaatgatgtacagtagtgcgtatgtggtaattagtgagtgaaaagaaactattggattgacttgggtttagtagattaatctttatgcatgtaagcaatactgtcattatccccatgaaaaaactacctacaaaactattcaaaggggttatttgagccactttcatatttttaggagtagaatactcagtttcatatttcaggggttaaatagaccaaaccaacactcaaggggttatatagacttatttctaaaaaatctattaaaaagttgcttttaaagtcgtattaacccatttttcaagtttaatataattagtatttaattaatcatatgctaatgaatctcatcgttttgtgtatcttctcatcctctcccttcctctcaaacaaacattcataccttccccttaagagtacaacgttgagtaacatttctcatcctttggtttttgctaggcaatactataataacaagatgaaaaaaaaagaaactatatgttgttggccagtttcagaagaagctgagatccacaattatccccacaagcaccacaaacagtcataccacttgcttaaaaattcgaacaaacaaacgaacaaaccaatattccgcagtaaggaaatgcctaaaaaaagaagaattcaaaatggccatcttccaaaattcatgctcggtgctctctgctctgggaccgggtggcattaatggcaccccacaaaaccaaacaaagcaaccacctcgcacactacacacacagtgcatctccacgccgccacgcgcgcccacgctagaatccaatggacgaacacctcgccgccgcttgatcccctcctcctcctccccaatggccaccgccaccgccgccctcctcctcctcacgctcgccgccatcctcgccgcggcgggcgccgtgaacgacgacgtgctcgcgctggtggtcttcaagtccggggtgtccgacccggggggcgtcctggcggcgtggtcggaggacgccgaccgcgcctgcgcctggcccggggtgtcgtgcgacgcgcgggcggggcgcgtcgacgccgtcgcgctcccgtccgcggggctctccggccgcctcccgcggtccgcgctgctccgcctcgacgcgctcctctccctcgcgctccccgggaacaacctctccggcccgctccccgacgcgctgcccccgcgcgcccgcgcgctcgacctctccgccaactcgctctcaggctacctccccgccgcgctcgcctcctgcggctccctcgtgtcgctcaacctctccgggaacctcctctcgggccccgtccccgatggcatctggtctctcccgtcgctccggtcgctggacctctccggcaaccagctcgccggaagcgtgcccgggggattcccacggagcagctcgttgcgcgtgctggatttgagtcgcaaccttctcgaaggggagattccggcggacgtcggagaggccgggctgctcaaatcgttggatgtcgggcacaacttgttcaccggcgagctgccggagtcgctgcgtgggctcaccgggctgagctctcttggagcgggcgggaatgcgctcgccggcgagctcccggggtggattggtgagatggcggcgctggagacgctagatttgtccggcaaccgcttcgtcggcgccatcccagacggcatttcgggctgcaagaacctggtcgaggtcgacctcagcggcaacgcgctcaccggggagctcccgtggtgggtgttcggcctggcagcgctgcagcgcgtctccctcgccggcaacgcgctttccggctggatcaaagctcccggtgacaatgcctcagcgctgcaagaactggacctgtcgggcaatgccttctccggcgtgatcccgcgcgagatcgcgagcctttcaaggttgcagcatctgaacctgtcctcaaacaccatgtcggggaagcttccggtgagcattggacggatggcattgttggaggtgatggatgttagcagaaaccagctgagcgggggcgtcccaccggagatcggcggtgcggcggcgctccggaagttgctgatggggagtaattcactcaccggaatcattccgccgcagattgggaattgcagaaacctgattgcattgtaagtgatctcttttttttttttccaacataacttggtggcttgctgttacactagcagtagcttctactttgttttttcttgtgttagcagctagcacttgcctgctctctggttcctagtttcagatgccatggagaaagtgatgtctatgtcttattttctgtttggaagcactaagccagcaatgtcggaaccatgcctgtcctgttgctttggtcgtatcctagtgtctgtgtccttgctttttcttggatacactaaaaaaacacaagtcaaattacataagaaatttgaatgcttcttaaagaacatataaattacaatgaacaaggcaaatcatgttgcatcattactatcaaaatcttggcactatttcagctgatgtgtgtatggctcttttgtggcattgcagggatctatcacataacaagcttacagggcctattcctgcgaccataggcaacctcaccggtctccaaatggtcgatttctcggagaacaagctgaatggaaccctgccagtggagctctctaaactcgcaaaccttcgagtcttcaatgtctcccacaatctactatcaggaaacctccccatcagtcacttttttgatactatccctgattctttcatcttggacaatgctggactttgcagctcacagagagataattcctgcagcggcgtcatgccaaagccaattgtatttaaccctaatgcctcatcagatcccctctcagaggcttccccaggtgcccccagcagccagcaccacaagaagatcatattgagcatctcaacactgattgccattgtgggtggagcgttgattattgttggcgtggtaactatcacagtgctcaaccgtcgtgtccgctctgcggcctcccactctgcagttcccactgcactatcagatgattatgatagccaatccccagagaatgaagccaaccctggcaagcttgtcatgtttggcaggggcagcccagatttcagtg

SEQ ID NO: 26703 - DNA, 1644 bp, Oryza sativa
ccccccggttaaagttaaacaggatgtagtcacgtgcagcggacaacgcaaagcccagagaacaaaatggaacagaacagtcaggatcaatcagcctcgccaccgttttgtcttttacttttccttttcttgttttttgcatggcatgtggatggatgaagaatgacgcagcagtagcattagtaggagtactatccctgattctttcatcttggacaatgctggactttgcagctcacagagagataattcctgcagcggcgtcatgccaaagccaattgtatttaaccctaatgcctcatcagatcccctctcagaggcttccccaggtgcccccagcagccagcaccacaagaagatcatattgagcatctcaacactgattgccattgtgggtggagcgttgattattgttggcgtggtaactatcacagtgctcaaccgtcgtgtccgctctgcggcctcccactctgcagttcccactgcactatcagatgattatgatagccaatccccagagaatgaagccaaccctggcaagcttgtcatgtttggcaggggcagcccagatttcagtgcaggtgggcatgctttgctgaataaggattgcgaacttgggcgaggaggctttggcacagtctacaaggcagttttaagagatggccagcctgtggccatcaagaagctgacagtgtcaagcttggtcaagtcagaggacgagttcaaacggcaggttaagcttcttggaaaggtgcggcaccataatgttgttaccctcagaggcttctactggacttcatcactgcagctcctcatctatgactttgtgcctggcggtaacttatatcagcacctgcatgagtcctcagcagagagatcggtttcatggatggaaaggtttgacataataatcggcgtagcccgagcccttgcgcacttgcaccgccatgggataatccactataatctgaagtcaagcaatgtcttgctagatagcaacggcgagccaagggttggtgactatggccttgtgaagctgctgcctatgctggatcgctacgtgctgagcagcaagattcagagcgcgctagggtacatggcgccggagttcacatgcaggacagtcaatgtcacagagaagtgcgacgtctatggtttcggggtgatagttcttgagatcttgacaggcaggagaccagtcgagtacctagaagacgatgtcgtcgtgctctgcgatgtggtgagagctgcactcgacgatggcagggtggaggactgcatggatccacggctatcaggtgagttctccatggaagaggctatgctgatcatcaagctgggccttgtttgcacgtctcaggtgccctcccaccggccggacatgggtgaggtagtcagcatgcttgagatggtgaggagttctcagggtaccccagaggatgatctggtttgaaatctattttttggttccatttctctttccctttattagttcctttttttgtctttgatagatgggatgattgcaaagaccaaagaatgtgaggagatggctagtgatttagcctgcttgcaatttttcagggatgtgaagccgttgcttcggatcagttcttggtcccttttctagaagggctgcaggaa

SEQ ID NO: 26704 - DNA, 11508 bp, Oryza sativa
agtgtcagtagtttgggcctcgtacgcggagcctcctgaatattagtagcaatttaattagcagagagctcagaaaaaaacacgaacatcaacctaatatcaaataattagaaagggtaagacttcgaactcaggtcgtccagcccaccacctcgtggagttagtcgaaagacccctgcgtgtttctttaattagcagagagctcccttgatctaatcatcaaactgtcatcaaagcaagcttatctagcgaaaatgctcttgcagtttcagttgcaatgtaacaatcacaccgcacatgcatgcagtggactagattttgtttatccccgtatagcaaagccaattccatgtcccagtattttagcctaatctgttcgtcaacagaaaaaaaggcagatgcaacagagcctgcatgttaatgacaactatattaatgacagagttgaccatgccggatagctactctatgttaatgacaagttgacaattagtactagaatacgctggtgcacgcttgtcttatactcccttcgtgatcaacgtgcaacagagtatataatttaatgatgttcacatcgcccattgactactcttgggtggatttggattaattaatttggcccctgtccacctaatgtttgatgcttacatatcattaattaagcatccacatggttcatcgttcaagtataggttaagtagctagtttctcataggccgaagacgcctgcatggagggagggtttatctgaccctgatatcattggagtaacatatataatctgcattaccgccataatgacatatatggagtatcagtcttgagtttatgacacattgttactatatattcagaccaatattactaagaatatgaaccctcgaataggcaagaagttcggatcctggtcaactccttcacatgccaacttgtcactactgaaacatatttgatgcctgaagttaggatcaacatgtattatcatctatcataacctgggtcattgttcatccacacaattgatgacgtaagtctattgatagactttcagctgatgataagacacacctaaattgaaaattgaaaaattaattttcatccttaatttttgaatcaccttttttagactctctaactttatttcataatagaaacatatccgtgccagagtggaagtatgaaagtcttgcccaaaatcatttttcattgggtcggttactttttcggtctctaagttgtgtttcaactaatgagattacaatttggtgtctatcagtagatcgccgcagtaatatgtgtctccatcctaaaacttcaaatttacgaaacaaaatgtttaaatctagattagaatttcaaaaaacttacaaaaattcgaattatttttgattttttttgggtatttcttccccggaattcctttttggattccgaagtactgaacctctctctcacacccacaaagaagaaaaatctcattcatgatcacctcatagttgcaacaataatacttgcagaaagccagaaacacatcctacaatactacacacctattagtaccatttatcacgcaatttagtcgcataacaatgctagctaggagtagatttgaaacagatcaatctcatcgaaattcatgaactcatcggcgtcgacgaacgagctgtctccaaagtcatcatcccagttcaagcagcccagcagatcgggctccattgccggagacgaacaagaaacgacgtcggccggcgaactcaccgctgacggccccggacacgagtccactggctcttccttgctcatcttcaccccggattcctccccgtctccctccggcgagcacctggactgcctcgacgacggtggggtggccgccgtctccctccagacatcgccgtcgtcgccgtcgtcgtagagcagaggcggcgaaccgctgcggctcgcggtggccggcccgaagttgatgacgaaatgctgcgagttttcatcgtcgtcgtcgtcgtccatggcggcggcggcggccgtctggcagctgcaggtgtggtcgccgaagtaggtgatgacgtagagggaagggtcttcctccgactgctggacctgcttcgtcgccgtgcagccatggtcgtccttgtagctgcaccggtagtagagcctcgggtgcttgctgttcttgatctccttctgcccgtacttcctccacaggaatccgtcctccgacgtccgcgccttctccaccctcgccggctccgccgccgccgccgctccgccgccgctcgccgtcgctctgcaaaagatctcttgctgagtcgctgctcgatcgcgcgcgccatcgcaagaacgggaggagacatacatatatatataccttctcctccggcgcgtcgacggctgggcggttgccggcttgcgcttcgtgtcggctgacgacgattcggcatcgccgccggcgcgcaacgcggcgagcgcgcggtcgcagcagcgaaggatctcggcggcgagggcgtgggcaccgccgtgcgccggcgggagcgacgcgccatggagcagggcttccaggacggcggcggactcccgcccctgcgccatcagctcggacgccatggaagaagcagccgggctagccaccggcgccgcagtagcagtagcggtagcaccagtggcaatcagcgccatttgcgcaacctcggaaaggtggtggatttttatagcggcgggtctggatcggatatagcttagctgattagctcgagaggaagcagagacgaagttaaaggaaaaaaaagtggattaaaatgattaattcgatcgggaagcgtgtctagttgctcgcgtcagtcactaacttagttactacgcgccatgcatatggatggcaatatggcatcgtgtgttaatgttgttcatgtcatcaggtcacatgtactatgttgttcaaatctaggttaaatttggtgctacttgtacttgtttatgagttgttgaaagcgtgtgggtgcaccgatgggttatactaacaaggactgatacatggcctttgctctaccggtgcaaacctcgtgtaaaaagctaatttactaaaatcctatatgcgataattttgttcttttttgagtgtagagtctaagttgtgtggtagatcctaatgtaaatcccccgttgattcctttgctcggtgtcgaaaatcaaacccctctcctaaatccctatcaaccaatttccttgattgattccagttcaataattcttttaaagatttgagtcggcgctcaaaccatttctgatttctcgttgcgaattcccattatttcaaatcaccaatttgacaagttcaaatctctaatccaacttctcaaaatctccactcgaaaataatctcgaagttcgaacccttctattcagatttctcttctaaaaaccgtaaatgcaattttcgtcaaatcctcgaattcaaactcactccaatgtttcacctctaaacttctcccttggtctcttgaaatcaattatcgattgtttcatctctctgtctgtctctatcccccttcgaatcccttcctaaataatcgatctaactctaagaaacaaatcaaaataccacttttctacctctttaccctctctctttttagagaaaaggcatttcgcccagctttactgaaagcataagagtatcttacaagcgtttcgctagggattgcagcttccaacaaggaccagataaacaaaagcaaagaagggcgcgcacacacacacaggcggaacaaagataaagaggtctagcaagcactaaaagcaagagaatggtagtcccccttgaggggaagccccttaaagacgcttgatgcagcggttggcttccatgtccttgagcgtcttcactgcggcagcatttgcaactatcacattccatggatattggcaagtagtgagtcccctaaagtctccatctctcctatcagcgtcgacggcaccaaacgctttcactgttgcataaaagaaacaactctataaggaagatgaaggatattaatttgttagaagtttgttgttaaacaccccaatcattcctaattagccaaatcgcccaaaaaccttcaacaaaaagataccacataactatatttttggacctctctgcttcccacatcaatatagtcatctcgctgtcgattgagggatcctgttccaattaagaacatctctaaaacaacaccaaagaaatctagccgggcacatttgaacatcaagtgatcagtgtcttccaattctccacaaagtttacagtcaggatcaccttgccatttcatctttttttaattggctggcagcgtgaatcctccctttcattgttaaccaaacaaagatcctaaccttcagcggcacaggtgtcctccaaatctcctgcattcttgagtacttgacctcaccaaacattatcgccctatacaaagatttagtagaatactttcctggcccctctcttttgaatccctctcaaataatcttttgagtccccaaatatacacccatccccaaaatatcaagttctcgagttgatgccctctccttgatcctttgtatttcgctaagttaaaatgtaaatttcgaatcccgatcccaactcaaaccctatttctctctatcgatcccctccccgcaataattcctggaattcaaaatttgaagtttcaaatcccaattcttgcccccttaaattcccctcaatctttctgaaggttcaaaaacaaacttattccgaaaatctcactcatgatcacctaacagttgcaacaataatacctacagaaacacaacctacaatattacacctaccatttatcatgcaatttagtcgctaagcatgctagattttctttctagatccattttaactttttcattatttaattaattcatttgtgtccttaattaattccataatgtcaataataatatatcacaataatctaccatctgaaacaaacagagcctttggttactgtaaccttactttaattaccccttccccttttgataatttaattagcacctttttctaaaacaaaacgcatattaaagactacgaatggtctcgactaaaatatactccctccgtcccataatataagggattttggagggacatgacacatcctagttaggaccatgtccagatacatggtcctaagatgtgtcgcatccctccaaaatccgttatattatgggacggagggagtaattatatcagggtaaaaattatagctaagcatagaagaaacgaatgggaattggagagaacttgcagtacagtatagaattacaagcagaccgtaattcgaattcatcttaactagtttcccttttgcggctgacacaatctaacaatatgttattgttcgagatggtaccatgaaaaatagagttggattatccaagtactattatccatgatagatctgaactgtcacatggtaatgttgttctccaagatgacaaatatatatttgtacacacatgaccctggggaaagctgtccaatctcattatctgtgtagaaaaacgtgttttacgtacatgaatagctgaaaattagttctctaagctgtactcctgaatattgaatctcttgatctagaagcttccagctgctgtgaactctcctggcgtagctagctcgctgcacatgatcatgttggtgagattccaaaagagaataaaaacattgaacagtgtgctcatagtaaaattaattttcttacaaaactctttgcagacaatttttttagccatttgatttaatgaattaggagttacagagaatcaagattattcaatgacaatgttccatattagagtttgtaaatgttttggcaaaaaaaattcgtacacatgcatagcttcctaaaaacattcagtattggacttaaagttcaacgaaatttactggggttgtgcatgagattggtgtggagattagtgggaattcattctcttcaacggccgtggttacgctaaattagaaaacaaggtgggcctggaagggaaacataagaggtaagaagatagttccatcgggctaaatggatggctggggcaataatggtgatgtgccgtctcagccctaagagatatatatatggtggtctggtggatgatagaggagcatggaaatgatgagggttgagtatttttaggcatttaggaatgcaaagttatagggacaccatggtggaggatagatagaggggatatattaagtgggcttaagaactatattaacccacatgtatagggctgtttgaatgacacccctcccatactttgtcataaaagttctgcaaactgtggcaagccacatattgtatggccaacattttgttggtctcatttgtggcgagaaaacgagactatgataagtgaggtttgattttttaaaaaggtgtggcatactatagttgtggatgccataaatttcacagtgtgtggcttgccacaaatgtcacagtgtgtggctctcaaccaaatagcgccatgcttctctatctcaagatataactgcttcttcaccaatctcgtttccgtctcaaccaataacaaccacattttatttaattctacctctccttaatatatgtgaaaaacttgagagtggagaagtgcttctattttaatttgggatggagaaaactctctggtgccctcgcgccgccctcacgcggcggctcaggggcgaaaccctagccgtcgccgcccctctcccctcctccctgcttcgccgccggcaattccgggcgacgcgctgggatggcggcggcggggccatctctcttggctccatctcgccccggcgtaggcatggcgacaatggcggctgggcggcgaggtcgcggcggcgggatggtgaggtcgcgttgacggcgtggtggtggggctctctgcggcgtcggcagcgctgcggaagggctccgcgcggctccggcgatggcgtcgccagctccgatcgccccgccagatctggccggggtgacgacggcggcgcggcggtggggctctgtgcggccggcgacaggctcggtcgatgccggcgccttcgggcgttggcaggtggcctgcagctcccgcgcggtttcgtcggcgatgacggcatcgggtcggcggcggctcgtccggttggccggcggagcgcgccccggcgccgactgccgcgtggtcctggccgggggcagcaggcctgctgcggcttttgccggctgcggggacggcgcatccatcctcttgttcctctagatccggttctccccttcttcagtggttgttcttccggtgctctctagcggtgtggcacccgctccattcttctcaggtgctcctcccttcttaggctaggctgcttccagtcgatgccggggagcttcttggtaggggtggcgtgcggattttcggcgtcctgttcgctggtcatcggccgcgctgttagtttgctccagctgggttcctgggtgtgaggtggtctctggtcgagctgcaggtgattggttgttgaggcggagttggagctgcttgtcttgcaagcttggcaacgatgaccctcagtgaacgtcccggcaatgcggcgagggtttggaagtggagccttttgagagagcctcgggtgaaaaccttgcctagtgctatcctaggttgatgatatcgacgcttgcgggcgccgttttctccttggaggtattgtcatgctggctctctcttccttcaggtgaaaaccgggttcctttcggaacgggcgttgacagcatccttgatgttgctcccttgttgaaggcttcgctcagaaggtttatgctccactagaggatgtttggtggttctggagacctcgtttgcattatgttgttcaagctgcttgccttttggtaagcttggtaacgacgacttttgtgaggtctctttagttgtttcttttccttttttgtataggtttttgtcggttgtccgtttaattaaccgtgcttgtttggttttcgggcccggtttcccttattaactgggccaattctcttcttctataaattccggcaggagaaactcctgtcgtcggttcctctaaaaaaaattgggatggagggaatagcaaacttagatactagctagctggtttgcacaaagtgaaacatgaggagccacggtgaatcagggatgaaactcgagagaaaaaaaattggctgtgtattctcccttgaatgtaaattgtataggtaagataaagtgataaaccatagaacacatttaggtgccatgccgggagcttatatatagtaatcacttgcaaattaaaatccaagtttttgggtacaatacaacaagagctagctaataattcactaatactacgcgacaactttaaaaagatgattattgtgatttggcaattgcaagggaagctgcttgcatgtgtaccaaactaggtagatctagatcaccatgagttcatcactggcaaattacgttcgtacgtactacctgaagagcagtggggaaaaactgatcagttgatctctatcacttccagccggcaccattccatggctgcggagacgactcatcatagtcgccataggatccatagttacgcataattgtggacatgattcttgtgctctcatcaatggagggaacttcttcttcttcctcttccttcaagatcggcgcgccgacatgagaatccattaatgatgaggaaatggatgcttttgtgaagtcgagcacttgggaattagtactgcttgaactgggctgatcttggaacactgtattgcatgtatgctcgttggtgagggtgaccctgaactctgggggatgtttgttgttttcttgctgcacatatttctttgcttgacactttcgctcatcactgtaaccacatctgtagtataacctgcaaattgtgtagtgcatgaattgatataaacatataattatgcatgtcagactatatcatcagttttatatatagttgatacacatttatttccaagaaagcacaaacggaatgaatgcccattcaataagtaaaaaccaattaattgtgagacttcatgtacatgtgcacgaaaaatgcagtgaacgaattgaactagcacaccattctttcggcacattctcgtcgtagtctaaactctgaacatttacagttgtgagaactagttgattgatttttgtgtgactaattggacttcagccaaactttcatacgtctatgcatgcaccgcacttaacggtacatgtctccatgcatgtgatttttcagtataatccttttatttaaatgaaataccttcaaaacatactaatgaacaatattaattttagttaaaaaaagatgtctacaatctttgctcactaaaatttccttgtcctattcagttactaagaactgcacttattttccctaaaaaaaaagaactgcactttttttaagataataaaagttcttaatgaacttagtcaattacaactgcacacaaatcatatgatcatagcactacaggaatttaaggaaagagttggtatctcactctacttttcataattatcactctacttcaaataatataattgttctataagtgtatttgcaaaggtcacttacccagattttctatatttttggcccatttacacctcgaaaaacaagtagaaccatttcccaataattagaagcatatataccattattccgacaaaagtattaatgtaataaaaacatgagtatcatactacatatattttgctatttgcaattatatataaaccgaccatttcaaaggaaaggtaggttcatttctgctcacccaatatgagatatatgcacacaatccttaaattagagctagctatgacacacgcacacacatctaaaatacatcctgatatttctccgaggacacaccttagtgttcttgttgtgacacgtctgctggcactctatatgtatgctactaattacctaggtaatactcctttattataaggtgctacagagagctagctagaattaattcctgcagtattaattcttttttttgaataaaagggaattatcaacccatgtttgaattttgattaaggtaatgctaaatcttcagaaattgaatcaaagaaaagtccatcagaacttcatgaattgatggttactttcgaaattcactgttgaggatattcttctcgccatatttcctccagtgaaacccatcattttctggtgtcgtagtaatgaataccgtctcgctgaaacaaaaaaggaagacaaaataaatcatgcacttaacttgttaacaagtttcctaaccatgaaatatagatccagccagtgctactcgagaaaagcaagcatacgaggctcccaaataatccgaatggggcagaacaatatccagcttgctaaaaaccttttagtgtcctctaagtataatagatctaggcttctttcggcatagactattaacagctccatttcttttccccctcaaagcaagctaataattagagacaacaaggaaattaagctgattaatcagtcactcaagctcaaatggaacacacacacacacacagatctgccggccggttgccggttgatggggttcttaaatcttaattatctagtccattaattagtcccatatatatgtattgccagtggtagcatgcagaagagaagaaatcgaacacacataagtagttttcggcactcacatgagctcctcgccatgcttgcctcgccggcgcttcgtctttctttcgccgccggcgccggagacggaggtgacagcagctggcccagcgccgccggatgaggaggaggagccgcagtagtagtgctccctcctctcggaccggagggcgtagagcgaggagctgagggacatggagaggctcctcacgttggccagcgcgtcgtcgcggcggccgtcgagctcccgctccgggatgagctccagctgcgccatgagctgcgtcgccagctcgctgcccttgctgagctcctggatggcagcgtccctttggtcgccgggcggcggcggcggcggcgacggcgacctctcggactttggcaggcgcctcgccattggggatcgatagattgggcagcgcagctagctggctgaggtgtaccccttcagtaggtggagacgatgtgaactttggtttggactaggggtgtccttttctggatacttgtgtactggcttagtagaagcagctatctatagaggctctgatcttgggttcaattcaagttgttcaaccattgaccaggtaaatattcgatgagatgtgtgtaaggagtttaacctttttaagctaatactccctccgttccacaatataagggattttgagttttttcttgcaacgtttgaccactcgtcttattcaattttttttgcaaatataaaaaacgaaaagttgtgcttaaagtactatagataataaagtaagtcacaa

SEQ ID NO: 26705 - DNA, 5702 bp, Oryza sativa
ttagtgtgatgtgatatgtctgtgatgttgagatcaaagggacagttactgttaaattcttggggacggacctgtccgccgtggacgtggttggtcaatcagaaggaagcgcgtctcgaacatgaattatgctatttttttcagaaaaaaataatttacatacgccgaatcttcttattaaaaagtgaatatgtacaagggcaaatatgaacaacaaaccaatcgaatcgaggatgacattgcatctgtctgatatcgagtgtgaccattgttcaatttcgaatatacgaagaatttgggaaaaggatggcatgcaatatatatttaaaaatttcaatacctttttataaatatgttctctattttaggtgttaacctggcaataccaataatgttttgttgcctacacgatagatatttgtaaaaaaaaaagaaatttggagggctttgtttttaaaactttgttaaaagttttataaggaaaaaacagtgtagtattttggagggatttattttactgaaaaggtttaaagacaaaattatatgtatgatacatgaatttgcatagtgtctataaataagtacaataaaatactgtgcttatttcagtggaagaacttgcttagtccaaatgaaccagggaaaatatttcagacggacaaactagttcatgctactaaatgccacgctgatttcgaagtgagcataatgcatgcagacatcactttgtgcacattctagtaaaaagaaaatcgacttatgcatatgagttttaagtatattaggacgatatacatgtattatcgtgctacagttgtaagagtgaaccaaacactcaactaagaaaccatgtcatggctaccatatagcattggaaagggaggtatccaaccaaacaacacattaagaaggtggtatttgaaaccaatgaagataaagattaagttgacgcacataaaacgaaaaaactattagcatatgattaattaaatttaaattattacaaacttcacaaatggatatatttgatattttaaagcaactataaaaagtttccgtacgaaacatttcgtaccgtctagtagtttgaaaaacgtgctaacgaaaatcaagataaaatatgtagagaaaagaacgtgacgtaagcctgcatttgacatcgtcgtttggcattaaacctgcagccaaaatgaaaaaaactattaacacatgattaattgagttttaattattaaaagtttgaaaataaatttatttaatatttcaaagaaacttctactccctccatttcaatataaatatataagtactttttagatttcgacacagtcttcgagatattactttgactaacaatatctatgtcttatataaaaaagagttgtatattacgatagtatgtttaatggtaaatatatacaaaatcattttatacaaaatatactattttagtatttggacaaacatgcttcttataattctagtacatttctactcggccatattactctgtccattataggaaaaaacaatctaagatgagacattattttaacattatggtctcgttcttttctccaaccagagttgaatgaaaattaattttcatggcacgcttttcaaactgctaaaaggtgtatttcgtgtgaaaactttctatatgaaagtttctctaaaatattatattaatctattttttaagtttgtaataattaaaagtcaatcaattatacgttaatacgtaaaaaaaattaatctttatctttagaagaaaagaagaaccccaattattctggtttgtcccattatttccagttgattttttctgcacagaggtagtcctgtcggagtcgaacgcagccggcttccctttcacaccgccgcgccgatataaaagcgcgcgtcccgacggctggggactcccacttccacggcgccaaccgccaacccactccctcactcctccgcactaattcctcgcctctacaatctccttctcctcttccgctcgcgctcgcgctcgcggcggctactatgacgcagctcaggcgatccacctcgcggagcgcggagtggatataggataggatcgaggcggatcggaggaaggaggaggaatcctgggttggcttgattccccgccccagttcgagtgagcttccggagtttaatttggggtagtgttcttcttcgcaacaaggtatattctccccgcttgaatcatgggggcgcgtttgcctgtgtgtgagttttttttttttgtgaatttttcggtggttcggttggattattctcagccacattttaccacaggaatttgctggggttttggcgttccttcctcttttatataggagtagtagtcgacaggtcccatctcgagttttcatcctgatttgatgggattttcggcatttctcgcgatttttttgcacttgttgagttggtactagtacaaaagtaggagtactactactagctagtagctgccgctgcatgcatctgcggagtttagttgggacgtcgtggttgcgaattaggatggtgttactgtcaggtttcgttggcctgatgttgctgagtggcagatgtgttatttgtctctagtttgattgattttgatcgcacagagccattgcttgagcacaaaagcgactagctaggcaggttgttagaggcagaagaagtaggtacaagtaaacgatacaaatggggtgatcttcttttctgaagaactttcatgtcacttgcatactgttaccgtcaaatttggccatctgtttcagttttcattgatccaactttcattaagcaacggagtatagagaaccggagtgatttgttttcttgatattggggaattttctgaaccccatgtaccaaactgggcatgcatatgcaaacacccaaaacctcgtgcttcaaaaagaggaataaatgatatctaacatcataaacaatggtggtattcataaactcttcttttttcctagttaggatcctgaaattttggaattttgctgtcgtggatatgactagttgctgctgattatcttgaagacatgatcaatttcggaggagtactctgtgcagttacccttgtggtgttgctccccttcttagaggctgcagatggaaaatctactgatccttcagaaggtaatctttgcaagcgtattcttcactatgagccaaatcattctttgcaagcatattcttcatgctgagccaaacctgggctgggtcatattaagctggttttgaactaacacgttctcctgatcacaaattcctcattatatgttgacacatggggtaggcttaggtttggactaggccttggggcaagacatgcttgattagttgattggaccattttaaactggcttttgaaccaatattctcttatgatatctctgtaattacatcaacttttagtttcttatttgcacaatactccgttcatttctagatgggtgcttcagtgttctcccactattgattctgtaagacagtgggagtaatttgtttatgcccttgaaaaacaacaaaccagaaattgtacttcatggattacaaacataccggaactctggtctaatgaaaacatgcaagaattctattttatgcctgctgtgatgccagagtccatttctagtaactgaagtaggtattttttgacgacaatgagccgaacatagtatttgtggctatacagttttcctactaggtaggtatttgtaaatcataccctaccagttagtatgtttgtctaacagagaatgatattatacacagctcttatttgaaaaatgaaataaagagttgcaaaaatgtatgctaacgttgtaaatgaaataattctctcataggatttgtaaaaaatagtttgttatctcttgtgctcgataaccactttctatcaacagactatgagatgtttaatgccaacagtattttacattgagtttctttagttaaaagttctaaaatatttgctgcaaaatatatgttgtttttctccctatatgcagtcagtgcacttatggctatcaagggaagcttagttgatcctatgaacaacctcaagaattggaataggggagatccatgcacaaaaaattggacaggggtcttctgccatgatttgggtgatacatatcttcatgtaacagaactgtatgaccaatacttctacataatttatttgccatatcctcactttcagtttggttgtcataataggaactatgaatgctagtggtcatagaaaacggttctatagttaaatgctgatgactatgttttccatagctgattaggaattacaaatttctgatgcatgattaattgtataatctattaaagaaataaatagttgatgtcttacaagtgtcttattgccatactaaacatttgaagcatactgaattgaagtgttatatttagtctttattattgaatggtggcaatgtggcatgatgctacatttactggtaactatgcatctcgtttgatagtaataatatgtcccaccatgttaccgcagggaacctcagtcctgtctgtacgaggccccttttttaaaaaaaaaattctaagcattgttggagcagccttttgaagcttttctttgcttgaaatattcgataagggcatacagttccagtaaatttcaatctgttgctgattatattattttgctccatgtaggcaactgtttaggaggaacctctctggaaatttggtaccagaggtcagtcttttatctcagctgaaaatattgtaagtatactctaatgactgaagattttattttttgtaagttctgcattcattaaatattaatccttagtactatcttcatatcactatattttccataaaataaattaatggtgtcttcctggataaaagattagccttcatcttttacttgctgaaaaattactaaagaaaatactaattgatcagcatatagttgatttttttgcatcaatctcttataccatatattaacttattgctgtttctcttgaagggattttatgtggaacaatttaacaggcaacatcccaaaagagataggcaatatcactacgctcaaacttatgtatgtattctctttcaattaattctacacccctcttcaatatgcacagaaaacaacggaactccttaattaaattatttgctatttttcttatatctaccaatactttactctttttttcatgctttatgtagattattaaatggaaatcagctctctggtcttttaccagatgagattggcaaccttcaaagcttaacaaggttacaggttgaccaaaaccatctatccggcgcaatacctaaatcatttgccaacttaagaagtgtgaagcatctgtaaggattgttcatttccattttgttcctgctttgttcttcaatctgaattcagtgctagactcaatttcccctttcatttcagtcacatgaataataattcattaagtgggcaaatcccgtccgaattgtccagactgaatacacttttgcacctgtaagtggaagcctattggttgcatttttttctaatgcatgttgtatcaggtaacatggaattaatcttattatatactctaactaaaactttgcagccttgttgataacaacaatttgtctgggcctcttcctccagaactagctgcggcaaa

SEQ ID NO: 26706 - DNA, 16665 bp, Oryza sativa
tatctataattagggacaaataaagaaaattaaaaatgtgattccatgcaagaaatacgattaacaaaattcagaatttaggattaacaattacaaaaaaataatatttttgttaggagtccatgtagaaatacaatttaaaaacatccaaaagttcagattgaatataataaaactaacataaagagtccacatagaaaaattggattgaagataaatattatagcgaaaagagttttgggaggattgcagtttagaaatattttaaaatcggattaaaaataaataatattgaggggaagaatccaggtagctagaaataaaatttacaaatatcttaaattcggtttgaaaataaatattagtgagaaaacattttatgtagaagttgatttagaactattttaaatgtgaattaaaataaataatattgatagaagagtccacttttacaattgaaggctagtcttctattagctttatattaatactatcagctaaaaatcagctaaagaatctcatgtaaattagctagaaaactagcttatgagattggatcttaaccctataccaatgtgacaggagttagtccaaactgtcagcaacattaacaaaataaaatataaaaatacccagtaacatagtaatattgataacaatagaacgtttttaatttaaggttatgaactattatgaatatacaatacaatatgccatcttcagtaggtggaagaatgtcattcgaggtagtggaaagatgcaactatagatacagatgtaggggaataagacaaataaatatgccataggatttatgtatctttgatttattgtatttttatgagaatactaaaaattccatcgtgtttgttttatggacatgggaattactatattaatcatttgtcattttaaatactttttcacaatagtttggtcaagttaggtcaaagctcaaaatcatttgtcattttaaatatttttttcacaatagaatgtgaagtatatgtattatagaatgtgaatattttatagagatgctagtttatttcatagaatctgcgcggaccactttgctagtttatttcaaagtaaacgttgagacatgctagaatgccacttggtattggtacatagtatataccttctttgtcaaaactcttgcgagtatgtaccatgtctcgtacaactcccttaattccaaagtaagttccgaaagatgtgcatggtgacacgcggtgaaaagcttttctaactattgcattgtatgtacaagcaaggacgaaatcgtcgtcaaccccaaatgaatcagggcttccataggtgcggcgcacaagttgctagctacttccttcgaccttcatcttaaaattaaaattatttatattttctaaaaaataaattaaagttatgacatagatgcttgtgaatgtttgatgtgggaaaatagatgaagaaattaaatgggcaaaattataattggttcagattgaggtcgacaaagaggtactcccttcgtcccaaaatataagtagttttagggttgaacacaagtattaagaaagtcggtagaattaaataggtgaaagttgttattggttgagaagcggagctaagtgagaaaattgaatggtgaagggctgtgattaattgagaagaaaatattggtgaagaaattattatattttgggacaaatcttaagggctagaagttgttatattttagaacggatggagtagctagtttcatttaaaaaatatcttaaaagtagttatattttaatacagagaggacttgctcgtccactgcttgagaaatttatggaggacgcacgcgttggtcgtagctatcactcatcagcagctgcagttgctgagcttgccgttgacgctaatactatatattggagcgagcgatggatcgatggagtatacaacagcagcattcaatggcgtggcagaaatatctccacgccatgagccacggcagcctcaaacgaagaaaaatagacccaaattacaacccgatcgacgtgcacgttttactgaatcgttgacgcgaagcttctatcccgtgttggatatacatcgatgctcatcgtcgtcgtcgtcgtcgtcgcagtcgctagccgtgtgtgtcggctgatgccgatgccaccgttgccgcgaccatttcgccacgcacgaattcatcttcaaagacaaaaaaaaataaacaaaaacaaaaacaaacaaacaaaaacaaaactgcaacggcgacgtgctttgtcccacggtcatgcacgctgccacggacgatgtcgcgtttactgaaacagaagacgcgcgcagcacacatcttttgcagtggaaattctacagaagaacgcagcagtgtgcgttacagtagaaaaaccttataaaagttgtggacattatctctccgctgtgtatgtgttcaatgtgcaccatggcgcgaccgttgctgtaggtgaatttttcagggatctttgcagttttgctagtgacaataagaagtgttttgtttggttcagtacaaggttgactcgaaaattcagctgaatttgtatggctcgtggtgcagacaacaagatattgcagatatcaccaccattcagttagagttgctgttacacagctgagctcgactcaactggacaaaactatggtccctgggcggtgagaaccaggcattactgatgaacaggaaggtgtcaggccgctggcactaaaatctggggtaccagaacatgcccttgatgccttgagggtcagcttcgaatcccaagttcttgtagaaatctacaactgcagttaataagaacgaattatcagaaagacgacctttttagtgcattgaagcaacattgataagctgcacattctggatatcatgaacagaacgaccatttccatttccctgctgcaagtcgcagcaataactcgccacagcaagaaaattatgttactccctccgtcccaaaatataacaacttttatctctcaagatttgtcccaaaatataacaacttctccaccaacattctcttcccaaccaatcacaatcctccaccattcacttttcccacctacctccactactcaaccaatcacaactctccatcattcacttctacctattttcttaataaccgtgtccacctctaaatatgcttatattctggacggaggtagtaatgaatattcaacattttggtttagaaaggtgctatcgagataaatggcacagttgagttaatgacttcaaggaaagtaagccaccagttcacccaccagtaaaatttgaggcagccaggcaggtgcacttaccaaaggcatatatccattcaatcactcagatttggataatgatgtaatggccttataggaataggttgaaacgaagacaacagccttttcaatagcataaaatttctacaaattcatcttttatggttttcaattacgttttcatccacaagagtaaatcatgtggtacctttggtagccagtctagttgttgcagtactcaaaggatcaaaatatttgcttgttttctactcactacaaagatgacttaacagcaaaccaaaggtaaattcgagctagcagtgctacttagacatggcttttgtgaaaaaagggaggtgtgtgtggtactgtggtggtggttgtggttttctacctttgttatctgcaaacagcgtaatattgctgatgtctctctggagcaaagttcggattactttctccattaacgctttaccaagaccttgaccctgaaaatgttaaaacaggtataaaccattataagtaaccttacatgccaaaacagtgaattcaagttcatcaattcacctgatatgaagggtcaacgagaacatcccaaatggtagcattaaaggcatggtctgaagttgctcgcgccataccaattagttgcttcctctcttctccctctgtcaaataacttctacaagtacactaagatgttcatcatctagaaaaatgaatttctgcaaataatcttcagattagaagatgtggtttgactaacgcttaggatcataaacgagccgctaataatgaaacaacgaggtaagcacctgcttttgaaggcatagtaactgaatgtagtgtagcaaccaggtaactgtttcttaaggatgctgctattttggttaggggtctgcgtggccatcccacctatgagatgaacatcataaacacaaacatctgttaaagaagaaactaccgaggaacaacatgaacttggagaaaattgtgatatatattcctttatgaaaacaggatgtgttactacaaggtgacaaatattttaataatatttcatttagctctatttggtattttcgagtgtactcagctataatagccagtttacactgcataagtggtcccagttaggccatacaatagttactaggtgtgttagtgaacgaataatggttacttatttagaaccttgactgcaagaactatcaaatgattttggagaaagatcaccttgtcgcataaagcttggagatcatacacattaacatctccagctgaagaaaatatgatctgctctgtgctgccatcagcaagtgtcctttctaggagtactagttcctcgggcaaaggttcttcctcttcaattggtgctgatggtggctctactgtctctgtactgttattactcttcaaaaatctgcaaagcaaaagcattagattctctttaccatacatgacagatctaaggagcatgatataagcatgttgcttcaaatgtacacagcacatagttagtctacatactcccttgttaattgaagaaaaagatatagaaattttatcaatctagtttctctacaagacctgaactgtaaggctgagttcttttcggctgttggctgtggaggcaagccattagcgcatgaataattgagtattaattattacagacttgaaaatgggttgatttgattttttttaggaacttctatataaaaagcttttgcaaaaaaaagcaccgtttagcagtttgggtcgggaagcgtgctaccggaaaatggggaagttgcaacttccaaacaaaaaaacgtaagggcctagtctgtaaacacccaggatgttccggtcctactacatctttatattttttagtttttcagttccccctttgtcgcaggtaatgtgagaaattagtagctttcacttctcatagaggtaggaatttctaacgagaccattttcatattaacacatactacatgctatagtatgtagatttatgtgaaaatataaacatagggtttaagcaagggacacaatgtattttacccggatctaagggagtcccacagaccagccttcaaggaccaagttgccgcagcccgttttttacctgcagcgtaaacacgataagagtgtacgtactagttcagcaaataacagctaaacttcatgaacatgtcatgaacaaaaaaaaaatcaaccaaagagaagttaggcagatgacaaaacaacaaagagaaggtccacaagtttattttgccgtggagcttggacaactgtgcagtctatgattatctagctggtagctagtagccggtaaaccatcaaacatggcgtatttctatatgcaaacctaagaaataatctgaaccaccattctcaccaagacccatacggataaatgccagagtaatttagcgagttgcagtagcacgaaatgcaggatctgcagaatggtgctgcttaccaaatgtttggaaagatgggacaaaggagccagagcaaagctttacttgtttactgacgctgtaattcctcgattaagcagtacatcagttcgttgcaagttatttgcagactctggaacactaattcctaatcccatccaacaagacactagattggcatctacctaccctggccggccattgttagcctaaacatttggatgtctgtaattcctattcgcaccaaacgactactatactgtgattatccgctgcaacgcggaagggagcaccgcaccgcaccgcaccgtaccttgcgcgtggtcgtggagaagccggcgcggcgcgggggctttaccccgggcccccaaaccgcacgacgccgtggggacgcatctgaaagaggacggtgtgacgacggcggaggcggaggcggaggcggcgggcgccatccttgccggatagtgcggcccggtgattcgtcgccgcgcgccgccggagtgggcgcagccgaggcggtcgccgccgggaggaggaggaggtggtggtggtggtggtggtggagctcgctgccgtcgtctcgtcgcagataaggtcggggaaggtgggtggtggactgatggagtggtcagtggtagccgattcctcctcgccgagaccgagaagaagccgaggcccaggcggtcggcccatcaccacaggagtttggcatgattgggccgctcggttatgggcctctaatttaatctaaactcttatttccctgtaaaaattgagaagataaacaaaacaagatgagctataaatgtattattaagttatgagtattaattatctcgaatttaaaggaaataattaatatgattttttaaaacaacttttttatagaactttttttaaaataacgtatcgcttaatagtttaggaagtgtgcatgcgcagcaggagtaagttttcctatctatccgttgctaccgaacgcggcctagttcaattgttgggactagctatatcgagctacattttttcgttaagaaaacagatactcatttttcaatacacttttacattgcaaatttcatactttatagtactataaacttcatatatttacagtgtaatttttaaatattacactgtagtttttttccttactactcactatatacaaaggaaaaggatagttagcaatcacatggtggaaaaaggttattgaaatcaactaatcaagccaaaaatgtggtgccaagttttttagcaaaaccatagttttttaggaagaagaagagagagggtgagagggagattagagcaaagctttatgcctttatctacaggctacatacactgacatatctacttagcaatccctgtagctatggtgccatgccagaatccagattgcaaataggatccggatcaacagagagatacagaaaggaaaagcatccaacctctcaacagcaaaatctggggattatattgctgtctgctgatggctctttgcatccacttatgcaccacaggattcacaaagagcttcagacgactgcatcttgtgcagacaagaggcagaagaaaaaagatcagagacagtcaagtgcactataaacaaaggacaaacagctagcctggatctgtaactgcacagcacagaaagaactaagatctaagctgcccaatgaactgcagccttgcagcgcaaacaacagaacagtgcttgcgccggaatcatctcatggcaaccaggagcgccgcagccatgccacccagggacatggcccaaacgatcaaccgcagcagctactgtcctcctgagcgggtaaagtacagtttcatcatcagcttgcacttgcaggacctagttaagaaaccaagcagcaacaatcaatcggccaagtgaactaggacaatagtaggaaggcaactcaaatttattctgtaatgtttctgaagaattggagaccgggaatgaatccgagatacctgaacaccggcaaggacattttcagagactagctcagacggcgcaaccgctgcccagccgtcgacgtaaaccacctctatcagtaccagccatacaccaatatcctcaacatctggatggtgtagctccatgtgataagtgcagcagtctgaagagaatgacgacgtgcataggacgcagaaattatcatggagtagagcctgggtactgtaatctcctgttgcaagtgcctcgaccatgtccctcccttggtcctcttcttggacttggttaagctggaaatttcggatcaccattgttaatgaattcagtttggcatgagcagttaacaacgaagcacagaggtttccactattaatttgtgcacgagcaaatacccaaatactaatatacaagataaattaacagcattagtaagtagcaacaaatttacatagcatatgtagcaggatatattctattttcagttatctgaaacgaaaatggagcctcttttattgctagatgaccaaaatacaaacttctttttttatcctggttttgcacatgcttttgtccaagaaacctgtgcacgatcaaggcaacaagaacacatccacaaatcaagatggccaagaaaccctacaccagaggaaattgtaggcacgcgtggttccaagcacaactcgaagtatggacaagaacttaccttgcacattgtacagcagtagagcgcgtttgttggcttcttgattcgttggtggcagtccacgcagctcgagaaatccttcttccgcccgtacattggtggcacccatggtctcaacaggatccagttcgtctgttcgtcgcctctcaatctttgtataccttcccaatcgtactcggtgcccactgggtacctggcgagcacagcggggttttcagcgagcaactcaacctgcgagcgagaataagatgagacacaagaggctcgatcgaagaagaagaagaagaagaagaagaagacgaagaagaagaagaagaagaagaagaagaagaagaagaagaagaagtcttctttcgaaccgaccgtagcgacacggggaaggccctcttccgggtggtgatgatcccaatgttctttgcagcagtggtcgcagaaggagagccagcagtagaagcagaacctgtttcgcctgcatgtcattctccaatcctcctggaccaacctctggaggtagaggggctgctccattggaggctgccttggagcctgcagcttatcccctcccgcttgctagctcctctgcttcttggcgtccgctacccctgttcttgcgttcttgcggctgctcgctgctccgctaccgatcgattcttccccctttctcttcttctcctgcttgcgatcgattcttcttcgccctgctctctgatcgcgaaggcttcttgcgatcgcttatctacacctgttgattgattctctcggatgttcttgatgccgtcgcaatgttgctctgctctctgatgtctctttctttcttgggtcttcttgttcgtggagttcttgatggagaagagccataggcatagcgagcgggaaggcgagtgtttaaataggagcggaggcgagcggatgctgattcgattaatgggcctcttcttggagcttttacccggcccattaatatatttctcttttttgtctatttcttcttccacttcttcccgtttcgattttgtttgaggctgcgcgcgcgcgagaggggagagaggctgacgagagggagaggaggtggagagcgagtcgatctgggcggggggaagaggaatcgctcgggggatgcctccgctggaggtggaatcgcttcaaggcctcgcagttttgtcgtttggttctgtacttctgtttcctccctgtgtttgtggctcttttgcgcgattgaatgtttgaattttggtgtgattgggatagttaatcgaggaaaaatagagattcgtcttgtgaattgtgatgtgcggagcccgcccaccggaggtagatggtgatgaacccccaatttcatttctattgtcagtttcttatatgtttttggttaagtttcagctatcaggtgtgggcttttgctgtcgtgggttaatttttctgttttgctctgaatggcagattcatgtgggagcggtttcagcaattgtcccctttctgcttatcccgataatatatgccagttttgatgtaatgaaatggtagtctccttgcttgattaaggtgtaaatcctgctcatttcctctccagagagtaggttaggcaaaattcagacacttttttatagggtcttttttttttgagaactggagtaagcacagaatacagagccgtagtgtagggacaaacatctttcaggcttcagccacagaaacacagaatagcagaaccaaaccactcgtctgaccgtttcgtatagctacttgttgcattctaatcgggactgatgattaacacatgattatgttgatgttgtctagatatagatgttctcattgcgagctttgcttggaaagaaacacacgatttttttcgtagcggggaatcaacagtccatcaaactaatcaatcgaataaccgttcaaatgagttgttggagcatgggaggcaggaaagaatattgtgagattattctcttagttgttcaggattgttgacgaacaacagtgttgccagcactctgtacagttttcagttattccttttctttcagccttgatctgcctgtgttaaaatcatctcctaccaatgtaatgccagccagcttggttggccttccgaaaaagaagtgttcaagtcttttgttaaggacccctccccccctctctcatttttgttattattctattttattgaaatcttgtgaattttggaatgttgtgtattgtttgcaactcagtgcctttttttttcctgaattcagtggcttttaattcagtgtagtttggttttgcggatgatcatgttttacctcatctgttaagacttctgccaggttttacttgagctttgtttcaggctctaccagtgctgttctatcggagatgatgcaaaaggaatcattgtcaacttatactggagcagcattgtgtctttgttgatgctgtgaatgatgctacttctgcgtatcccaggcctttgtgttggattttctggcagagattgattgaagagaaccattggggatatctatgaatgaggaaagggcctcacgggctgtagttttctctttttcttgtaaaagtttttaacttcttatttctgtcaattatgctatggtttgtaatgcagaggcatcatgtatgtgtcagtcaagtatagctaatagtgtggatctcttggtgcaattgtaatcaatgtttagtgatgaactcgtatggtttggtattaacctgagcccagtatgatgtttagcgttttacacaaacaaagagatactccaaaagggagtatttgctttcactgaaatgaaattttggccttactagttgcatgcacggcctatgcgcttaactgacaaaagggaatagtactccaaatataacagtgaaaagcatccaacatctcaacagcaaaatctagggatctctgatggttctttgcatctatttatgcaccacagaattcacaggagcttcagatgaatgactgcatcttgtgcagacaagaggcagcagggaaaaagatcagacacactgagacagtcaagtgcactatcccacatttgctacagtaacaaagggccaacagctaagcctgatctgtaactgccaagcacggagagaactaagatctaagctgcccaatgaactgcagccttgcaacgcaaacaacagaactgtgcttgcaccagaatcatctcatggcaaccgggtgcgccgcagttatgctgccaagggacgtcgcccacatgctgaactgcaggaggagcttctaacctcatgacagggtaaaccagagctccaccaccagcatgcacgacctaagttcagaaaccaagcagcaaccactcaagttaggacacatgaggcagctcaattctgtaatggattaaatcaagctcaattctgtagtgtctctgaagaaatggagactgagatatatatacctgaacaccatgaaggacatcctcggggactagcacagacggcgcaaccgctgcccaagcatctacgtgaacaacctcaatgatctggtcgccatgagcgttagccttttctggatggtgtcgctcaatgtgctcagcgcagcaagctgaacagaaggacgacatgcatatggtgcagaaacgatcagggcgatgaatctggaagtaatttcctgctgcaagtgcctgaatcatgtccctccctttgccctggtggacatggttatgctgtccaatggaaattttggattacaattagtgaggtcactttcatatgagcagttaacaacgaagcaaagaggtttcctctatctgtccatcgatcgaagaagatatgaaatgaacagcattttcttgcacagataaaatgaacatcattaattttcttttttgaaggtcaacatgatctttttgagagcacattagtaccacactaccacattgactaagcatctcaagatatattttattttcagtcatctgaaaacgataatggattctcttcttttactagatggctaaactaggaacctattccattggagtaaccaagatttctatattggttttgcacaagcttccgtccaagaagtagaacttgcgcacgatcaagaaagacaagaacgcatgatgcgcatccacaaatcaagatggccaagactctaaacaagaattagttgtagccacgcacggtcccaagcacaaattttgaagtatgaacaaggacttaccttgcacattaaacagcagtacctcgccgaagactccccgattttctgattgcagttaacgcaggttcgaccacgcccttgtaatggtgtcatcctggggttcaacaggatccaatcccgattccagtctttcactctctgtatatagttccaattgtacccccagcgacccacggggtacttggcgaacgccgcggggtctccacttccgagcaacccaatctgcaacaagaagaaaaggaggcatggggggcaacacgcacgagaggctcagctcagctctcaactcgatcggagcgcaagaagtcaagaacaaagaagaaggaagaaatctttcgaaccgaccgtagcgactcggccgcgacctcctgccggatggtgacgatcccaatgctcggggcagcaatggtggcagaagggggaccggcagtggaagcagaatctgcctcgacggcacatcctcgtccagttcgcctggaccaacctgtggaggtagaggggttgctccatcgtcggagccccgcagcttgctatctcctctgcttcttggcgtccgctacccctgttcttgcgttcttgatttgcttgctgctccgataccgatcgattcccccccccccctctctctctcttcttctccctgctctcttggttgctgaggtttcttgcgatcgcttctctacacccgctgattgattctctcggatgttcttgattccctcgcgatgttgctctcctctctgatgtctctttctttcttgggtctttgttgttcgtggagttcttggatgggggagagccatcgcgagcgggaaggcgagggtttaaataggagaagaggcgagcggatgctgattcgattaatgggccttttcttggagcttttacccggcccattaatatgttcttttttttgttttggtctatttcttgatttcttcttccacttcttcccgtttcgatttccaatcaaagtttgaggcggcgagagagagagagagagagagagagagattgacgagagggagatgaggcggagagcgagtcgatctgggcagggggaagatgaatcgctcgggagatgcctccgctggaggcggaatcgcttcaaggtctcgcagttttgtcgtttgattctgtttccccctgtgtttgtggctcttttgcgcgattgaatgtttgatttttggtgtatgattggggatggttggtagaggctattcggcgactcggcctgtgatgtgcggaggccgctggaggtggatggtgatgagcaccgatttcatttctagggttttgggggggcggatgggaggagctggatttcatttctagggtttgggtcacggcttcacatcgtcagtttctttaatattttttggttggagtagctttcagctatcaacagtgggatttatctgttatcacttcaattttgctctggacagcagattcgtgggggaaagcggtttcagcagctggtccctttctgatggaacgaaatgcaagtttctcttctgatttgggtgtaaacaactcctctccaagatatcagaggaagcgaaattcagacacattcatcaacaccaaactgaaactatggtctaccaactatctacaaggtaccaacttaacttagggcacagcctcccgaaacaaacaacactgaattgctctttgttcagaactttggtaagcatagaatgcagagccgtagtggcactcgcatcttccaagcttcagccttcggccacagaatagcagaattaaatcgttcatctggctgtttcgtgtagttacttgttgcactctgagtaactacactctgatctgaggattcgattattagcatgattgtttgttgttgttattgttgttgtcgtcgtccagttatagaagttctcatagtatcatgtatcaattccaacttggtcaaaaatgaaattgctcaagactcttgttaaggagtccctctcatttttttactagtctatttgttgaaatcttctgaattttggaatgtagtatcatgtttgcagatcagagcctttttttttccttggtcagtggcttttaattcggtgtagtttgcttttgcaattgatcatgtttgacatctacctggtccattacagattttatttgagcttgtttctgtctctaccagcactattttatcggaggtgattattagcactatttgattttggttttgcaaaaggaatcaattatcaacttatactggagcagcattgtgcctttgttgatgctgtgatcctttgtgttggattttctggcagagattgattgaagagaagccagagggggataactatgaacgaggaaagggcctcatggtgagctttgcttgaatccatccacccctgttgcgttgcgtcgcctaggagcccttttttctggtgggctgtagttttctccttttcttgtaaaagtttcttaacttcttatttctgtcaattatgctaagatttgcaatgcagaggcatcaaaactgtatgtgtctgtcaaatataactaacagtgtcgatctcttggtgcaattgcaatcaatgttttgtgatgaactcaaagggttctcaacttctcatggtgttttacacaaagagatatatatagtgttttacacaacgagacatttgctttcactgaaatgaacttttggccttactagttgcatacacggcctgtgcactttaactgacagaagggaatagtactccaaaatacaacaaaaatatacatattgtgaaccacgtctttgttttattcctggatatcaagaacccgaaaaaattgcttattgtgacactttctggctgaagagcttcttcctgatctgcaggagagaagaaaatgaaacactcgtatcaaatccactgaattaccatgcattgatggatgaggtaagacatatatacctcaggaagcttttgcttgaaagagatttccaccctcgcatccagcgtgttgtcgcagacgatcttgccgtcctgcgatgcaatcaccacacctccagagctgcaaaattagggacacaaatcagcttccgatgaagtaagcgttagcacgagcatattactggtgtatcaggtactaggaagcaacaagattgtgtgtaccagaaggggccatgggcgtcacgggcggtcttgggcggcgggaggtagaccttgccgtcgatgaggatcttggggaggttcaccttagccttctcggcgtactccttcttcgccgcctccagcaccgactcgacgtgcccgcgatccgcctcccggcaccgcagcaccaccgacggctccctcagccggagcaggctctgaatttgatcaatgatctctgaatcttttctctgaaccaaaatgtgcatggatagctagatactccctccgtttcacaatgtaggactttctagcattgtccacattcatatatatgctaataaatctagacattattatatatatagattcattagcatctatataaatgtggataatgctagaaagtcctatgtagagggtgtgaggggatttggtggtgatcacctgcacgatgaggcccttgaggaccttcctgtaggcggtggcgtccttggtgacgcggaggaggctcttgccggcatcctccttcatctcgcccaccacgccgtcctgcgcccgcagcaccttgatccgcgccgcgttcagctgcgtcgagtactcgctgcaaccatgcgaaagatcaaatccaaacacagagttaataatcaggaacgacactgattcgatcaccacagttgaacattttttcgcaaatatgcagttgctatcgatcgagatcttttctgtgtgatgctcacatcttccttccaacgtccacctgcttcgccttgcgctcgtagtcctgcctgatcctccgcttctccgactccaccagctgcagcttctctatgttgaactcctgcatcacccccatcaagatcgttttcagttgacaccctttctgaagaacagaagacgaaggagatcaaattatttattttacc

SEQ ID NO: 26707 - DNA, 5858 bp, Oryza sativa
  unsure (1)..(5858): unsure at all n locations
tattagaacttagaagtttatattacatcacgttacatctagtagtactatctccgttccaaaacggaggtagtataaagagttttaggcttaaatacgggtgtgaagaaaataggtagaattaaatggaagaaaattatgattgattgagaaaaaaaagttagtggagaatttgaatggtgaaagattgtgattggttgaaaagagaagatatgtgaagaagttgtaatattctgagataaattttaaatgttaaaagttactatattttgatacggaaggtgtaataatcatcatcgcagcaaaatcatccactgagcagtgaccacccacctgattactctaacccaaccaaacatctctgtaccttcttttccagagataaaagaaaacatttgttcttttcttttcagttttcactgcacaagaccataaaccgactgacacgtgggccccaccacaccctggtcccactactcccacacctcgcccgcgccgacttctcgcctctctgacttaccgcatactttactccaccaccaccacccctccccctttgccaccgcgcccacccttcaaagccacccccaaccctcaccgacaggtggggcccaactcctcgtgggtcccgcccgccattgtcaccgtagcgggtcccacgcgcggggggcgatcacgattcgcgaaagcctttacggcgagaaacaaaaacaaaagctttcacaaggcagcgtgaggaggaggaggaggggagctcagctcacgcagaggcgacgacgacgcgcacgcgcaccgccctcctccctccccgcgatctcgccgtaggggatctcgtcggcggcgaggaagcaaaggccgagggggcagcggctggggaggggaggggaggggagagcggcattggttggagcttggaggaagttgggtgtgtgtgtctgggggtgagggtgagggatcggatcgaagcttctggaaggttccgggcgcggatccggctcggtgggttgctcgctcgtggctggaggtagcggcgcgctggtggtatcggcttttggtctaatgctttgcttcggtttggagtttggaggtgggggttttattgatgcttttggttgggtggatttgttgctgcagtttgagcggggggagcaactctgaggtttggttttcctgagatggaggacctgctgggcgcggaggtcggcaagaacgactatgactggtgatcatcgatttcgttttcttcagtttctttcttttttttttgtttgtttcaccttcgctgattttgattaatctccttttgttgtcggtgtggtgatcttcgtagtgtatttggtacagcacaagtttatgtgaagttgtagctgtatttttttttaaatctgctgggttgacttgaattgacgtgttttgggctggatttgtactgaacgcttgttttgggtggtttgagtaggcttgatcttggagtgacatgtttttgtttgtttcgtaaaagaggatatgctgcattgcccccagaaacgtcactcttccggttgtagttgtgatggttgtgatcgtttctcgttaaggatggccttggtgattgcagttggttggaattgaatcgctgtgctgagcaaacgtgaaatatatgaaatatgcaattggatggataggcagttaggcaacctgtggggacgggctcctcttcccttggaaggccaatttgatgttaaactaggggagatatgctgatactaatttggggatattagcaggagcatgccacgaaaagaaagatttatttttgggccaaatgtgccattaatatgttgttcccacaatatataattgtaatcgcttatgactttttgctgtgaaaacataatcaatctgttttggttgttttctatagtattttaaaagcttgtagtaactatatggtttcttgcttgattggttgtctgttcctctagtccatacatgtttagcatttgtttctactataatgaaacataaattgtgatgctcttctcaggcttcttactccccctgggacaccccgttgtcctgtactggaggttgctgagaaaacaccatccccaaatatattacctaagcgcactgccactagatcatcgtcaaccaccagagcgtcgagggtatgtactatgtattatttgtattagaatggacgtgctaaattttggagatttgcttttgcaatctagtttaaggctctttttctgcagatatacttctaatttcgtagtttcagtgacaacctgtacccaattttctaaagaaataaggaacaattttatccatgttgcattgtaacaacactcagtttagggatcaatacctccagatatatatctctgatgaatagttgctgtctgggctatgcatcctttttctttggctgcatgatctttggtagtatgaaacattttgagctcctacaacctgttttcctgttaagttttcattaatgacacatagtcttaagtcttaaccagtgtagaaaaatgggatgcagctgatattcaaataagtgttttgatctgaaaagctttcaatgttattgtcattttatttcttcgagggaaaaatttactcattgttagcaattgaaggtttcacattagatttcaataatgaacaatgcattgaagtatttcccaatatatgccacaactagatacaaaaacaactttatttaatgaattgcatattggaattgaagaccacccaaaccagggagtctggtgataacacgtttcttgcttctctacctactcgaactacctaggcagtagttgcataattactctcggggcttttttttctcctccttgattaatcttggttataattagcatttttatgtcaaactacgttgttttgcagctttcagtatctcaaacagagaatggtcattctacagctcccactagaccagctagaagtaactctgtcactcgcccttctattcagtccactctcatgtctagctccaacaggacagcagttctcaatacaagcatttcctccgtcagctcaagacctacaaccccaagtaggcgaagcagcactgttgttgcaccaaagcaatcaattgcagcttcacgccctgttccagcaaggtcctccactcctgttaaaactcgtccatctacaccaaccaaaactcgcccatctactcctgtgagaactcgtcaaacagccaattctacaagcgactcagctgctgccaggaccacatccgctcaaaattcaaggccatcaacgccaacctctagatcacgtgctatgcccaattcatcttctggtgcaattcctgcaatgagccgcccaggtgcatctacaatttctgcaacaagtcgctcaaatgcatctacaatatctgcaacaagccgtcctggctcatcctcaagtaatgtacctgggataagccgtgccacctcattgtcttcaagtacagttccttcaatgagccgctccagctcacgttcatccacacctacacgccagcctgcaatgcgctcatcggcccctgctgttggtcgctcgccttctgttgggcggagttctagcatcagtagcttgacatcatctatcaatcgacctgcagcaaatggtggccggaactcagcaccttcatcggctccgtcatctcgtccaagttcccctggtccacgacctcgagctccagttcgtccacttgatatccctgattttccaanatgaaacaccaccaaatcttaggacaaaactgcctgaacggccactatctgctggtagatcacggccaggcatggctttaggagtaagatcaacctcaaatactgaaccatcagctgcctcagctcctgtaaagaaggtgtctgtgcctgctatgagtcgaagtaaattttctgatgcaccatccaggacacctactctcacaaatggacgccaaaacagacagagtgagaggtctactgtggatagtcaacctagtaaagtctccaggcctgccacagggacagataatggatttgggatgacgatgtcaaagaagtcacttgacatggcaatcaggcacatggtacgtttcttcctgtgtttccatcagattagtaaaaccctgctttgaaccagttaggattctgtttgcatttagccagaatttgtcatgtacatttgattcgacattgcatgaaccatgactgtgttgcagtgccttttcttgccatacgcaaatcacaagttcaaagaagctaacattactccttgaacttgtgacaggacattcggcagaacttgggtggaatccgtggcgcatccctcttcccgcatagcatccgctcaaccgccggcaagggcaggccagctcgaatgtcagatcctgggcacaccatctcaaacggagaccaccggcactacgccgacaatggcagcaccaacgggcacttctccggggactccaatggggctctctcgcgcaacggtggcagctcgaccgactcacccgaccggggaagcatcggaggcaaggagacgctgagcgagctggacatgtacggcagctcgcgctacgaggcgatgctgctgagggaggacgtgaggaacacgagctggctgcacggcttcgacgacagcaagcccgaccagagcccactgttcgaccaccggttcgagccgctcccagagcccttcagcccgctatgacgaatgcacggttgccgctgcctgtaaatctgctgttccatggtctgctttgcaagatgtgtatgccattccatatgttttctgtttggttctgtttcaggttctacacgctcttcccttgggtacaatactctgctggtaatattttactttaccgatataagacggagagattgtggggtgtggctcatttaatttatccctggagtagggattggtttccacgtactgttgtactgagaatccacaagagtataggaattgataaaaacagtaaagatttgtaagttattgtaatgccattggtttctcatggatgttatatcttgtcaaaccaaccagggttgccaaatgcgatggagaccctgtctagggaagcctttagcaactacggtttcaggctcccaaaatagtctgtagtaatataatttgtggtccggtttattggtcttatatactcttatccactcggtaggccagctatgttttaaaaaaagtcaatttaatttgttaaaatttatctgaatttcatcgtttgtcgttgtcgtcagtgaacgagcggtcatcgtgtattaagcagtatccggtgaccagtcacattttggaaccctgtgtcaagctcgcagctgcttccatcacccatgctagtgacccgtgtgataaaacacgagacggtgcgtcgtgctgggacgggacagcatgagaagttgagaacgcattgaagtcgaggctggcccggccatctccccggccccggcccgtgcacggcacggcacgcgtcgcgctcagcgtaggtgggaactgaagagcccaccggcgagaggccgcgtcttgggctatcttcccttcccatgccgatccacggcttttttttttctttttggaacggccgattgttgccggcgttttatatataataaggtgtcttattttaaggagaaaataagaccaaactttacggtgcacagttaattaaagaaaactgggtaaaaaccacaactacaataaacactccaagaaacctaaactaccacggcgacaaaacattagccaagcacaacactcaacaacgctgctcaacacaagaacggtaaagccaagcagcaagcaagaaggaaacagaactccccaccctagtaaggcacgacgtgtta

SEQ ID NO: 26708 - DNA, 4646 bp, Oryza sativa
tcaactgccatcgccgactcaagaatgaactaggtttacacccggataatcgaaacacgataggatggggagatacccaagacacctccaaggagggaacgacaccgtaggcgtcatcgtccgggctttcgccttggtcaccaccaagctatcagtgctagagcagtcccagcgtcgacaattacatgcacgtctgctggtgtggaagcaatcgtcctagcccattgccgcacgccgaggtggcctactttccagcaccacagccgccaagtccctccacgaaaaaggagttgccatcaacaaccgagccagcgagcgcctggatacctctcgccgaccaaccgggcggaagacctgtggcagaggcccacatgtacccgttgccaacgccgcctgtaggctggcaaagagcttcgctgttagggactgacgcaaaggctgcttgccaccgggaggagccccatcgtcgccgccggaaggggccccgtagcctccactatccgcaactctggaagttgctcacctccgcctcacgggccggggaggagttctcatgccgccaccgccgtctgctggctggggaaggccccagtcgccgtgcggcacttctgcccgaccaccaagctggcaccgacaccaccactgccgcacccagccgccgtcccgccggttaggctaatctcatccacggttgaaccatcaacggctgaaactgctgctgccttctccttgggctctcttttcttcattggctgaccggggcagatttaacgtataatcaatgggggccttggaccgtagtcaaaaattacactcattagatatgtccctaattgtatgacctatgggcccccactctaattgggaagaagaaccccactccttttttctgctccttccatcacgcaaatgcgtgcatgtttaggcttcgaatgtccgttccccttctctcaatcccccaactggcaaatccataaactagggattaggaaatgggaagagacaagcgagcccatcatcatctcgccccatctattttgcttccgtagaccgcacttcaccttcgccgcttccttgatcactcaccgtcgacgttgttctgcacggcgcactccatccatgaagaagttgtggcacgttgggcctgctgatctctgtatcactcggtgcgtactgatatctccctctcatgcagtcaataattgatgaggatgactctctagggcagtaggtttcccttcaatgctctatctaatcatccttgtcatgatctgataagggagttaatggacaatttttataatgtaatatctcaaagtttttataagtttgtatgaggtgagctccacttagctttctaacttgttatatgagttatgtatgcccgtgagtttcacttagctttctacttaacttgtaatatgagttatgtatgtccccagtcaatttttttaatgcgtccgcccctgggctgacgcattaacatacacgtcttggactcctggttaggctaatctcatcaatagtttcattggagttttattcttaataaatgagatatcacataaataatttgatgacatggagaaataattatgaagagagagggaaagagtttcatctgagtgtatcatgtttcaaagactatgaaactggttgaaactagcattggaggctagagtgtttcatctcatccaaatgtaatcacatattcacatgtatcactattaaatgctatgacaaacccgtgaaaccgcaaaatgaaactgtacattggagatcttatttcatttgtatagacctttttagatgacatggcactcttggtaacggtgagttgaaactctccactggaaatgaccttagagaagcttcagataatgtgggaatctagaaaaaaaaagggtttgttctttaaattctacaactatatgttttccaaaaagtaaatttcacaaaactacaggttcttcaatcaaactattgtataactacatatttaaggtgttgtatcacaaaatagatttaacgtgaaatttattataaactacaaattcaagatagagtgccaaagaaataaagattaagtagtaaatttatcataaaactatggatttagtacctgtttaatcataaaactacaatgtttatagctctaacataatgatagtgctaagggatctaaacttagaatatgtagttttgtggtaacttcaatattaaatctgtagttttgtgatagttgaccttaaatatgtagttttatgataaatttagtgctaaatctactgttttgcgatacatcaccttagactcgtgttttgtgataggttgatcaaaatatatgtagttttatgaaatttaatcttgtcatgatttgagatcccctttgaaacaaaagaaaaatatatgaattataaaggacttatatatatcctatgagaaattggattgtttttttaccaattcctttaaaattcctatgaaataagccattctctaaagcaattttaaaggaaaataagcatgagttctcactccatattttcccatgtcttaaattcatgtgtccgaatcaaaccacggttctaaaactttcatgtgtttcgaaattccacaggacttcaatgagcatgacatttttttcatgtgtcgcaatcttgcgttttaaaggagtacaaaataaaactctaaattatttgaaaagcttaagattaaaagaagctgctagcttcctaattaggggtgaagacaaaccttcccatgcaatgctaggtcgctagccttgttttcttccttgtcctcttgctgcatgttgacacccaaggtatttatgaaccaagagcaactgatcaccaaccagacgtcttggccacgaaccacaaaggccccttatggtttatcacggttctaccaacacattttccatgagtgagctactacatatgaacggttctaaattaagctacaacaacttaacaacataatactaagggacaattgctcatttgaccctattttcaggtctaactaccaatttgactaaacttttctaagtttatttgaccatgttttttcaatttgaagttgccgtctgaccctactttcactacactgtgagtatttcacttagaaaaaatagaaaacaagaatttacaatcctaaatgacgaaaatgccccttaatacgtcaatctatcctctatcactcattcctatcctctctctctctatcatctatcattcttatcctctatcagcggcggctcggcggcagctgtagcggcagaggggcggctcggcggcgcgacgcggagggccgccgctggcggcgaatgaggaggagcggcgctcggcgacgaggaaggccgccgctggcggcggatgcggaggagaggcggcgactcggcgacgaggagggccggcggtagctgcggctgcggaggagcggcggcttggcggcgcgacgcggagggtcgccgctggcggtggatgcggaggagcggcggtggaggggcagctgctcgacgacgaggagggctgccgctggcgacgacgggcggcgttggctcggtgacgaggaggaccaccggtggcggcttggcggtagctgcggaggggcgacgttcgctcgtcgacgaggacgacggccggcggtggcggtggctcggctacgacgactgccggcgccagcacgcgtgaagcttgccccgtgacaaacgaattttgggagaataatgtcaaataagcaagggtagaagtggtattttgggctttttgttaacaccgtgaaatattctgttcttaacagaagagggtcaaagtgtagcttcggttttaaaaaagagagtcaaataagcaaagtgacaaaaacagagttaaattggtagttagacttcaaaataagatcaaatgtgcaattgtccctaatactaatggctagtacatcagtatcacacgtcaggctgacgcgatcagtacacgcgacctactccaaaccggcgattgcatcattagcatttcggtgatgacagtacagattttatctaatttcgttaacacgttttttgaactgctaaaaattgattaaaaaactgctgaaagatttatattacacgaaatttttctataaaaaatattttaaaatatcagataaatatattttttaagtttaaaataattaaaacttaattattgatacactaatagtctataaaatcgggcctaaatccaggaagccccaaaaaaaaagtgagatgtgatgtgatatgattgtgctgtgcttgggattcctcaaactaccgctttgaccttgagtccttgacaaagcaggcgtcagcggcatcagtacaactacatgcgtctcgtccatttcactgttgtcactgacagagccttttgatcagcgacgcagcattcagacaacgatcagagccttcaaccttttcccgcagccactcgtcggatccatcataagaattgctaatttggttgaaattggaacgatgtgacggaagtttacgtgtgtaggaaaattttgatgtgatgaaaaagttaaaattttaaagaaaaaattgggaactaaacaagggctaagtttaggtgacgttcttttcttcttaacatgattcggccgggggtgcagga

SEQ ID NO: 26709 - DNA, 1944 bp, Oryza sativa
ttcctgcacccctcttctttttgttagacacctcctggaaactcttttcatcctccttatcctctcctgctctgatcctttcgatgtcagagtcagtcgggatttgacacctctcatattcgtcttcaggtagcaactcctgtgttaactcacccccttcatcctgagattgcatctcagtcatgaactctgccttctgagggaacattcagttgttttatctttcatctcatcccataacaccatggcagtgcccatttcagccttcttcagtagggaacttttcttagataccagcttcttgatactacacccctgtgtcccatgtgatttccctttgtatgcaggggggcagaataggccccaaacctattcccctgattactgtcagcatctctgagttgtctccctctagggctattttgattcttaaattcatcatcaaggttcatgtcttcttgcaactcttcatcatttttatcatctttatcatcaccaccatcatcatcagggggcatctgtctgttttcatatggtgggtagccctctggttcccacttagtcatgtaacccaccttgttgatgtaaacatgaactgagaaatgtaactccctaggatccttgcacgccaccctgactctcacaggaccatctctccttaagctagctccatccatagtttcaaactcccccaccagttcaacaatggcagcaattgagtgactgttttagcaatttttggaatcccaaatattttcacccacacagcaaccaattgactgttttagcaatttttggaatcccaaatattttcacccacacagcaaccaattgactgttttagcaatttttggaatcccaaatattttcacccacacagcaaccaattcatccacggcttcctcagtcattccagtctctaccacacttgccttaatcaaagaggtctcaaagtcaaaacacttgcatgttgagattttgcttctaacctcatcaaaagggaaattgattaaaaactctttgtcatttagttgcttcactttccattcccagtttagtcccacaaacaaatgtttcaattcagtaactatttttaccactgaaccctcaccaaggattactgttagaatacctctcacaggagctctagcaacctctgcatcagatatctcaacttgaaggctatagaaaccatgccctgggattccaaatccacagagtttaacacctctcttcatcagattcataggacaatgagcagagatgtgcccagtgttgtgacaagagtaacagagaggagggttagggcatgttgcctggtgatggccttcgcggccacacttgaagcacttgatcttcggaggacctcctcctccccgctccgcctcaaaccccgggcgcccttgggattggggacgaagcgcttggttcctgggattctgagcgagcagttgacgccacatgacattctatccccttttcctccaccacccttcaccgcctgcgcccgccggcggttaccgacgacacgactccatccgccgccgcagcccaacgaccggcggcgtcgcctgcctccctgacccgccgcggccacgagttagtgcaagcgcacccgccgtcccgccgctcccgccagtaaggaggttcccctattgccatgttgtatcaaagagaaccagcaatgcttcctccctgctccccgtgccggccatggcgacggtctcctcttcttccctctcgctgcctcctctctcctggtccttattcttcacgatcttcgtgtccttcatggcattcgtgatctctgcagctggcgtctccacccgctgtacatcctccacgcggaccacgccgcattcttggccacctgatacgtcggcgcgtttcgccagagtcgctgcctctcctttgccgtcaacgggagccttgtcgccatgcaca

SEQ ID NO: 26710 - DNA, 4594 bp, Oryza sativa
  unsure (1)..(4594): unsure at all n locations
tgccccccacaacatgcagacgtatatattagccaagcatgtgtatatggctgagcacactcacatgtgtgtgtgtctatatatatatatatatatatatatatatatatatatgcgccattacgtgcatgactcatgcatgagtcatatttaattcattagcttgcttagcacattagcgttgttagctagctaatttacctgcttcctgcaaccagccactaacacacaatatgcgagcgcggcggaggagcggcggcgggcgagcgcagcagtgggcaaagcagcggagggcgagcgcggcggcggaggggcggcgggcgagcgcggccgcgggcaaagcagcggagggtgagctaggcgaagcggaagacagtggatgggatggggagctcccccgtgctcggccgccaccaccgccgtgccccgtgccctagcgggtgccccacggcgccggcgacgaaggcctcgaggccgtcgatcgcgccgtgagcttggcgggcagggactcgacgaggaggacgaggtcgtcggccttgccgaggacgcgctcagtggtcgggaagagcaccgcggcgatgtcctggacgacgaggagctgcctgtccgtgaagaccagcgtggggcccaccagatgtgccctaaagacggtgtgaaactgacatgtgggacccacgtgggccccaccttttttataattcctgcgtgaaactgacatgtgggtcccacaagttttatttatttttcaggttgaattgccacgtaagcgtcatgtcaatgccacgtgggacagagaccatcagccaaaacagggacgaacttattccgctctagttggatcactgcgaatatgggccgtcccttcctcggcccaaatgttaactgggccttttggttagctgcattgtgaccaatcggatcactgcgaatctgggccgtcccttcctcggcccaaatattaactgggccttttggttagctgcattgtgaccaatcgaatttggcccgtccccgcgatgggagcggtgggttctcttctccgacctctgcgtttcctggttctggttctaaatggcatcgtccagcaatgtccgtatacagattgtacagaatattgtccaaaaaaatcttctgaagcgcaagcaattgggcaaaaacttgagattagaaatattctgggtcgttcgctttgagaaactacttccagaacctgcccaaatcaaaaccctctgtcgaagcaacgttcgtatcaggatcacaacaaatgctaaacagatcaaacttggcaagagaaacagcaagatagatctgaagttttaaaaaaaatggaatgatagataggattgtcacagaaaagccaaactgggtggccattgggacgggccgtccagcattaaatcctgcggtggtttcctctagggaagagctctccgagagagccatggtgatctcagccatgtgatctcgaatgaacatcacaaggccgcacctccttcccagcaaattcgccgcaaagtcaatagaaacgaacagagaaagcaaccaagaaacgaaaaaggaaggcaaagaaacgaaaaaggatgactgacgttcccgtggttggagaacggcgacccattcgcgagaagatttgcggccgcggtggcggtggcggcggcggttgggggaagcaggagagtccagcgccttcttatatagagaggtggggtggggtggttagggcaactcgcctctgggccacgggacgccgaaaagagagaaaatcttgagcaggccgaagtgtacgctacccaaactgggccggaatacgcgccatcaacacatcatgggcctctttattaacagagagcaataggaataagttcactttgtgaccctcaaaagtcatcgaaatataatctgaccctaaaccacaaaaccggatatctcgacccccccaactcttaaaaccggtgcaatttgactccctcggcggttttggagggtggcttcgctgatgtggcacctacgaggcatcctagtcatcaaataaattaaaaaattaatgtggggcccacctgtcagtgactcccctcctatattctctctttcttcgttggcagtagcgacggtggtagtattttctctttcttcgttagcagcggcgacggggggacaaggggagtggcggcggctggcagcaccggagcgtagccgaaccgggggcggcggtcggcggctagggcggcggcggctcgcggcagtgggaggacgagtggaacagcggcggcggctggtagcaagctcccatcgcggtgcggcggaaccgggggcaacggttggcatctgggacgacgagccaagaaggacgatggcaataaatttcccctccgcctccgaaccccaccgcaaactaccgccgtcctccatgcgccgccgccactcggcgaagctctcgtggcgctcgaatcgctccgctccctcgccggggctagtctccggcagcccttccgcgtccaccacgtcgaacgccatggcgtagtaccgtagcgcgcgcgcgaaccgcgcctcccaccgcccggagttgaggccgccgccctcgtgctcgccgaggaggaggatggcggcgcccgtgctgcgtgctagccctatgatgtcggtcagcgcggctcctgtgtcgtaggcggctcggtgagcgccccaggaagtcggtcagcgcctcggtgaagtaggcacgccgttcttcgtgtcgaactcgggcagctacggtggcatcatcgccgacgaaccaccaagatgattaagctagcgtttgtggatggagcaggcgcccaagatgacgaggaacatgaggatgacgacggtgaggaaggaggcgacgacggagccgctggttcgctggcagaagccgtggaactgcatgcatatgggaacccagttcgcctgcaggttgctgttgtgcgccaggtccacgatcgccgccgccgcggtcagtagcacagccatgatctgcacaaacatcaatcgctcggctcatcaggagccgctcattcatggctccaaatcaatccaaagaaaccatcgaatctggcgcggaactagccgtagaactcggtgaagacggagagcgtctcgtctgtaaccgcgagggcgaggacgacgagcagcagcgcgggctgccgccgccgttcccctcgtccttccactaccgcgagcctccgcagccgagccgccaccgtcctagccgccgaccgccgcccccggtttcactgcgccccgatgccaacaagccatcgccgctccccccgtcctcccgcagcagcttccaacgaagaaagagaggatatacgtgggggagtcactgacaggtgggccacacattattttttaaatttatttgatgactgggatgccacgtaggcgccacgtcagcgaaaccgccctccaaaaccgctagaggagtcaaattgcaccggttttaagagttgaggggtcaatatatccggttttgtggtttagggtcacagattagatttcgatcactttttggggtcacaaagtaaacttattcctacagaatgtacacccagcagcacgtacccatgtcctagctagtgcgcaagctaagaatcgtcagagctaaaataaatcaactggagtagtactaaacaacatgtcaacacgtcaaaaagtactacatcctccgtttcacaatgtaagtcattctagcattttccacattcatattgatgtcaatgaatctagacatatagaaaatgntagaatgacttacattgtgaaacggagggaataactaatgttgaacatgtcgtgtttcgataacttgactttttgtttcattatgtacaaacaaatgttccatgaaacattttaatgaccacattctttttcagatcggatacgtagtcccatccatatcgaaatagggcagaatatcgaactagcttcgctcagctcgtaatccaaatgagcagaatgtatcagctcgactcgtttgtcaccttgagccaacttgtttagcttgcgaaccaacatatccacccaaaaaggtctgcaaattaaacataaacatgatcttccaggaggatgaaatctattggcaggaaaggagtggggagaaacggctacttgagggggatgctaacacagccttttttcatggagtagctaatggtaaaaagaggaaaagtaccattagaagtttagaagaggatggaagagtgattgaaggtaactcagaactgagagagcatataacccgttattataaaggcttgtttggttcggagttaccaccaaaagtgttcctgagctaggatatgtggaggaataggggaagggtggatcaagaagataatgactttttaatcagacctttttccgtggaagagattgagagggctttagcaaaaatgaaaaccaatactgcccctggtcctgacggcttgccagtttgcttttataaggagttttgggagcagttgaaggatcaaatcaaagagatgctggattctttgtttgaggggagactggacctttggagacataactatggggtgattacttcaattccaaagataaaagaagcaaataa

SEQ ID NO: 26711 - DNA, 19574 bp, Oryza sativa
aagccttatgcagacccaaggaggatggggggctgggcttcatcaacactaagattatgaatgaagcactcctctgcgaatggatttataagttggaatctgggaacaatagtccctgctgcaatcttttgaggaagaaatatttaggtcagggaggtggcttctttcaatcttctcccgaagggggttcacagttctggaaaagtttacatgaggttaagaattggatgaaactgggtagtgcctacaacattggcaatgggggaggctgtcaggttctgggatgatgtttggttaggggaggtgcccttaaaaatccaatttccttacatttatagcatttgcgctgaccctgataagtctgtcagccaaatgttgatagaaggggggtgggaaattaggttaagaaggtcgctaggtcaggcggatttgaatgaatggtgtgaattgcactcaaaacttagcacagttcagttgacctcagaggaagatataatgttctggaagctgacaaaaaagtcaattcataactaaatcgttatatagagaaatgatctttggggggggtcaaagacattgttatccaggacctttggaaagccccagtgcccctgaaagtgaaaacttttgtttggttgatgcttaaggggagaattcaggtggtaaaacagttaaaaaagatgaaatggccaggtagcccaaactgcaagctctgtcagagtgaggaagatatagatcatttgatgtttagatgcccatctgctcagtttcttgggtgtatcttgagaggtacctttagctgcccgcatatccctgcttctaggaaagaattgcttaatttggctcagttacagagggtagacaaggccaaagttctttggcttctttttgccactagattttgggcaatttggcttattagaaatgattgggtctttaataacaaactgatgacaaatgtttcttctctgccttataaagctctttcgtttgtaacgcagtggaaaaggctagctccggtaaacctaaggggggaggtggagactgtacaagggttgttgcttgccagcattcgcgagacagaaggctcaaactgatgatggcgaactgaagaatcaacatctcttggatagtcccctgcatggaacttttacttctatgcttctatgtcgatccttggcttgttctgctgtgccatcagcattagttcctcgctttcttttcagactgtgtgccttttgtttgtaagctggaatccccagcaatttgtgaaccttttatgcttttagtaaaagctgggccttgtgccttttctcaaaaaaaaaggtctgcaaatcaacggccgaagagtggtgacgacgaagcagagcggctggcggctggcggctagcctggctctcaagggtgaagacaagcttagggcttgagccctaggtttgtatcctaaatcccttgcaaatccttttcaaatttcatggaaaatttaaagattcaacaaaatgcattggttgagcactagagttagtaaatttctggctccaaccctactagcaataccacagagacgacggtgaatgtataaaacaaagacgtagaaggagccgtgcctgccgcgaagtgggggtggtgatgtgaagctgcgagctagtgggcagctggtggtaagtggcaacgacgagggctcgagggctagctaaatatgcattgaaccatgatatctagaaaattaatagttattggatccctctaatgtttgatgtattattttttctttagttttctttgaagtattttaaattccccgctacaacctgcgggatattaactactagtatattatatatcgcctgtcatgcaaacttgcaattcaatcacacggatatatgacaagcatataaatatataatggtgggtggtaagtagcagcacatagagattgatcgagaatggtagcacacggcatcacgcacgcacagcacacagattaggcacaataatctacaggttgtacaagttctcgacacactccagttagatacttaggctgtgttcggcactggctgttcccattctctactcctcgttttccacacgcacacttttcaaactgctaaacggtgcgtttttttaaaaaagtttttatacgaaagttgcttaaaaaatcatatagatgtatttttgaaaaacaatttagcaaatacttaattaatcgcacgctaatggatcgctccgttttccaggcgcacgcacacttttcaaactgctaaacggtgcgtttttttaaaaaagtttttatacgaaagttgcttaaaaaatcatatagatgtatttttgaaaaacaatttagcaaatacttaattaatcgcacactaatggatcgctccgttttccaggcgcacatcctgcgtaggggtgggcagaataagaccgaactgaaaaaccgaaccgaaaagaccgagaccgagaaattcggttagtagttcgatctcggcaattgaaagaccgaaatttattcggttaattcggtcattagcctcggctaaccgaatgctaaccgaattaaccgagaaaaccaaattatagcccagtaggcccaataaaccaaaccctagaggaactcaacccttagccacagagacagaggcaccgcaactagagatgaaaacggatcgaatacggtcggaaactagctatatcgtattcgttttcattttttttttcggaatcagaatcggatacggatacccggatatgaaaacataatcgaatattatcgaatacaaatacggagcaagcgaaacgaatacggtgacgaatattaatcggaatataaaaacctctcaaactaagcatcacaaatcaacgaagaaatataactcattattttttctaataggacatatcaacattttcaaaatttagcaattaataataaacaaccacaaacttgcacacactgatattatgaaataccatccatcatcatgtgaagtgaaaaggcaaagcactactaggcatgccagataatgtcaaccaatctttttagtctaaactctgaagtctgcaatgctgagttggtgtttgcaatgctgctacactcgcactgcataagctgaagctgctgctgctacttgcatgagaggaattcatcacaaatctgccacataacacatatacactaaacaaaatcaaatcagtgaggagctctacaaatcaaatcagtgaggactctacaagtcataccaaatcttggggcttgacggtgaggcaggcgaggaggcgatggggcgccgcggcggcggcgttggcttggcccggcggcggcgatgtggcgcgtgacggcgcgaggaggcgatggggcgcggcagagccggcgtgggttgctccgacggcggcgatgtggcgactgggcgaggaggcgattggtcccggcggcggtggcggcttggccccgcagcgaggaggcgacgacggcttggccccgcggcggcgccggccgatgaggaggtgaggaatcgtgcgcctgtgggactctgtctgggactggacggtgggagactgggagtggactggatctgaatggatggagattggagacttctaaggtttcttgtaagtcagaaaaaaaccagaaactttccgaccgttatccgattccaacggatatcatctatatcatattcgttttcgtatccgcaaaaaaatatccgtattcttttccgtatccgaaaatttttggatatatccgactgaaactatccgtatccgaaaaatggtccggtcggtcggaaattatccgaaacactttcaaccctaactgcaaccgcaagctacaacaccgcgtcgccatctatccccatccatcgcgctcgggctcgcggccttgcgcggcgcagacccgcggtcacgctgcctcctccatcgcaccggcgcggcgccgcctccatcgcgccaccgtaccgcctccgccgtccagccagcccgcctccacctcggtgccgcctccagtggcccacctccgccttggcgcgacggcgctgcctctagcgacaacgagccgcatccgcctccacgccgcctccagcgacagcgagccacctccacctccgcctctggctcgacgccgccatcgtctccagccagctcctgcctccgcctttttttgtctctctgaatatttttaatttgctagtcgcgtgtgcagatgctgagatgcttcgtctatctattgatctattgagttgcttttgatttgtcaatcaaatatttgctgtttgtattttatgaattttttggttctaatttctaaggacttctgctcgggttagttcagtcatgaccgagactgaaccgaactaaccgaggaccgaattgttcggtcttcagttttgttcaggaccgatcggtctcgagtttttgataaccgaaatttctaagagaccgagaaaccgaaccgaacttttcggttagacaaaatgcccacccctaatcctgggttgggaagccaggcttccaaacgcagccttagttagctactccagtatacttacttttagcgagcgttcttctaaaatacaggacgaggacgttacacatcaacactatacaaagcatacaatagttagttagttacctataaatatatactacactaatatcttgtcacatatgtcatacacacatacatcttcgtgctgcagctggctacaaatctatagtccactacttttctctctcatattttatcttcttgaaatgtgtttataactgacttatagtatgctattgtacatgctctcatggacgaaagcgcgcgtgtagatatgtgtatccgtaggacacatgcacgcatgcatgcaaggtataccatcacatcaatggcgtggccggccggcggccggcatcagtcttctctgtctagcccgaacttgcggtcgaggtagcggccgacggcctggaacgtcgggccgtaaaacccgccttcgctgcttcctgttcctgatccggatctctccctctcgctggcttcagtactttcgtcctgcgacgacgtcgtcgtagacgaacgtgggggcgagtagtagatgacattgatgtactcgccttcattgatgtacaccggcggcatcgtcgtcccggagccctcctcccacggcggagccggccagccgccggtgaagttcttgatgggaacagtttgggctccagatatgatgctgccgccgccgccgccgtcgtcagctctatcaaagcatcaatcagatttttaatgtcagagaaagcctgaatcactagctaggcaagcaaatatatgtggtgctgtatatggatgtcatggtctgttggtcataagttgatcacaaattttattttgatatattcttaaaaacctaactttatactcgttgtatatgatcgacctaatacgtactataagtttgtcaatcctgaattttccgcagcagtgttctagtatgaattcctagttgttcactgtaaactgaaatcagggtgttgaaagattaattagagatgtgtttttttttgcgattcgtagacttagatcaagttgaatcaatcgaatgcaaactttattttgggtgtctaatgtgaaggaagactattgcacattgctcttcagtgcgtgggcacacctcaaactttcctggatccaccactagttagtccaaagttatagattatatttgagttaacagtgataatctagcacaatggctcataataaaatggcagtgttgtataaagggctagagtatcttagtgacaaattaatccatacctgctttcggcagatttataaaaacgctcgaactggggctgcctacgccaccatgatcctgccgttaagactccgcgcctttctccttcgacagatttacatgctccttccccgtggtccttttgtagaaccacagatttctcattcaagccttctttcacaataaggtgttgtttttcagtagtcctatgttcttcatctcgtgtcctgacattgttattatctttatcatcaaaggtccaatctacacaccgtatgttgacaattggacgtcccggatgcatcctaatggcatcagtcaaagctgactctgcaaatcttctacaaagatcaccagcagtaaaatcgaccttaatttttgcagtgatctcttcaagtcctgacaaattttcgattccaacgggtatagcatcatgctgatctgctctgtggacatcaaaacctagcttgagcttccggagattaggcattgcacctgcctcaaatttcatccacgctaagctgcatctgaactttaagtatttgaggactgagaaccttgcattatcaaagacaatactttctgcaggctttgtgtggacataaagtgacaaaacagtgagagcaggtaatcctccaagaacatcaacatcatagcttgttacttccctaatcccaatcattaaaatacagagatttccaagctgcccaatccaattcggaaggctagaaaagatgcaaacacatggtaacaactcaagcctctgaagaagagctggtggggaggacacactgctccagccataaacagatacactcgtgcttgtagcactgtgaatatgcagagtatttgcataagaagagcctacaggtgatagagttatagatttgagattagggagtttccccagaatggatccaaggtattgcatattattcttcagattgtcagaatgtatggcagaataggtgagctgaagatcctggagattggtcagctcaccaaggctccatagattctctgatgtgttacagctgagatcaatatatccaagtgttcgaagcgatgacatgtgagcaattccattgggcgggtttgtcctagcaggtagactaagatgcagcaagcctgggagatgaacgatgtctgatggaactgcatctatttttccatctattttcagtgcctccaaatattgtagaccttgcatatgggttggcatttttaaggtgatattggaggtgaccttcaaatatctcagtcggacaagttccgaaatttcagtgagatcaaaactgatgctgtcctcatcaccgcagaaatgtagaattagaactttaagaagttgaaaccccgtaatagaaggcatacaattcaagaccccgcaaaaggcaagtgtccgaacttgagacagtctcatattagttggtggagttgcatcctctacattaccgaagtgaatagataatcgtcgaaccttgtcagcgagccttgtagtcgcttgtgtgtggtctattgcaatagcaaaattttcttctgttgacatgtatgtaataagattgagtaccatatggtgaaccacacaagacaaaacctcaccattgtcattgatatgtacaggctggataaattttctatcaacaagctcactgaaataggctcttgaaatttcttccttttcatgcccttcactaggacagatgaaaccttcagctatccattgattcaccaaatcatccttccaaattatgctattctcttggtacattctgagatataacatgcatgccttcaaatgctgaggaagactgttgtaacaaaggttcaatagttgtttcatcccttccaaattaggatttgccatcaaactgtaacctaaggtctcgtttatataatcccattgctcatgtttctcaagctgagttgctaagaggcttgcaatagtgacaacggctagcggcaaaccaccacatttccttacaatatcatacgaaacttcacagagttctggaggacaattagaatgagaaccaaaaactgtactgaaaaataaatttcttgagtcatcctcactaagtggtttcatcttgaaaatatagttcgactcataaccacaagattgcagagctagatcttcaatttctgtcgtgatcagtattctgctgcaactattaccatctggtagtgtgcacttaataatatcccatgtgcatatatcccataaatcatcaattatgatcaagtacctgccaaatattttcctcaaaaacatatgttgtacaataaatatattgctaatattaacctaagtcctgataattactgcatggagcatttataataatatatatttgggctttgcgtatctttgacattgcgactcgtttatccattatctacaaaaaaaaaggtactttgtatcacaaggcaatactgtacgcacctcttatcttgcagatgtgtccttatactggaaatcaggctatgcaacttccaattgtcaggtggctgctgcaggcgaacctgtgagagcatgctgatgagaagcctcctcatatcaaccttctgagaagaacgcacaaatgcctggcactcgaactgccgtccaagtttgcggtacagctcgttggcaagcgtggtcttgccaactcctccaactcccacgatggataccacctttagcttcttctctccatcagccagccactcctggaccttgttaatggcggcatcgagaccgacatgccggacgccatcggcacgctttctgcaaagcgtgggatgcccagcactagtattggctatgccaccgaggtcgctgctgtacaagatggcgtggcgttgaagcgcctcctgcacgcgaaggctgaattctctgatcttgtttgccatccacaggcgctgctttagcttctctggaaccagaggagtcttgctccccacaggtcgccggctgaacttacggcggcgaatcgtagatacgcttggataccggccgacggtggcagcgtgctcgtactgctcgactgcatcctcgtactggtcgatgcagtcctcgatgtcgtaggacagctcacgcacctccttcgtccagcacctgaccaccatgtcatggtagtcctccagttccgtggcatcgctgtggtgaccatggaggatggaggttatttcctcaatatcttgcctgatgagcggtatctcctggtctgctcccttgggcaggatgttgccgtgacgacgcaggagttcatcaagcctccctgggaggttgaccatggcgccttccatggatgtcttgtctgaagacaaatcaagctaagtgttacagatatccaaggtgtacttctaataaaatcgatgctgaacaagaagcagataatagaaatggaacgagatagagagggatctgatcactgaacctagaagttgaaggcatcagattatccgagtagaatgagcgagctctccgagcaaatgaggaggccggactttggagggacttcttccattttgcttcatttcctagcttcaagtctgacgcttctccctccttggggatttaatttgagtttcttcggatgggaccatttgtgtcgtgactagcaaagctgttggccaaactatgtatttggtagcaccctttcaagatagttgcaatatactatgatgtgatttagacaccaatcctcaaatacccctgaaagtgagaattacatttcaactctaaagcttcacataatttacatttgtctcaaaatgcagagttgtctgagtaattgtcacaaattacactctacctcatatattaggatttacagatgcatgacacgctccaccatggacaaaaaattccatcttaactacaaaattgaatggctaattaagagaccaagtctttcacaccatactatctcggtctcaacatatagctatttatgtcattttttggagagattaaagtcgaagtgattgcttaagatgagaaagtaggtaaaagaattaaatgagaaatggttatgattagttgagataggaaaataggtgaagaagtagctatattataagacaaatttaaatcctagatataggggtacatgcataaaggaggaattagtaaacaggcttttggacacaccaaaataaacatgattcttttccgctaagagcacatttatattgtactgaaatgcgaaataagtagtgaattacgaataaaaaacaagtagctatattcagtgtgcatatgtgtattccgtgtaatttattaaaaaaatcttctagtattttttggtatgaggataatttaccatccttaagaatataccaggagcaaatttacatgtaaaatttggtattttcaaatactacgtatcttaagatactaaaaatttttaatgtaaaatttaggtatctcaagttaaccgtaaaatttctcctggtataaagctgtgggttcatctaaagtttgttttaagaaaacacatacctgtggcagtagatgttgtgcatctgattttgcactcaagtgggcgtttccgcgcatatatacacatacgaatggtggattgttgacttgttgaaggttgcaggtctgcagctgccgaagctgctgctgctgctgctgggtggattggtctggagccatggagtccgcggtggcgagcgcattcttgaaggccgtgatggggaggctgttcatggcgctggagaaggagtacagcaagcacaagggcctcgcgcaagaagcccagtccctccagctcgacctccgcatgatcgccgccgtcatggacgaccagctccgcgccatggggagggcgacgacggccgacgcccgcacggccgtcgcgcggctccacgccgaggagatgctcgacctcgcgcacgacgtcgaggagtgcgtcgaccgcttcctgcaccgcctcacctgcaggcagcaccgcggcggcgccggcgccggagcgtcgtcgtcgtccttggtgcggcggatggcgcacgagctcagcaaggtccagagccggtcgagcttcgccgacgagatccagaggctcaagacgcgcgtcagggaagcgcagcagcggatcatccgcatgaaacctactttggatgtcctcgccggcggtggcggtggcggcggccaactcacaggcgctgccggcacatcgtcgacggcgccgtcgtgccgcgcgtcgcgcatcccggtgggcatcgcggagcccgtggaggagctcctgtcgatgctggacgaggtggacggcgagccggagcagatgagggtcatctccgtcgtcggattcggtggctccgggaagaccaccctcgtgaaggcggtctacgatgatcctcgcgcaaaggacagattctcccgccgcgcgtgggtcaccgtcggtagctcgccgtcgccggagaccagcaatgggatgaaggggatcctgcgtgctgtattccagcaggttcttcccaaagacgccatggatgctgacggacagcatcttgaaacctcgctcaaagaatacctgaaggacaagaggttagtgcacatttaacatttttcttttttttttgaactactttcatatgcaaaatttaacttttaattggacttttgctcctcattcatcaatttgactgtcgtgtgtatatattgatcagggttcactgttttggaatcccaaaaaaaaaatcagggaaaggaaatttcagacaaaaaaatagttttgaaaacttctttgctaaattcaaacaaattctgaaaacaggcactcaccggtggacacaaatatttgaatcaagattatgaaccctgttaccctgatactgatcagcagaatttatgttttaccacttaattttgctactcatttctcaatttggttattaggtatttaattatcatcgatgacatcgggatggatcaatggaacatcataagatcgacctttgaagacaatggtacaagcagcaggataatactgaccacaaccatccagtctgtggcaaatatgtgcagccatggcaatggctatgtgtatcaaatgaacacacttggtgaagaagactctaaggaactcgcttttccagggtttagatcacctgagttggagcaaggttcagcatcattattggggaaatgtgatggtcttcctcttgctctggtcagtgtctccgattatctgaagagctcaaatgagcccacaggagagctgtgcgcaaagctgtgccgcaaccttggttctcatctgaaagagcaggatggccattacagcttttcagaactcagaaaggtgctccttgacaactatgacagtttttctggctatcctttgagctgcttgctgtatcttggaatatttccaaacaatcgaccactcaagaagaaagttgtaatcaggcggtggttagccgaaggatatgcacgaaccgactctcttcgtagcgaagaggatattgctgatgagaatttcagtaagcttattgaccggaatatcattcagcctgttgacacaagaaacaattctgaagtgaaaacctgcaaaactcatggaattatgcacgagtttttgctgaacaagtccttgtcacagatattcatcgcgaaatcgtctcgtgatcatccaagactaggtgtcaatactaatgcgtgccacctttcttttcattctggtgaactgacagagtgtgtggcatctgatgaagagttatctcgtgtccggtctctgacagtctttgggcatgcaggtgatgcaatttgttatgttcgcaggtgcaaactgatacgagtcttggatctacaggaatgcagtgatttggatgacgatcatctgaaatacatatgcaaattatggcatctgaaatacctgagctttgggagcaatatcagtgagcttccaaggagcattgatggactgcattgtttagagacactggatttaaggaggacccagataaagtttttgcccattgaagcaatcatgctgccccacttagctcacctgtttggaaagtttatgcttcatgaagatgatgtgaagagtgtgaacaagatgagtaaactacaaaaattcttttcttccaaaaagagcaatctgcaaactttagcaggatttatcactgacgaaagcaaaggttttctgcaacatattggtcatatgaacaagctgaggaaggttaagatatggttcaaacatgtcgaaggcagcaacaattacatcgctgatctttcacgggccattcaggaattcaccaaggctcccattgacagggatactgaccgttctctctcacttgattctgaagaatgccctgaaaatttcctgagttcacttgatttggagacatgctctgaaggttccaaatatgctctgaggtcgctaaagttaaatggcgaacttcacaagttgcctccatttgttaatttgttgtcaggtctcactgagctttgcatttcatcacctatgctgacacaggttcatctatcaacgctgatcaatctgaacagactgctctacctcaaactggttgcatataagctcgagaatttcgaaataaaacatggagcattcccgagcttgcgacgcctgtgctttgtagtgaaaagtgtcacttcagctctgcccacaatcaagcatggagctctcccaaatatcatatcacttcagctgctctgtcaaggtccagttggtctttctggcatcgagatcagacacatgaaacatctcaaggaaatcacaattaactctggagtggttgtacaatgggaacaggcagcaaagaaccacccaaataggcctaaagttttgttcctcagaaaggttgatccaatggaaagcgaggaacggggaagaccttgtgccataagggagcagatgaaaattactgtagctcaaccaactagttcaggtgatggactgaactctagcctcaataagatcagactttcagagcctccttcttcacgacttgagatgcctgttcgtcatatggtggatggccactgaggcagcaccccagacttccttggcaaacctctagcacaatataccactgcagctggcagacttcaatgaagaccatccaaattttgctaaaaaaacttggaaatctagattgctgttcagttaaatggtccagatttctgtatttccgtacttgtcatgttatgtggttaaggttgtaaattggcccggttttttgtaagttcagggtgttaaataaccatattttaaattcttaaaatacaatgatctgtgattggaggtgtgcaattgacctcttgcataactaaatcgatcctgtttgtaaaaagtacttggtatattttggaaataccaaaattatgtatcaagtgccgtatgtgaaatttattattttcgatgaaataaacaaaataaaaaagttcaagtaaactaaaggactagtactacttcctagttcttacgaggaacgtaaaacaccaatgacataaccaggctgtttaatcagtcaaaattttttgaaaatttttaatcagtcaaaatagagtttccaagtcataaattctgacagaacatttgttctcaccatgatgcaacaaaatcaacaggagcacaccgctaaacacattattcagattctgcgaggaggactcaccgtccgtggctccaccgaatcaggcggcgcgatgcagacgaaggaggagggttcccggcccgccaccgtcggcccccgacgaggaccaagtcggacggacggaggaagaacggacggcggagaagacgggactccccctcgtgctcgtcctcgcaccgaattccctgttgctgcgggattccatggcctcccgctccagcgccacgccgacgcgcccgtgcgcgacggcggccgctcttcctctccctccccctcgccggcgcctggaaccgcagtgctgttgctcaatgggccacatcctacttaactcggcccgttttgatcgggtcgcagccatcctatttcctgatgggccggcccagtattgttggcaatggttgccggctggtgtgtacgcattccggcccatgctgggtctctgtctgtgatttgtctaggggtctcactctcacaggcaaatgagcttaagagcaagtacaagtacaataggaccagctccaattatttccacgtaatctaaggacaaagctaaacgccagaatatactggtaggtagtctctaatttatctttgtgcctttccatagcaatagtattttattctttatttttcttcaattctctctcttcctctgcgttatcttcctcctatctcccaggtaatatcattttttaaagaaggatagtatacatcagtaacacgtggaggtgattactgaggggtacaacatggcacgcaagagcttgctaaaccgaggcagttttactatcattgtgatccccaagtttccaaataaaacaaaagtggaccgacccgtttcaggttatcagatgttttgattttggtcaaaatcaaactaattcaagtttgtagaaaacaataataatattttcaactcaacataaatttattataaaaatatattcagctattgatttcataaaactaatttggtatataaactaagttaaatttgaagtagtttggttttaaccaaagttaaaacgtcatataaccttaaaacgtagggagcacttgccatagcttctctattagagagggagagcgagtagaattaaaaacctggaatgtgatggctcgtgcgatgcaatcgctccaagctgctgcttcgctgagctctcctgctcgtgagtgcagtagccacaagcttcgccaatggccaggacccaacctcaatcctgtctcctcccttctcgttgtcccctatcaacatgaaaggaggagttgtgcgcaacaagcgctcggacgagcgtgtgtatcaagggtgagtactactgactacttttgtttcagccaccgtcgataagccatggctacgaccgctcctctctcacacgtagcaggcccatttatcttgagcgtatgtgtcgctggcgactaattagcattcaaatctacatgttcttcttatcgttagcattgcgagctctattatacttgcttgaagctcaagcccatgattttggtagcctggttgaggcaacaattaattttaaccacaaagataagtaatatctgaagaggtatggcttgttgaagaggtccaatatactcccaagacagaaaaaaaaatgatgtgtttggaattatctgattcattatctaaaaaaaaaaactatggttctttacccttacctctttcttccccataatataacaccctttcctattgtccatttaaagtattagccttgatcatagccagtaagtaccataaccctgttgatgctgtcgtaagagcatcaccaacagtccaccaataatctatccccaaaaattaatttttgtttcctaaactgaaaatagatggtgaaaaaaccccttacttcaagagatagcctaaatttaatcccaaaaactaaaagtggaaccttctgctaaactaccaatagaaattctagttttttttcctttcccgtgcgcaggaggagatcgccccgacgcggggaggagaggagaaacgcacggaaggagggaattgggagttgttttctcgccctcaaatacacgtacctagaaaattggagatgggaactccaaaacgtccggagctcttttgggaatcttttggaccagtttttttaaaccaaaatccccaaaaaaataggattgatgatggaatagatagactgttggtgatgctgtaaatccgatgttctctgtgaatttgggctcgctacagttgcgctaccacagccacagcactaccggtcagacctattatccatgattcgcactccatcaaccaattttatcaagaatcattgcttcaaaaatagccaatttcgtagcatttgtaacgtctgggttagcgactaataataacaaaaagaaaaaaaatcattcttcaaaaacaactattcaaaacttccatcaacaatccagatcagcatccttcgaggtcgaagtcatgtgactttgtcactaacatgtgagcccgatgattcctgagcccacatgttaatgacaaaggcaacgtgcattcgatggcggagaacctcaatcccatccatccatcttagcgtgaggttttccccctttcagctcagcagtgagccctccatcaacaaatcgatcatggccaccgtgcgcgctcttcgcctcactccagccgtcgtggcagtggccggtggtggtcggagaccagcggcgccgagcacgtcctgatcggccggtgctgagccgggacgccgccggcgggaagggacagctcgagcacttcgttgcactcgccgcaccgtatcctggtggtccacctcctcctccgtggccgcggcggcggcggcgtccgcagaagctccgagcacttgccgcagatcacgaatggcgcgccgcccaggaccgggcggcaggggtcggtgccctcccgccgcgcgggcgccgacggacgcccgccgccgcggtcgccgcggcagctggatgacgacgccgacgtggaagcggtgtcctgcggcggaagcgcccgctccagctgcgactccagccggcggaagagccgcgaatcgcgccgcgtcagggccctcccgccgccgccgctcgccgggcgcggctgctcgatggtgacgatcaagctgcggaggttgtccagcgcgtggaggagctccttgtgaaacgccgggtccatcaggcgcgccgccgcgacggcgcctggctcatcgggaggtcgaggcaagccaccaccaccaccggacgccccgagctcctgcgagctcaccggcgacggcgactgccatggccgcccctcctgcgcgttccttggcgtgtagaacgcctcctcgctccgctccgaatccgtcgtcgtcgtccagtcagacgagctcgacggccgcttcgtccgcctcgacaacggccggacctcgtcggcgcgccggtccgacccggcgtcctccggctcgtcggagaacaccgacgcggtgtcggcggagaggatctccagcctgctcagcgcgtactccgcctcatccgtcggctccgggttcttgcctgcggagacagcaaaaaaaaaaaaaaaaaacaccaagaaacaccacagcttctgggcgtcagatccatggcgactaatcaagcacagctgagattccatggcgggcgaggcacctcggatcggagtgcggcatctgctgcagtagaagatgacggccttggggttctggtagatcatggcgcggcagtacggacaccggccgaaccgcattttcacctcctccgactgcatcgccgccgcagaacttctccgactaccaaagcatcgatcagaaatttcgtcagagaagaaggcgtttgatcaacagcaatcaattcggccggtgagatgcatcttgattcaaacctgaaacccccccaaatcaatgcattctttatgccaaggtcaagtcaatcaacttcagctcgctaactgaatataactgctaattacgactcctcattaagacattgaccaattgcagtggaattgactgcttcataatcatttaccaatcccccaaaacaaaagctgcgatgaacattgctacgcaaggacatgccgggaaaaaggactcattgacctctagcgaagatgggaaatggtgatgagaaattggagattgacgctgtctcgacatgaactttagtacggggctacggcgacagtgggcatccagtacacccgtgcacgggagtaaactgttgcaactcaagttaggttttttttcgacaataaacatctcgtggattgagagttcagattggtttcttgcacagactaattgcagagcaacaagaagattgggggagaacatggcactataatcaaattaaaatataccaaaatatcaaattaaagaaaagaacagggaaacccactagatccctgaaaaaaaactgaatctcacctagctgtcagaatcttcagagcccctctgattcttcagctcggcttctcagacacgagataataactgaatcgagccatggaagaaacaggaggaaatacgggggaggaagaaagagtcttgagccagcgaagacacagcgtacaatccgaggaaatattttactagtacagatcgtgaactgaaaagggcatcgttggaaagatgggattggagcacagcattgccgcttaaagaaaaactgtgattttaattggtcaattgcttgttccagttcactgaattttctatcttggtacaatactaggtgtgcagtttgctttaaaaaaactagcatagtggcccgcgcagattgtgcggctatcatcattatattttctctcatttaatagcatatatgttttctcattatattattcaaatatactaaaataacaacataattttaaattttgcaataactttataaaactagtaatattcatattatattttatatacgtgttagttattaattatttttaatatcaaattttagttatttgtaaattatatatattcctatatggactctagactcgtcttttaatatttctttttttaattccgaattttctataaattgtatttctatatagactctatgctcttcttccaatattatttatttttatttctaaattttcatattatattttatatgtgtgttagttattaatcattttcaatatcaaattttagttatttgtaaattatatatattggggtgcag

SEQ ID NO: 26712 - DNA, 14914 bp, Oryza sativa
cttttttctacagaattagtcaaatttagagtagtttgactttaaccaaagtcaaaacgtcttgtaacctgaaacggagggagtagtttactactactcaattgatgactttttaagatggaagtcaacggaagctaatcagtaagcaagtaaatttggtggtctagttgtgatgtcggtcagtcttaagttgatcactaactttactttgatatattcttaagactgagctttgtactctttgcatatgatcaaccttacctaccacaagtaggtaaggtttcgcagcagtgttctcgtgtgacatcttctccaaaataatcttgaaagtggtgtgcaaaaatgtgaacattagtctttcaagtttagcaatcaactttgactaaattaattgtgttaaccaatcaaaggaaactcatataacatatttcctcgttaatcacaaatttttttaggcaagtgaagaacaacttgcagttgcagcctctggtctacagaaaaaaacaaatcttatgatcaggtatgtgtgctgcaagggcccagctccaacggcccaatccaaatgcagctgcaaagcctgcaagcatcagcaacctccatttctttttaaaaaaagcatcagaaaaaaaatataaacaaaaaatgttaattgcattatcccacttgcattatcctccgcccgccacgtgtcccgtctcccagcctcagctcgagctcgccacctgctcgacccgagtcctctccttcgcttcgccgctgctgctgctgcgggctcgcttgggatgagagccccctcctctccatggcctcctccctcctcctgcctcgcgccaccttcgccgccaccaccaagcacatcgccgtcctccacccgcccgtcgcatccgcctgcaggccccacccgcccaggctgatcaggtgcggcgccgccgccgtcccggacgacgagctcctccgctcgctctacctcgtgcaggccgacgccgcgtcgccggtggtgtccgcggacacgggcaatgatggatgggccgctctccttgacgagatcaggggctccctccaggcggaggactcgtcgtcgtccatcccggcggcgaccagcggtggcgtcgtcgtccccgacgagctcctgaccgcgccgccgtccgtcgacatcccggacgagatcctcggcgcggacccgtcgtcaaccctgcaggcgcccggccccggcggcggcgccatcccggaggaccttctcgcggcgctgcacctggacgcgtcgaacccggtggtgcgggcggcgtggggggcgctgtcccgcctcgacgagctgacgtcgggcctctcggggccgcagcggtgggcggcggcggcgttcgcggcggcgacgtgggcgtacctgacggcgcggccgggggtgctgagcggggcggtggacgcgtacgtgctggcgccgctgcagctggcggtggacagcgcggtggggcggcggagcctgaggatgagcgacttcgtggtcggggagcggatcggggaagggtcgttcggggtggtgtactccggcgcggtggtgccccggggcggcgcggcgccggcggcgaggaaggggaaggcgaagacgaggctggagctggacgagaggtacaaggagaaggtgatactgaagaagatcaaggtggggacggcgggggcgaaggagtgcggcgactacgaggagtggttcaactaccgggtggcaagggcggcgccggagtcgtgcgccgagttcctcggcagcttcgtcgccgacaagaccaagtccgagttcgtcaagggcggcaaatggctcgtctggaaattcgaggtaaattcgacatcaactcatcagttaatgcttgatgctagtatgaactgctgcaaccacatgcagcacagaaaattagtagtagtaacaacaattttaggaatcactaagctttttttttttttacgcaaaaaggtagagagtctctatcttatattccattatagaaatggcggtcaaagtacatggccaaatggccaaagaaaggtaaaaggaatacagaaaaaaggttacactggaaatggaagaaggagaaaggaatcactaagctagcttatagcatgcaaaaatctcaacagcctttaaactttaaacccaaaatttgaactgcttttatattttaaactcggtaatatgaagttttcaagctttttaaacgcaaatgagacataatccactctgtgatacaaaactttgaaagaatcaccaagcttacactacgcaaaaaagttcaataactttgtgatacaaaattttcaagtttttaagcccaaatgattcaaaaaattaaacccaaacgaaatgcaatatgattaaaaaaaagataaattggcccatgcaggtctcgaacctgcgaccttcgcgttattagcacgacgctctaaccagctgagctaataggccttgttcttttatatttgaaaaaaaacattcaaattttttaaacatgatttctggcgcgaattcatggcagggtgaccggacgctgggcaactacatgagcgaccgcaacttccccttcaacctggagggcctcatgttcgggcgcgccgtgcgggggctcgacgacggcagccgcgccgcgctggtggtgaagcaggtgatgcggcagctggtgacctccctgaagcgcatccacggcaccggcatcgtccaccgcgacatcaagccgtccaacctcgtcgtcacccggcgggggcaggtgaagctcatcgacttcggcgccgccaccgacctccgcatcggcaagaactacgtccccgaccgcgccctcctcgacccggactactgcccgcctgagctctacgtcctccccgaggagacgccccagccgcccgccgagcccatcgccgccatcctctccccgatcctctggcaggtgtcgaacacctcacaccttcttcttcttcttcctctccgttcaatcttgcgccgccgtcgatcaccgtcgtcgcgttgctgtttcttggctgaatgcagattaacagcccggacctgttcgacatgtactcggcggggatcgtgctgatgcagatggcgtcgccgatgctgaggtcgccgtcggggctcaagaacttcaacgccgagctcaaggccgccgggtacgacctcaaccggtggcgggagaccacgcggcggagacccgacctgcagatcctcgacctcgactccggcagggggtgggacctcgccaccaagctcatctcgcagcgcggcgccgacaagcgcggccgcctcaccgccgccgccgccctgcgccacccttacttcctcctcggcggcgaccaggccgccgccgtcttgtccaagctgtcactcagcaagtaggttatacaaaacaactcaatgcacaaaattaagaacacatgcagtgatcaggtcaccactcaccaatggcattagcatttttgtttatgatccattggagagatcaagaactcaagattgatccaagagagagggaaaaggaggaggaagaaacaatatggtaatatataattacattgttttgtatgaggttaatcactttgaacagtgcggtgcagagtttgcagacactagctaacttaacttaattactgcccgtattcggactgaactctactgagaaatccctacttctgttggtcagcttcttgcaacctatgtagatttctgaactgtttcttcagccaatccagtactttgattcgacagagagctcattctactgatttggctcaccaatttcttaattagacagcaaaccaaaaaaaaatgcttatacatcatcatataactttggccggttaagctgttcgaacttttcctgaagatcttcatggttgcctccaacaagcttatcaatctcctcattgtttttcatgaagatgaacgttggggttgcacgcacatcgtattgcgtcaccagctcctgacgaatcaaagtaaaaatgccattcatctttgttatctgttgccacaaaaaaaaaagtgtacagagagcaaaatgggcggcaactggaaaaaattcagaatattggatgtaccggcatttcgtctacatccacggacacgaaaacaatgtcaggatacttcagtgaaagttcagcgaatagaggggcagcattcctacacggagtgcaccaaattgcactgaattttagcacaacctgttcagagggacataccaccatggttaacataaacagctatgctttcatcatatatagtcagacaattgatcaacatcttactgttttgccatgctcagctacttcttccattgtattgtcccaattcttttgatcagttaccaaagtcacatttccgccactgtagtccaggtgctcctcggcgtctacagtgctctgaaaaaaaaatagaagcataatgcaggtcccctaattatgagcttgaagatgcaaataataagcagcactacttgtctgtggattggggcagtgcagtatattgtaatgtctagttcaataaccacaatatgaattgtactggagaaggagattatttacgctgccacagcaacccatcgacttgagaaaattcgtcaagatgcaagtgtcctctgctccactgatgaaaaaaaaaatcgggaacaatattcagtactggtgtcaatgccgctaagccaagaaaaagaagaggtcacacaaaacattaacctggatgttttgatggaaaaagaaagtcacattcatgtaaataagctcctacttcctctatcccataatataaggtatacatacatttcaagattcaactttaaaaatatttgactataatataaattaaattttatttgctaaaattaatatcattagattggcatttaaattcactttaagatggttataattttgttgtaaaaaacttatagtatatgagaaattataggtcaaatattagttttaaagactgtgccaagtttgaccatgctttatattatgagatggagagagtttttttttctagatgggacaagatcctgttcatggtagtgatctggttaaggggcaatttcgttcttgcccctactttcatcttcaatattgattttacccctgtttttttagggttttcgtttttacccctacttttttgaaattaaagcaaattttacccctactttggatggacatattgacggtgttacatctctggcgaaaagacaatcatacccctatttgatattgaatatttgtctgaatgtttattcaataattgtgtatttgcccccatttttacattgcatttttcacaaacttttgcaaatatgacaattttttatagaagattaaaatttttgacataatataattttgcgacaaatttgataaaatttgtatattttgcaaaagaaaaaaaaagacagaatttgggcatggtttttacacagctaacaaaagacatgtaatagcaatcatcacaaaatcaagcaaatccaaatcatgaggtcaaaaaaatccaatctagtagcatgttgcttcttcctattgccaggttggtgctgcttgccgcagcgtgcacctccggccgtccgccgcgcccggcctgctcgccatcagcttgcagcgcccctgagacctgctcgctgcgcgcggcctgttgcttggcgtgctagccgccaccgcttggccgggccactgccgtcgtcgccttcccgcatgaagccgccgatgcctagctgagacgccgccgccgcaagctcctcacgataagccgccaccgcctggacaagagcccatcgtcctctcgtccccttgtcgagccgcagtcgcctggcctgcctcgacacgcgcggccttctgctcgtcaccataggtgggattggggaaggcaaggaccggcattgtttggttatggctcaccaggggtataaaggtccatcaacgaattaaaaatcattacttcttttttttctctacttcttcagctccataatcccaggttgactaacttctgttaaaaatagtggtaaacgtctacttcatttccaaaaatcaggggcaaaaataaaaacattaaaaaataggggcaaaattgatattggatatcaaaataggggtaagaatgaaattatccctttggttaaaatactattgacgtcagctccattgtttgtttgttgacttattagtcgtagccaaaatttaagttttaaaacttaattttagagttgattttgaagcttttttcatcgtagtttatttttgaacgctagcttttaattgcgaagaacacaaatgcaaaagtttttacccataaattatctttagttgcttcattcacatccccacagcttatcagccatagagcaaacgatgtatgcagtcacttttaactttgtatagacgtttaatgtttatgtaaaccttcaatagcatttaaaattttaaatacatgttcaatactcatttgataatttgaactaaaaaaagtagaaataaaccgtcaaactgttttgtgacgtaaatcaagagaccatatttcacatcatgtcccataaaaataattcacaccatgaatgtaaattaattttgccaggatcacggtccaatcacccaatcacaaataacctacgaaatttatagagcaatattttttactgggtcggctaaaatgttattaagattagaggggaaaagagaagatggcttttctggtttcccaaatctctcacatgagcaaagataatgattggtgacatagacgatatggaaggagcgaaacaataaggtttttagggcccctttgaatcgcaggattgagaaaacataggaataggaaaaacgtaggattttgataggaatgtaagtgtaaaacagaggattgcaaaacgcaggaaaaacacaggaatgaccgtttgattgaatcataggaaaaacacaggaattggatgagagagatatactcaaaggaaagttagcaagaggttgaagctcttgctaaatttcctccaaaatctctataggattgtccattacataggaatttcaaaggattggataggatacaatcatttgtttcaaagggcttcataggaaattttcctaaaattcctatatttttcctccaaatcaaaggggcccttaatggccaatgcaagaccatacaggaaatagcgaagctagcggcatcggggggccacgctctcaagggagacaggagcacccgcccatctaggtggagcatttggtcgtcaaattgttccgcgagctatcaatgtattgtttccccgcccccattttattctttcctttctctctgtaataacttttttttaatcttaatacaaaagatacacattttgcgtatcctttaaaaaaaaaagagagagacgaacggaaggaagatagcatttccggccggtttccccaatctctcaaatcatgcagcagcaattcgctatacaacgatgaacacattgttcagagagggggcgtacctctgcaagagcaaaagggcaagaaaagtttggctcgccgtctgcttggttctgcgccgagcacgtcggccgtgcgtcgacggcggcggcggcggcccccggcggaggggtgggtggcacggggatggcgccggggctagcgaagggaacgggcggccgccatgcccaccctgggaagcgaagctccttgtcaaccgctgaaacgacggcctgacggtcgctaataccggggtggatcgccagcaaatctgcaggagagaatagctaaaattagccttcctttcaccgctatctcccttcagattccacgccggcttagctaccaaactgatctgcaatgccagtggcagcttgccattgccaagcaaaaagaaaacaaaaaataaaaataaaagttgtacaattgcattgtcaagagagaagcaattccagaaccagttgtcccaagagtatctctactttatgttcttctctttttctgagccaaatacacaaaggtgttttcaagccaaaggaatgtggcaaagctggaagttcattcattcaatacaacaaaccccaaagagttttacatgataggaccatgtcacccagtgatgatcagtagagctactggaaattaaacaaacacaatgactaacatcacatttctttcaagaaaaaaaagagtgagagaaggaatcacagcacagaatgaagaatgaataatgaagaagaagaatcactaaagaatgatcagaaaatcaaacagaaaaagattcactagacacattgctaccaacaaccttcaaggtagaaactattgaacctatttttgtctcagtggcatgttgttatttctgtgccatcaggtgatctggattgcttcctcctttagcttgtcctcgggggataacctcgtccccgaggaggagttcctgatctcctcaatcctccttaccacttcctccatccgaggccgctggtcgggaacaattgcaacgcatgccatggcgagctggagcatctgaaccatttcatcctcgctgttcggatgcctcaacaggtcggcatcgaaaacctcggaggtccattcttctcgaaccacggattgcacccatcttgggaggtgttcgatggaatcctcacggcctggggatctaagaggagcttttcctgttagcatctcaaggagtagcacaccgtagctgtagacatcggatttctgcgtttgccttttggtctcaaggacctccggtgcacggtatccaatgagccgtgctgggatatgagggatggccatgagctgcgcaaggccaaattcggagatacaagcactgagtccctgcgagagaagaatattacttgacttgatgtttccatggatgaactttccacccccctcagcatgaagatgagcaatcccacgtgcagcttccagagatatctttactctcgttgcccaatccaatgtagttcttccagcagttctattccctgaatatttaccataaacagtaggtcagatcatgtgcgctttcatagcaatacatgtacacataaaaggcaagttattcatgaattcatacttccagacaatacgtttgcaaatatgttgtgcagcctgtactactttcatgtatttttcttcacaggatatcaaccaaggaccaagatgcagtatacctccagaatgcatacgtcttctagtcagtttttttttagaaaataaatttcctagccatcaaatttagaaaaataattggtcggtttgcaataatagcttgttcgaaactacatgattttgtacatccataaaatctaaaagtgtatcaggtagactcactatgacatgcttgtaaagacaacataagaaaaggaaaaggttgttagacatagttcaatacaaaaaaggataaaattttggtccttgaggaggtaacaggaggtaccccattcattttctagtgtcaggaagtaaaaactttatactacaaaaatagaggactgcaaaataactcatcaaaaaagagtgagcattctatatttgcttgcacgcctatatgtagttaaaaccagctaataaattcactttgcacaaacaaaacaggttctgtcaggcaatgaaaggcttaatgatttgaagtaatagcataccatgcaaagcagcacaaaggctaccaggtgtcatatagtcatacaccaaaagcttctcgtccttggagtaatagtaagcacgcaattgaacagcattttggtgctggccaactctgccgattatctccatttgctgttcaaattccctctttcctgcgaccacttccttcagtcttttaactaccacggttgtgccatcctcaagaacagctttataggtagtcccataacttccttttccaaggacttcagctgaggccctcaatagatcctccaggtcaaaattatacgaacagccattaaagaaaatcaatttattcctctctgcttcttgaataccactactgctgtactcctgctttgatttttcagctcttccacctgcagcagcctttcctttggatgaaaatgaagctatgccaggctcgccatctttctttcttttgaagatgcatatcaagagcacaacaatcaaaatcagaagtaataaccctcctccagcagctattgcaattatgacaccaaggctaagccttttccagaagcttttcttggtatttgggggcaatggcgacatcggagaaggagaaggtgctgttcctggacatggttccagtggaagtccacagagaaaagcattcccgaagaatgaactggctgggaatttctgcagggaaggcggtatgggcccactcaggttattgttgcttaaatttaaatgtctcaaattggggaggtgaaggtcagggatgggtccagaaagagagttattctggaggagcaatgcagtaagttgagtgatattttgcactttcaatgggatttctccatcgaaagagttgtacgacaggtctaggaatgttaggttggaagatagtgaagttggtataattccggacaagttgttgtgctgaaggtaaagagaatgcagggaaggaatggatgctacatcaggggggaggctaatggtgagacgattggatctaaggctcaacacctgtagcgcgtcaagcttgccaagtgtgtctgaggggatgggaccaaagagccctactgcaggtagacgcaattcacgaacacgcctcccatctggtgtgcatgtaatcccaacccacgatgtgcagacttgagtcgtgagagtccagttgagttttcgaccatggggcactgatgcagcaaatgcaagaagggcctgcctgtctgagtttaggtcagcacatctggcacaagggatgtgcagaaacaaaaacgaagcagaaagaaaggctatgagcacaaggtgctgcattgttaggattaacttgaccaataatgaggaccagaattataatccaaaggtccacgtcagtgcttcattcctgccacattaaaaggatcatagtcaatagcaagtaagattgttcatagcatcaggagtgagagacatagaaatacatgaagcgttaaatattaaacacatgttatttgcaaagtgggaaaactagtaaaaacataaggtattttgaatacaaaacatgaagccatgaagaatttaaactttctagtggacatgtatcttctttttaactaagaacctacctgaaaagatacatccttgcaacgatagcttttctgtttgtcattgtaacgatttgtaatggacccaaacacacatatgtacgaactaccttaaggagcagtggagtttgatgcactaaatttgcattcgtccatttacaatttaccagaagcatttcaatttttttactattcatatcaagggtggcttaagagcattgatccattgagtatcagattcctggtcctgctaaggaatacaaacaaatatgctgccagaatggcatccattgcagggccaacatgatcagagagagattgaagaatttgcatgcgagggaagactgaagagtctacataccctaagctatctctcagcataatcaggagcccacttggcaactttgaatcacaactgattgttattattgacacctaaagctggtgtaagctcataatgcacattattggaataaagcatagagtgataaattgaagagaagatgacaaagtactggtcctctcttttatatgtaaaaggggaccaccaaattctcaactgctacacagcaaacccccctcccaaatggaacaccaaaacagaataaccctccttgttttttctctagtcttgtccaaaagatccacacccaaactaatattgccggtttatctcgagcttttctgaaatggagcggttgggaccatgtgccatataaaacgaaacatgtatctctttgataaagtaccccatccacgttaaccttttcacaaaggatagctccattaattctcttaacaaaatagccgcggcacctaaacagtgcacttaatcgtaaccagaaaggacacaaggatagtgacaatgaacaagacaccgttccaatcggacatggcatagcacattatattggtgctctctcttgcaaagatgttacttgcacaaaagcaacatgcaaagcacctaacgtaggctcagtcactactactatatctcatttcagctcgttctttttttctaaaatctagaggaccaagtgctttgggtaaaggcaggagcacgaaaccaaaagtccagcacataaagcaggtggtctcaagatgcaagaaaccagaggggagtagaaaagatgagggttttggaggcaggattggggatctgctcgctgatgggggagatcatgggcagcactgcacactctggcacagtgctagggccaaagacatctcacattcacaccataggacaaatgtgcaaagcaaaagctaccactgtctcacactacgcaacagtagaagtgtaccacagtactgctcctctgcttgacatgttgtaaagatttttcatgtgcagtaaatccaacttgggaattgcactagtaaaatttttcattgtattgagttagtagtactgtttaaaatatattctacatttctaagttactacagttcagcaatggtcagtggaatgagttggtaactagatggaagccaacaataccattagttaatcatggaatcacactagaaatagagagagtgccatggtcaggtagattcaaagtgcaaagtccttaaacactaagaaaaggactacgcccatataatctccttttcctttttttttctaaaagaaaaaaagaagaagaagagagcacgcgtcaaacaaccaaccagcctatcacacgaaagagaaagcagggaacagtttgttacaacttagaacagaaatcagatgaacaatctacattatatactcaaccaaaatttcctccctaaaaagaaaaatcagttttccttttcattttttttacagtataagcaggaactgggaatcactgaattatgccatatcatacctcgcgaaattccaccggagttgcggccacagctgaattccgcagcagccatgccatgctcggtctccaaaaggctcaacaaacgcagaaaaaaaaagaaagaaaataaatccgacctttccggccacacggatcaagaaaccgcccgccgccgcgccgccgccgctcgcctctccggtgcggaaaccccttccagtcgccgccggcttaactagggcgagagccactcaacacagcgtcagaaccacccccaccaagaactgctccaagaaacaacgcccgccccgccgtggccgatccgccgcgcccggcattcccttccccggcccccgcgcgtcgaccctcccgcagcccgccggccggtcacctccctctcgctcgctgcgccgcctcctcccagtctctgtgcagcgcgtgcgcgggcgcgagtggacgaagtggcggacgtgtgcactgttcgcgcgggcggtgcgggtgcgcgaggcgagcgagcgagcgagttttcgctgcgcatttaagacaagtgaagcgtgtgtgcgcgtggtaacgattagcgttggggggtttggaggaagggagagctgtggcaaaatggcggatttgcccctagacgtggcgaggccagagaggatcagaatcgtctgcagtcgactgcactacgcctttgttattaatttatgagtttagagattatcggatccacatgttagcgataaaggtatggaacatcggatcttgcaattagctgcagaggatggtagagagtggagaggaagaggacctatatgttcgtaataaaggcacggtatatcgaactgtgcagtcagctgcagaggatggtggagagtggagagggaaaggaggaggcaaaggcgcaaagcaaccgtatcgcgcgaggaagatgacgacgctaggataggcttgggctgggttgctgacgctgacgtgcgggcccgggaataggtaggaggaggaacacgcctacctggactggaactgaaaggaaaagtctgatgaatcttcccccggtgtcatacgcatcttgtgtgtgtgtgtgtgatgctcgtggtggttgtacttgagcctggagatcattgattttcttaatgagtactccctccgttaaaaaaaaaaagacaaacccggtttccatgtccaacgtttgaccgtccgtcttatatttgaaaaaattatgaaaaaaattaaaaatacaagtcatgcataaaatattaataatgttttatcatctaacaacaataaaaatacgaattataaaaaaatttcatataagacgaaaagctaaagttagacacggaaacccagggtttgcttttttttttgactgagggagtacgtaacagtagtacagtacacataagaaatgcaaggagtgctggagtggtattattttgagggcttaatgacgttgttactgtttaggctatgtttggtacaatgaggctatgtacaatgaggctatgtttagttccacaaaagttggaagtttatgtgtgtagaaaagttttgatgtgatggaaaagttaaaaatttgaagaaaaaattgggaactaaactcggccaagttgggagctaatatctagcgcacgcaaaaaaaattaacacatactccctccatttcaaaatataaggcacaaccacccttagcttaaagaccaataaataattaatatcacatcattgtcatgaattatcccaactagtacagtacatgcaaccaatagaattaaagatcctgtgagtgtatgatttaaaataatactccctccatcccataatataagagattttgagtttttgcttgcactgtttgaccactcgtcttatttaaaaaatttgtgcaaatataaaaaa

SEQ ID NO: 26713 - DNA, 2198 bp, Oryza sativa
tgcgttcgtggcaaaaactcacttcgtgattcgcgcgggtacttttgtcaattaataccaatattggcatatgttgagaccccacgggtgcggtgtttttgaccgcattgaataagttcaaaaagcatccaaacatgaattttggacatattggagtgtattgggtgcgttcgtggcaaaaactcacttcgtgaatcgcgcgggtacttttgtcaattagtgttggcaaaaaactcacttcgtgattcgcgcgacgaacttttgtcaattaatgccaatattggcatacgagggtgcaatgtttttaaccggaatgaaaaagttcaaatagcaccaaaataagatttttggacatattggagtgtattgggtgcgttcgtggcaaaaactcacttcgttattcgcgcggcaaatttttgtcaattaatgccaatattggcatatattgagcccccacgggtgcgatgtttttgaccggattaaaaaagttcaaaaagcaccaaaacatgatttttcgacatatttgagtgttttgggtgcgttcgtggcaaaaactcacttcgtgattcgcacggcgaacatttgtcaattaatgccaatattggcatatattgagcctccacgggtgcgatgtttttgaccggaatgaaaaagttcaaaaagcaccaaaacatgatttttcaacatattggactgtattgggtgcgttcgttgcaaaaactcacttggtgatacgcatggcgaacttttgtcaattaatgccattattggcatatattggtacacgtgggtgcgatgtttttgaccggaatgaataagttcaaaaaccacaaaaccatttgttttagacatattggagtgtattgggtacgtccgtgtcaaaaaatcacttcgtgactcatgcggctgatgaatcctgagttccacatgaaactcaaggctgttgttggcccgatctttcgatgagttgagataactacgatttgggagaaacgttgacgacccgactacaaccgtacaagacgttgtgttgcgccttagcgatcgatacacctctccgtaggttgttgatcttgccggtgcaaagcaaccctattcctgcaagcaaatcgaagaaacaagcacgaacaagataaaagcaatttgaattgcaaataggaataaatgcacacaataagttggggtttcggatacaagcagatggacggtctagccgacacgcgcgctgcaaggaagtagcaatggctaaactttcatctaaacaaaagccaactaaccctgaaggggttactagctatttaagggatgtaggaggtcagaagggcgtcctccctctgtttggagcgcaggccccccttgggccccacttgggccggggtcccagacgaaattacaggcccataggcccattacagacaatgcagccccttgtttcttcaattgccaatgactcagatagaatttgacaatgaggttggatccgttggaatgaggattccgagagctttctatcaagtactcgtgggcctaaaatgaaggccatatggagatttggcgaccgtttgaattcagcactatctcaagtggtcgaattggattctagaacgcggcggacttcatctccatctctgcatgcaccatggccgtcgtctttatcttccatatgcagccccaaataagtggattggtgtaacgccccgattttcgttcgggattaaaaatcattaaataatgcattttctagaaattaaataaaagttaaatcaatttaatcaagtgaaataatgggagaattaaaattttcccttaaaaatcattggccgggaatattttgcaatattctttgtgccctaaaatactctccggatttttccgtgaattttcggagttcaagaaataattttaaagtcacaaagttcattaaactaatttaaataaaaagaaaacaaaataaacttccccttcctccctttcgggctcggcccaaaatcctctctccttcccctcccgcggcccggcttgcctccccttttggcgcaagtctgtttttcctccctcccggcctcccctctcactcaggccgacaggtgggacccgtgggccccacctgtcatctccaacctccagcccgggccggcaactgccatggccgccgaaaaccgcccacgtcgccaccattcccggcctcctcgagccct

SEQ ID NO: 26714 - DNA, 13871 bp, Oryza sativa
acaaaactccgccgaaacaccacatccaccgtgcacccgagccacagctgcctctcgtcacctccagtcgcgcgccaccaccgctcccgtcgctgccgcgctgcgctaccaccgccatcggcatcgccgttcctcgccgcaccccggcccctactccgtttcccctccctgcccctggaacgccgccgccgcgttcaccatctctctccgccgccaccgtcgagtccagccgcgtcgcgccgcctctccggtcgacgccgacttgtgccgccacctccttcggcttcgtcatctcgagggccccgccggccctcggccgcgtctccgccatggtcgggtgtcgccggaacgccgttcccgccgcctctcgtgccagtcgccgccatcctttccgccgccagccgcctccctgtggtcgtctcgccgtcgccgtcctcggtgagaatccccaccgtcccttctcctttttttttccctcctccgccgctccccgtgcccgctgccgcgacgcgccgctgtcgccggcggtcgtctggccgcacgccgccgcgcgctatcgctcgaccaggccggctgtgccgtgcccgtgccccagccgcgccgcctcgtggccgtccgatcggctttgggccgatccgagccgtcggttcccgtggaccggcggtggaccgcctcggtggttccgatccacggtggaccggcgcccttgtgccgctgaccggtgggcccgcttgccggcgccgcccctcccccttgatgacgtcagcgaggtccatttcctttgtaaaaataaataataattgcgcaataaatcgagtttaattatagaaattcatttaaatggctcaaaacttctaaaattcatatctaattcattcggactccgaattgagccattcaacttgcaaaattcatctaaaattgagctctacatgtttgtttagtttttatgtactgtttccttggtttttattagagtttttcctcgttttgcgtgccagcgtgtagtttccgtcgtttcggaagtccgcggtcgcgaggaaaagagttcggaagatcaaagtgaagaagcaaggcaagtcacacattctccttgagcatgttgatcccaatttataaatgttttaccgtttacaaataaatatgcatgttttgctaattacacggggtcagggtttacctatctgctcgcttgtgccatgtttacttgatatctgttctttgtcaaccttgggtaataaattgactagctcgtgttacttatgtgacctagctagaactatatgcttagccatgcttaattaccactagctcagtcgatgggataattgcagttttagacattctagtatcttgttgagccgcgtgctcgagacatctggccatgttttatggtcgtaattatccaactaaaatgcgactgaatggtgggctgtgggtgcatggttttgcgagtcgcacccatagcaattaaggaccggttcacgggaaaccctagaagacttacagcgcttgccacaagcgggagtgggtaactgcttgatctgaagtatagctcgaccctttcctaggcaccggtggcgagggtgggcgtgatggagttgggtcggccggggtgtccggttgtccagctgccggattcaccgcggcgcaagaggggaccgcccactgcctttttaggggtgggggtgaaaccttagcgtggtgtggatggttaggggagggttatgcgaagggtctcgtcacaatcactcgacgtggtgacgtgtgcatcatgggcacatgatgacgcggtgacatgtcggtgggttgtgtcttgtgggtacagttgtgcacctctggccagagtaaaactattcgaatagccgtgcccgcggttatgggcgctcgaccagattcaccgtgattagtctcacacttaataaatcgacccaatgcactgtagtacaggtgggttggttgggcctgttcaacgtggtgtagcgttgatcagtggagattttaatgttactttaattactcaacagttttactgttttgctcaataaaatgttttacaaccgcctttatgcaaatagccacaaaccgtccttgtgttccccttgcacgtctgcatcgttggtgtggcttgctgagtacggtggttgtactcagccttgctattattcccccttttcagaagtgtagtgcttctgagctgaagatggagttagaggaccaaggctcagaccccagttgagttttgcctgtggagtggagctgaagccccgctaggatcgccttttttcgctgctgctgcttttgtttcggtgtgaggactaagtgcctcttctgtaagtattttacgctttatttacgtttggaactgtttattacttgtcgttttgtgtaccctggctggtcctggacagggatttaatacacaaaatagtctggaaatttgggctaaatttctgggcgtgacaattggtcctgaacatataaacgcatacattatgaggtagtgtcatattcttgattagattaaattggcacttgttatgaaacgagaccacctgtgggtatttgacatgatcaatggttgtatccgtcgtaggcgtggtcacatcatcggcagactttgtcaattaataccaatacttgcacacatgggtgcgatgttttcaaccggaacgaaaaagttcaaaaagcagcaaaacatgagttttggacatcatggatcggattgggtgcgtccgtgttgaaaaattactccgttactcgcgcggccaatttttgtcaattaatgctgatattgacacacgtgggtgcgatgtttttaaccggaatgaaatgttcaaagagctagcaaatattggcctatgttggcacacgtgggtccgttgtttttgccaattaatgtaggtattggcctacgttggcacgcgtgggtgcaatggttttaacctgaacaagaaaaaacagttaaaaaaccagaaaaacatgagattttgacttattggaatggattgggtgcgtccttgttaaaaattcactccgtgactcgcgtggcaaactttgtcaattcatgccaatattggcacacgtgcgtgcaatgtttttaatcggaacgaaaaagtttagaaagcaccaaaacatgtgttttggacataatagagtggattgggtgcgtctatactgaaaaatcactccgtaactcgcgcagcgaaagtttgtcaattaatgccaatattggcctacattggcacacgtgggtgcgatgtttttagccggaaaaaaaaagttcaaaaaccacaaaaacatgagttttggacatattgcagtagattgggtgcgccctcgtcgaaaattcactccgtgactagcgtggtgaacttttgtcaattaatgtcgatattggcacacgtgggtgtgatgtttttaacaagaacgaaagattcaaaaagaactaaaacatgagttttggacatattggagtgtatttggtgcgtccgaatcgaaaaatcactctgtgattcgcgcgacgaactttcaattaatgctaattttggcacacgtgggtagcggaaccaaaattttcaaaatacacgaaagcatgagttttggacatattggaattgattgggtgcgtccgtgtagaaaaatcactccgtgactcgcgcggtgaacttctgtcaattaatgccgatattggtacacgtgggtgagatgtttttaaccagaaaaaaaaagttcaaaaaacagtaaaacatgaattttggacttattggacgtacgtccgtgtcgaaaaatcactccgtgactcatgcggcgaacttttatcaattaatgccaatactgcactatattggcacacgtgggtgagatgtttttaaccagaaccaaaaagatcaaaaagcagcaaaatatgagttttggacatctcgtagtggattgtgtgcgtccgtgtcaaaaaatctctccataactcgcgcaacgaacttttgtcaattaataccgatattggcacaatggcacacgtgggtgctatatttttaaccggaacaaaaaagttcaaaaagcaccaaaacataagttttggtcaaattggagtggattgggtgcgtccgtatccaaaaatcactccgtgactcacacggcaaacttttgtcaattaatattaatactggactacattggcacatatgggtgagatgttttttaccggaacgaaaaagatcaaaaagcagcaaatcatgagttttggacatcttgtagtggattgggtgcgtccgtgtcgaaaaatcactacgtgactcgcgcggcgaacttttttcaactaatgccaatattggcctatattggcacacgtgggtagcggaacgaaaaaattgaaaggtacaaaaacataaattttggacatattggatttgattgggtgcgtccgtgtcgaaaaatcactccgtgactcgcacggcgaacttttgtcaattaatgccaatattagcacacgtggtgcgatgttttctcaccggaacgaaaagttcaaaaatcaccaaaaacatgagttttggacatatttaagtgtattgggtgcgtccgtgtagaaaaatcattctgcggctcgcacggcgaactttcatcgattaatgtcaatattggattatgtctacataactatctcgtagcaaagtgcgggctatcaactaattaaaccttccctccggcgtcaacatcgtcacaacgtcattcttattcgtgccaaatttaggtggctttcccagtttatccgcatgtccacaaattaatccctcatgctcttggcatttacccaccagacgatcacatcacccgctccatttgcaacggagctccttactctacctcgacttgcaaccgaccaatggtcgccgtttgttgggacatccatacccatgcattctggatacgctcttctctcctccgtcttgctcgtcctcctggcgctctccatcatcacactagtgccacgcatgccatcaccgcagtcgttcttccgatctccaccgcctcgcctgatcaacagtagggttcctcatccatccgatgccagcgattgtattttctccgacggtaaatgggtgagggacgccgcggccgtgactgcttaccgggaggactgcccgtttcttgaccctggtttccagtgcatcagcaacggccggagcaactcgtctttccgctactggcgatggcagcctcatggctgccagctcccgaagtaggtagccatcgccaatgacatctttgataaattagtaatttcttttctgtggtttttcatgatgtggacatttttcagttacttgcattgccactcattcttcaattccaaatgatttgaggtgtttaggttcaatgcaactgatatgctggagaggagccggaacggcagaatcgtgttcgccggcgactcgatcggccgtaaccagtgggagtccatggtgtgcatgctcgccgcctccgtgccagcggggaagtcaagaatatatgagcagtccgggaaacccattagcaggcacaaagggtacctcgccatggtcttcgcagactacaacctctccgtcgagtactaccgcgccccaatgcttgtcatgatcgaccgcttcccggcaagcagcggtgccgtcaggggagcggtccggctggacatgctgcctcggcacgccaaccgttgggctggcgccgacgtgctcgtgttcaatacagggcattggtggaatgagcacaagactatcaaatcgtaatttgagccgtagttaattaattaattattttgtttctatgcatactatgttgtttcatttattataactgatccctaagtctcaaactactgccacatacatgttttcaggggaaactatttcatggttggtgatcggctgaacatgagcatggacatgaaggaagcattccgatggtccctggagacagtgaaagattgggagataagtagtacacgggttccaaatagttattttttcttcaggagttattctccttctcattataggtaagaattgttagtgaacgatacacacagttcacctctttggtgaattttaacaagacaaaacataatccttcatacaatttgaccattcgttttattcattttttttgcaaaataaaaaagaatataagccatgcttaaaaaaatatttgacgataaaccaagtcacgggtaaaaacgaaaaaataaaagacaatacatatttttttaataaaatgaatacaatacatatttttttaataaaatgaatggttagaacgtatttaaaaagtcaacattgtcatgcattaaaaaaatggagatagtacgttccaacgtagatatataatgcttttaaaatggattaaaatggagtagtggtggtgatgagtggtgaatctaccaccatccccatcactaactccctactttttgagtaattttatagtacattctacttgaagtatatatttgctgcagtatatggaagggtaggttcgatatttgttaaaaaatatgaaaagtgttgtttagtattttgaaattgaagtttattttcatccggattgattttccagttgtagtattttttctgtatctcgtcatccattcgtgatatagcgcttcttcagaatttatcgcgtgtccccggcgtccttgactcccgacgcacttgcctccagccccggcgcctctatcccgattccttcatgacaaaaaaaaaagttatgtccagatttcacccgatatgtctggaccaggaaacaactaaataacacgtgattttcagatggagctaatataaattaaataactattattttaggaaaaaaagttacctccggatttcatccggtatgtccggacatggacaacaatgaaaaaacacgtggttttcgggcgtgctagcataaattaaataactattattttaggggaaaaagttactaccggatttcatctgatctgtccagaccaggaagacaactaaataacacgttgttttgtggtcatgctaacataaattaaataactattattttagaacaaaaatatttacatccggatttcatccggcctatccggaccgggatgacaactaaataacgcatggttttccggtcatgctaacataagttaaataaataatattttaggcaaaaaaaagttatgtccggatttcatccggtatgtccggactgggacgaccaaaaaaaaaacatgtgctttttcggtcatgctagcataaattaaataactattattttaggaaaaaagttatgtccagatttaatgtgatctgtccggaccaagataacaaacataaattagataaatattagtttaggaaaaaaaattccgtccggatttcatctggtctatccatactgggatgataactaaataacacgtggttttccggtcatgctaacataaattaaatatctattatttaggaaaaaaagttacattcatttggtctgtcgggaccaagacgacaactaaataacacgtggtttccggtcgtactaacataaattaaataactattattttataaaaataagttaggtccggatttcttccggtatcccagaccgggatgacaactaaataacatgtggttttatggtcatgctaacataaattaagtaacacctattttagaaaaaaaaaggttacatccatattttatccggtatgtccggatcaggataacatgtggtttttcagtcgtgctaacataaatttaataacaattattttagaaaaaaaagttacttccggatttcatccaatctgtctggagtaggataaccgaaaaaacacatggttttctgatcatgctaatataaattaaataactattattttagaaaaaaaaagttatatccggatttcatccggtcggtccaaaccggtatgcaacgaaataacacgtggtttttttagtcatgctaataatataaagaggcaattgtgcttcagtccttgatttacaattcaattgtgattttactcttactttttagggtttgtgattttgcccctgtttttctgaaatgagtctgcccctggttttgacataagtttggtggcctgaaatttccaaattaaacgaataaagaaaatgttattattatttgtgaatgaccattctacccttggttcaatgagcaaaatcccgaattcctttactgtccgggttgcaagcgctgggttgcaagtggtggcggcggcgacgcgcggccagcgcgcggcagggaggagaagcggtgcgggccagcacgcggcagagtcgggcgcgggcagggaggtacggcagcggctagggctgtcaacgagccgagcttgagcgagcttgcctgtctaggctcgagctcgagccgagcctataaaatgttcgaactttcaaacaggctcggttcgagctcgatcaagctcgagctcaactactgagctcggtttttaattagaacattgtatatttcaaaggataatttttaaaaaatatttaatttatggtttatcatattagtataagaagaaaaaaaataaaataaacatataatgccaatacaaggcatacaaataacatatttgatctaccaatttattaaatagcaacgaaaaattatatattactaggcccgttagaagctcgagctcggcgagctttgggacaagctcgggctcggctcgtttggagctcgagccgagctcgaatcaagcctaggacgagtcgagctcaagtagctcacgagtctcgagctttctttttttacagccctagcggcggcggcgtcgtggctggcgcgcgcagggaggtgcggcgctcccgcggctgcatgcgcagggacggcctttggaggcgccgcgacgaggatgacggcgaggaagaggacattgccgtcgacgagagggactcgctcgggctgccgttgccggtggtgagcaactgctcatcgtcggagtgtgagtacatggccgagtcagaggctgagctggcgaagaccgaggaggagaagtgcgcgtcggcgtcgtcagcgtcggagtacgaaaagacgtcgcagtcgagcacgaggagcgtcgcattccatggtgctgccgacgccggaggagacgggcataagctgagtgttagtgctgcttctattattgtgcgtttagttagttgggatttgggatgccataaatacaatggtgatcgatcacgatgcccatgcacgctgtgggccaaaatcatccatgcaactgttcgtttatcaagactaaatctctataacgagcaaaaagtgcaaatatctgtcactttttacctccttttttctaatcattagacattagtgttcgttttgctctagaaattatcattgaatgccaaaacatgtcaggggtatatttgtccattcaccacaaatttaacaccgctaccattaattaacaaagtaggggcaggcggctacttcatttcaaaaaagcaggggcaaaatcacaaaccctaaaaagtagggataaaatcacaattgaatagtaaagcaaggatagaaacacatttggccctaatataaattagctattattttagaaaaaaagttacgtccaaattttacgtggtctattcgtactaggatgacaactaaataacacgtgatttttcgatcgtgctaacataaatttaataactattatttttgaaaaaaaaaagttaattctggatttcatccggtctatatggaccgggacgataactaaataacacttggttttaaggtcgtaacaaattccctttttaatcgatatatgtacgtgcccgatccatttttttgttctctccatttgctgcttgctgcctgccggttgctctttgcttgctgctgccctgcctcctactgcctgtcattccctgtctgcgctccttgcccctgactgcttccgtcgcccggatgccctgcaatgctgctgccgcttcctgcactgctgctgccgcgcctgtagcagttgcgcccgggtgccctgaagccacgacccttgactgctccgcatccccttgccgctgcgcgcctctggccgagccaccagtggccggcgcccttctgcggctccgccccttcccacgcacagagacgtcaatcgtggagttggggaatttccaaagacctaggttttgggtgcgcgggaagggcagatggaggaaaggaggtcggaaaatcgaatcaaatcacattcgcggtggctatcagcggcggcggtagcgcatgggacgaaggaaagcgaacggaattctctcgggccggatctgaccgaataagagaacgcgaaaatacaaaaaatactccatgcaaaaagatagaaagacaaatttacccttttcaatttatactgtaaactaatctaaaggaaggtcggatgaatcgacaccgttacatcatttactaatctaaaaggaagatcggatgaatctacaccgttagatcgtttaaactacaagtatatactttgcatgtaccgtaaaaatcctctacatttttaaggtcaaaaagggtgccatacatgtcaactaccccaccatcaattctctacttttttggaagaaaatatgacagtataaatgtgaataccaaatacatacataaattaaaggggtgatatatacattaatgaaggtaataatgctttaatgctaattttctttacttaaaatcacattgcaacgcacgagctagttaattaatatatgcatatatttctctctctccatattatactgtacaatgtttttccattctctatattaattaaaaatgcatacaatttcaagtttatatatagttccgtacagagaactttacagtttaaactagtattaaaatgaaggtcaaaaaatgacagcaatggcacgtggaacacgggtggctcgtgtgctgaccatcgagatccagtgaccagcagtgaccaattcgacgaggagtactcttggatcaacgccatgatctcgaacgccatcgacggcatcagaagccacggtcgaaggaaagcccatttcttgaacataacgtacatgaccgaactgaggagggatggccacccgtcgcggaaccgggagcctgggacgccgcaggacgcgcccgaggactgcagccactggtgtctgccgggcgtgcccgacacatggaatgaggtcctgtatgcacacctcatgtcaatgggatatgatatcaggatacactagtacaaaaccctcgcagggaccggctgtatatgtgctatgtgcctttttccacctccacatgataaaaaaaatataaaactagcatatttaaacactatagttgtcggctcttaaaaaaactggtagtaatattgggtataattttatgctttctaaatgtttcttgaaactaaatgatttgaaatgatgatgagattggtatatgtgatatgattgccttacttccccttatgttgtaagggaatgatgtctatctatttatgttgatatcatgccatgattaatatgctttatatattgcttaaatgatttgcttaaattacgttgcaaatagtttgtgaactaaaatttgctttatgctgaaaattgagactacaaatagccttccattgacttagagctttcatgtatgtaagtttgatggtgctcttgccagtacattaatttgattaatgtactgagtcttgccatgtgttgttttatgttttgcaggattagacttagtttaatttgagtgatgcggttttcgactgcttcttataggatttgaacttaatgggggtaaacccctagtcggtgtgcttaaggattgggtagtcaagcttccgttgttctcttatatatttatttggccggtcggcctatgtaactattaagttgatgtaagtctcttagtccctttcgtcttaaatgtgtttgctatatatgtccatgcttaagatgaaagtgtgaatctagtgcacatcttgggaattagattcacatgagttaagaatatttgagatgttgtagatctttagccattttgtcaagtctcctgattgtgtaacacatctggtcgccgctttcgagtggtttgacgggcatatctcacgccgaagttgactggcaggctaaaggcccagcaatgtcttcaatattcttctctcgatgtgtcggatatttcattatgtttgtttgatgacttgagttattcacttcatctcttaaatataatgggaggtccggagagcctacgaaaactgccgccgcagctaagccgctgccgagccaagtcgagccgagccgccgctttaacccgttgctcgatagctgagttgcctagccatagatgcaaacctaggttcctactggcctaccgtttgtcgtaccggggctttaccgtgaatcgtgtctagcccaccagtttagcctcagccgttgttgagtcgttcgctcgtttattcgaacgaggtgtccccgtgtttcgttcgtccgtccgtgttgagtcgtcctttagtttagagccgttcaaagccacaggttccgtttgcctatttcggttgaccatttgggtgatcccgtgtcacgtagaattgactcgttgagtcggtatctcatgaggcttgcttgccagtaaagtgttaagaatccattaaaattggtttcttttgctgtttcagtagctctttagcttgtatttattgtgtgccttgtttgtcgcttagactctggcagttccgacgctccaatttattttgaagtggttgaagaggttctatcagctcaagggcaaggcaagtcatacagatatcattgatcatattgagcctatctgcaaaacccctgcttttctcttaaaattgcattattttataatgtcatgtgggaaggaatttacccgtactcagccttatgcttaccctgattcattgatagcctgggataataatttgattgtaggttgggctccgtgtgctgtggttgttgcttgaacaaaacactcggctgaccgtgagccgatgttgacgcacccagcttcccaaaagccgttgtaactataggctgttgctctggggttattccagatgcaggttgatgcttaccaccattattagtgctgatggtcctatattgtggaaaaacaccctcaggaaggaaaatcgatcccttagcttgatactcacttgatcatattagacaagcactcctgattggttgatcaaagcatgataaacagcatagtcaatccgatcttgcatattattgagccctttaggatctccttatggtttctcatttttaggcttggcatctttaggagaactcgtttctgggtcgtcatcagatagcatcgctatcttatacctctgaattactgtccctgatctagttaacacaaatgagtgcaaaaacttattttgcatttggttcatcatctgctcgaggtccaccttttgttctgctgtcaacttgtctagcgttatcgggacgatgttgtccgggtcaacattagttgacttgatatccaccatgatgaagatatgtcgaagtcggtcccactgagcatgccaaaagcatgttgatgcgaaaaacacacactggtctgagagattgctttactctagtgcaggtcctaaattttgcttttgggttcaaggcgtgccagttggtttgatcctgcaaccaacaagaaacaaaggagccaaagttagatccataaacgatagccgatcggctggattgctgatgacgtatcgttcatatcaggctgatgcgatatggatcagattggcagtgaagtatatggcaaagaaaagattaaacctacgctattgcccgtatatatcagtaatatatgagata

SEQ ID NO: 26715 - DNA, 5596 bp, Oryza sativa
ttcctgcagccctccgtccattttgcgccgttaaatacattgttcatcctataattaacggcgcggaatggacggaaccctaatggcgatggcatttttgggacaaagttgtttgtatgatggcatttcttggaactcacacttatcaatggcatttctgggatttggatgcttgtcaatggcatttctttgattatcttataatatataatgtaggcttcgaaatacgcttaaacctagtgattcggatagatcggacaacatgccgagatagtataaaccacttatatctaaaggtactttgaagcaaagattatatatattcctagcaaggccttaggcaaatctaacatgtattggctactgttctgatactaatttatactaagataccagtttagattaaaagcaaaatttgctacaggacataaaaaacgtgtaattagctgggagacaccgcaagaacggaaatatgctatagggcatcgcaaaatattggtaattagctgctggacacccgcgggattattttattatatccggagaaattggagagagaaaaaactgtgtaagtacggttctacccttcgaatttttttcttttttttctctatccttctctgttccttcttttccttgttcttttctctctcattctctctctgctcttttcttcaagcaagcccgagggagagggagagcatcagctacagcgcggcgaggcgcgggcctggtgcggcacctcggctgggacggcactgcgctgtcacgcacagggctaccacggtatgcacatgcacgctgcctccaaacctagctcaagcatcagtagcagcgggccaacgacagcagtagcacggtgggttagtgggtgtcgctttcagcacctccatgttctcacttgacatggccacacccatctgctccctgccacgccagcaccacgcgaccgacctcgcttgggcgcccatcctcatcgccgctccgcccgcgggacttcaccctcgtccaccacgtcggcgtcggggacatcgcttgaaggagaatgcgtcggctcgtcgtcctcgtgcgagtacgccatgaaggtggtggactgccgtgcgctctccaagaagggcaagctgggccacgccgtcgcggagaagcgcgttcttgtaagttcaagtgccttaatttggtttggtgattaatgacaaatctaataatatgagactaacgtttttatgagcttttctttgactagtctcgtttcgatatgaaaataaaaatgatgagagttgtcaactaggttatttcccgatgatgagatgtggtagatatgcattctttggtgatggaccttaatcatgataaggataaaatgcatggagataaaacgttatgtaccacttcttatctcctactttttgataggttcatatatatgatttccatgttattgttatataagtgtgagactaacgtttactcgagtcgtatcttatttagtctcatttacattaagaacatggagatcatgaatgtatgtgttttatgttggtctacatcattactacatatgctttctctatgtgtacaggataaacccccattggtcattctctaattatgcatacacttgcatctcttgtatatttatttgtatgcatatatttagggggagcaaatcctatacatttattgtgcatgttgtagatccatgttgttcacctattatttatattggatctttgcatttaagcttgcatgtgagtatatgtcaattgtggtgttaatgaataatgaatactcaacaaacatattcatatctttcatatgcaactggttggtcatcaagtgcaagatgacaaccgatttgttgggactaatgttctcctttgagctgtgcaaaggaataggtcccaccgtgatgaggctaatagatgacaccatggtttgatgatcaccaagccaaggacatcgccatgttgacaagaatgaagtcaagattgtgatgagatgaaagtcttgacaaaggatggtcaagacctaggcataaacaagattcaactgaatagtcacatgtgttgatcttggttcaagcattgaccccaagttggatggcacaaggcaaaggtataatcgagcgaagatgttttcttagtctttttcccggtcttcgtgtttggtgtagaccggatttgctagataggcgccatactatcaagaggggtctatgaagcgagcacgtggatgatcttgtgccatattagttcatatgaatgtaggagcatttggtgggcttgtctagccatgtgtgatgagttttctcatgtcctaaacaaagagagaagtgagcaagtccaataggagcgagtgacatcttgtgggtatgtctggtggatatcctttggagtgtgagccctttatccttgacttaagttgtgtttcttgatgtatttttcatgggttggatagctccttgaataatctttccatagagtccaagaacatcaaattccgagatccaagtcaagagatatcgtcattttactgtcggtgggtcgtgctgaaaatcggtcggcggtcagaccgaccttgtgtagccggtcagacctcccgaaggccccgaaagcccgccaacggctagtttttttgtgcgttggactgagggccggtctgaccgggtttagaagggcggttagaccggcaagcacgtcctaaaaggtgttttagcctctaacggctagttttggtggttgggggtatatatacccactccccagcagcaagggtgaagttttggcactccattgcattatcttgaacccttgcaagagctctcacacccttgtgcacttagtttatctagtgaggtgttagagagtaagttaagccaatccaagtgcattgcttcattgttatagctagtgtggcacttggtcatcctcggcaagcatcctagacttgttactcttggaggttgccgcctcctagacggcttgtggaggtgttgcccggtgacctctcaaaggagattgtggaggaggcccggtgccatttgtgagtggtttggagttcaccaccttcggagtgaaggaagaactaccctagtgatcgaggcttgggtagtcctctccgtgggccggctcccaccatgcccaccccttgacgaagggggcgtgcggtggcttcgttgttgagcggtggagttgggctcgcctcaacggggattaggaatctggcgagtttccgaacctcgatgaaaaattccttgtctcttgtctcatttatttgttgcatttacatttgtgcaatttacatccatagagacatatttgagcccatatcacctaggtttgcaaaacttaacttagttgcttagttaaccttgcaccttaccttgcttagcaacttaggttagttttgtttaagtgccattaagttttaaaaccgcctattcacccccctctagtcggcctccttgatcctacaagtggtatcagagcttggtttctctttttatggacttaaccgttccgagagaaaaggatggcttctagagatatagtccacccgggtggtgaccctcttatatttgatagcacaaattatgcacaatggagaattcacatgatttctcattttagggccatgagcccaaaaatatggtggattgtagatgtgggcttttctcatgctttggatgaacgtgctcccacaagtgggcaagagaaatgcctacatctcgatgctcaagctactaatgctatattttgtgctttgagtgatgacatttttagtgaagtatgcaatctcaagagtgcacatgctatgtgggtaaagcttaaagaaaaatatgaaatgcccacacttgttgagaatggttgcacataaggacggatgtcgggtgaagacttcacctcctcaagagatgatgaggagctcccaacaccattcacatcatctcattacttaatggcaaatggtaagaatgaggtaaataaagattctcttgatattactattgaaagtagtaatggtgatgatgatgatgatgatgatggtgatgagccttcatatgatgaagttttggacatgcttagggaggctagtaaatacattgccaaagagaagaagaaaaattaaattttagagaaaactcttctctctttgaaagactcaaatgtggagctaataaattcttataaggaactttgtgattcttataagaacataaaagaagcttatgagtctcttctcattggcaatgcatttagtaagccaaaggtggacataggtatcatatgcaatttaattgatgatgatatgccatgtgtagctagctcatgcattacatctaagactaatatgtccacctcttgtgatgacttgcaagacataccttatagctcaaacatagatgaaaactcttgttcttcctcctctatgtatgttgttgctaaccttgtagaggaaaacaagcaattacaagccaaagtcaaagatttaaaagaagacttggatagaaactacataaggaagaacacacttgacgaaatcctaagcaagcaaaagagctcaaatgacaagtgtggacttggcttccaccacaaggagaatgctaagaagacaaggcacatgcctagatatacaaggaagcatgcatacttaagaaaggatggaaagaaaaatgtgagtaagaaccatcctcacattacatgttgtggttgtcatgagaagggacactttgcctcgttgtgccccaaaatgaaggatgaaaagtacaactccaaattgagacaaactggcaagaagacaagtcatagaggtcaaagcctaacttgctacaattgccgcaaaaagggatatattggtaaaaattgtctcataggtaatacttctaagcctaatattatttttgatgattatgtgcttaggaaaaataggcaaggcaatgtgtttgccagttatgttggtttacctagacttgcacctagaaggaggaccatttgggtgccccgtattttggtaactaacattgatggacccaattttgttggggaccaaaatgtgccaaaatgagaatataggtacatgagaggcattgaagttttggcctatgctagaaaatgtgattctcaccaagttcaagaattggagccaataatgaggatgaagaattcacatcaagaaccaatgccatctcggtaacatgcttttggtttgtaatttttttatatagccttatgtatgttgcattgcattctcatagctctttccaaaattaaatttccctctggtatgaaaatcgtcatatatgcatgttaagcataataaatgtggcatatgaagctataggtttggtcataatcacacatcatgtttgcctcatattgcttttgtgcttattgtcaatcatttttttatcttagttcgatcttgagtttattttcctatctttgttgagatgaagagaatatcccattaaggaaaagtattgcatttctggcaaaggcactacaattctaagaatgtgaccaaagtgatcaaagtgcaagaaaggttttcaaaaggtccattttgaccaaaagtcaattttttgagagggctgcag

SEQ ID NO: 26716 - DNA, 5726 bp, Oryza sativa
aataattcagaacaggcccactcaacttttcactaaaatatgcaacaggttttccttcttgtagcaaaacaccacccaatccaatcccactagcatcacattcaagttcaaaagtcttattaaaatcgggaagttggaggagaggtgcgtgggtcaacttatctttcaacatgtggaaggcgttctcttgtgatgtgccccaagtgaaaggcactcccttctttgtaagcacattcaatggtgcagcaatggtgctgaaatcctgcacaaagcggcgatagaaccccgcgagtcctagaaagctccgcacttgtgagaccgttttaggagtcggccaactctgaattgcttcaaccttggcttgatcaacctcaatcccctgcggagttacaacatagccaagaaaagaaactcgatctgtgcaaaaggtgcacttctcaaggttaccaaataaacgtgcatcacgaagagcattaaaaacagcacgtaaatgattaaaatgttcacccatagacttgctgtaaatcaagatatcatcaaagtagaccaccacaaattttccaatgaaaggacgcaaaacctcattcatcaacctcatgaaagtgctgggtgcattagttaaaccaaaaggcatcactaaccactcatacaacccaaacttcgttttaaatgctgttttccattcatcacccaacttcatacgaatctggtggtaaccactacgcaaatcaactttggagaacacaatagagccactcaattcatcaagcatatcatctaacctaggaataggatgacgatatcgaatggtaatgttattaatagctctacaatcaacacacatacgccatgaaccatctttctttggtaccaaaattaccggaaccgcacatggactaagagactcgcgtacataccctttatcaagcaactcatgaactgacgctgaatctccttggtttcctcagggtttgttcggtatggcgcacggttcggtagggaagcacctgggatcaagtcgatttgatgctcaatgccgcgcaccggtggcagccccggtggcacttccttgggaaacacatcagagtactcctgcaaaatgttagcaacagcagggggcaaagaatgctgcatatcgtgaagtgaaatcaaagcatctttgcataccaaagcataggcaactgaaggtgatgcaatcaactcattaatatcagatttagtagcaagtaagcatttgggtttcaaattgattgtctcaggtttcttgccatcagattgggcttttttatcactctcacatttggatttggcagccttagcaacatcatcacgcaaaatatcttcaggagacatggaatgcaacacaattttcttatcatggtacagaaaagagtactggttggacctaccatgatgcatagaatccctatcaaattgccatggtctacctagcagaatattacatgcttgcatgggcacaacatcacattcaacaacatcatggtaatttccaattgcaaaattaatgtgcaccagttttgttaccttcgccttaccactgttgttcagccattggatgtagtatggatgtgggtgcggttttgtgctaagtgcaagcttctccaccatctcgctgctagccaagttgttgcagctacctccatccatgatcatgcggcaacaacgctctttgacgacacactttgtttggaacaacgtgtgtcgctgattttgctccgccttctccatttgtgcgctaaggacacgctgcacaatgaggctctcatagtgatccgcaaatgcagccccaatgtgctcttccggtggctcattatctgcatggtcagccgcaagcaaagcaagtgtatcatcatcgaaatcactagcagaggagtactcaccatcgtttttgactaccaaaactcgcttgctagggcagtcacgctgcacatgcccaaagcccttgcaacggtggcactgaacatctctcattcggcctgtggatgccattgaagaagcactcggtgcgggctgagcagcctttgtcgctgacttgtcactagatggaggaggtgctgctcgactggttgtgggtgtggaagatggagaagcagtacggccggccggaggagtggtgcgtgtctgccatgatgaagttttacctgcagaaaaattagccttggcactagcacgtcgtccctgcacttccctttcagccttacaagcaagatgaaacaatcgggtcatattagtgtaatctttatagtctacgatgtcataaatctcgcggtttaacccacccaaaaatctagccatggcagcgtcctcagtttcctctaaattacaacgaagcaagcccatttgtaactcctgataatattcctctacacttttcgcaccctgtctcaattgttgcaacctattcagcaagtcacgtgcatagtaagaaggaacaaatctagcccgcatgacccgtttcaaagcatcccaagtttgtggcatgttattaggatttttcttgccatgttctatccaccaaaccgaagcaaaatcggtgaactcactcgtagcagctctaactctagtgctctcaggaaactcatggcatgcaaatttttggtcaacagcaatctcccaagagaggtacgcatcaggatcatattttccatcaaaaggaggaatcttaaatttaattttagaaaaagcatcatcattgttgcgtacctcgcgtcggcggcgaccacccatacctcgtcgattgttgtgtagccgtcgacgatctcgagcatctcgatcatcttgttcagtgtcagcaatatattcatcctccaaattatcctcgacgtactctccgtcaatgtcatcatcattacccccaccattgcctccagcattgagagcatcaaaatgcctcacaagagcagcaaggctagtgtcaatgcgggcgaccgctgtctccagccctgtaagcttagtgttggtggagatctgcgtggactccaattgtccaatcttctcatttgtcacctgcaaatctgtatcaagtccttctgtgtgctgcttcacttgccttgtaaagtattggatgatgcctttggtgcgtggggaatgagatgcaccctcctcatctttatcctctggacctgccatggtttagaaatgaaggacaacaaaacaatggaggatgtaatgtaagccctacacaactattgggatgtagcttttgcaagacgctcactctcacttcactcgcagcttgtctcacaagctcttaccagttcttaccttgcccacaggagggggacagcaacaccacaagttagcaaccgtggaacgaggtgtatcggtgctgtagcaacaagacctgtcaagctgtagtcgggtttgtggtggagctgttggtgggctgaaagcaatgctcaagagaaaactagaaaccacgttagccaaagcaaattgaataatcgctcaagggtatagtgtacagtgctggtcctaggctagtcgaagtagagacgcgagcctaaccacaaaggacgccacaaaacacaaacccaaacagcaacgaaaacaagaaccggtggtggaaggtggtgacaaaagggggaatggtgtggtgtgctcgctgtatcctcttttttttttttttttttttttttttgctctctctagggctgagaagagaggcaccacctttttttttaatattttttttttgatatttttttcacaaccaggagcacactagaaccaaccacagaaaatcttatctcaaacggacaaagtatgaagcttgtagaattttttcaaagttctatgcgaataggtcccgaagcttctcgccacaaaaacagaattttgcaagaggaatttggcgattttaaatttgccgaacccggcgaagcaggggagaaacggatgtaactttttttttagatgtccgtggatatattataagcctaatttcgagtccgtatgaaaaagatatgactgttttaaggaaggtcactcgaatcagggctctatttcctttctagtggcggcaggatacaaggcaactcacaaaaactatcggcaacagatcaaacacaaatagaaagtgatttggtgggtgactgcgacggtggtgacggtggtgatgacggcaaaattgatgaaggtggcgatgtgcggtggtggcaagaactcgaaactctaatcgcctaacactaagaccagcaaattaacacaaccgatgcaatcgaaaactcaacaagccttaactaagcagtactagtgaaaaggcacaatggtctataggatcacggaaaaactaatctactatttttttttgttggtcttttctggactataggaaaaaaaaataataatgacgaagggaagggtaaattctctcaccgatgaaccacgctctgataccacctgatgcgaacccgctagggtttgtggcccgatctttcgatgagaggtaagggataactcgattagatgaagtcgacgttcacggcccgactacaactgtccaaagacgctgcgccttagcaaccgatacaccgtctccaatggtcgccgcgaacttgtggtgcgcgtcaacccggccacgagggcactcgtcctgcaagcaatcgaagaacaagcaagaacaagtaggacaagcactgaaattgctagataaagatgaaagtttcactatcaaacacaatatggtggggttccgattacaggcagacgggcggtttagccaacacgcgcgctgcgagccggtagcaagaagctaactctatcatcaaaacccgcctgttcttggcggcgactagaggtataaaaagaggggaagaacgaccatagggtcgtgctccaaccctaggacgcgcccctaatgggcccaacatggatacacagcccattgggccaaaagaggtgacgcagcaccatggacagaaaatagtcgggagtaaaatgacaattgcggccgctccagaacagatatggacatgtggctggatccatttgaaagtagacttgataagctttccatgaagtacttgcacgcccaaatcggagttcgcatgaagtcgtggcggccgtcagaagttggcgctgccctgcagtccgaatccaccccgcgcgaatcctcttccctttggatcctctccatcgttcctgagtaaaacacgagtgcacgcgtctccgaggtataaagacgaggaatatgaactcaagaaagaactcacctgataatttagttgacgtgcacgagcgcgggtaataggaccatcatgctgtatatggggggacgtggatgtatcgatggtgttgatgtcctcatcatcctccccttcttgcatttgagtcgtcctcgactcaagctcatcttcttctcccaaatacggcttcaaatctgcaacgttaaatgtgggactaaccccaaaatctgcaggcaaatcaatcttatatgcattctcattaatctttgctaacactttaaatggtccatcagctctaggcatcaatttagactttctcaaatcaggaaatcgttcttttcgcaaatgcaaccaaaccaaatctccaggttcaaaagtcaattcccttctacctttgtcaccagcaaacttatacttagcattcatgcgctctatgttttctttagttgtctcatgcagttttaacatcaactcagcacgtcgcttagcatcaaaattcagtttctcagaagatggtaa

SEQ ID NO: 26717 - DNA, 2157 bp, Oryza sativa
gtggcggccgtcagaagttggcgctgccctgcagtccgaatccaccccgcgcgaatcctcttccctttggatcctctccatcgttcctgagtaaaacacgagtgcacgcgtctccgaggtataaagacgaggaatatgaactcaagaaagaactcacctgataatttagttgacgtgcacgagcgcgggtaataggaccatcatgctgtatatggggggacgtggatgtatcgatggtgttgatgtcctcatcaaagtacccgcgcgattcacgaagtgagttattgccacgaacgcacccaatacactccaatatgtccaaaattcatgtttggatgctttttgaacttattcaatccggtcaaaaacatcgcacccgtggggtctcaacatatgccaatattggtattaattgacaaaagtacccgcgcgaatcacgaagtgagtttttgccacgaacgcacccaatacactccaatatgtccaaaattcatgttttggtgctttttgagctttttctttccggtcaaaaacatcgcacccgtggtgatgttaccatggctactacggatacatccgttgctcacatcatggatgaacaacaagatatcaagttcgagtcctccaagtgccaaaatccaattcggccacctgctacactgctgacttcaaacggccgccgaagctccatacgacctccgttttcagcccgtgagtacttgatggaaagctctcggagtcctctttccaatgcatcaagcctcattgccaaattccatctcagtcggcagcaactgaagaaacaaggtgctgtgacacctgtaatgggcctatgggcttgtaacctcatttgggaccccggcccaggtggggcccatgtggggtgcgccccaagcttgtggagcacgaccctaggcacccctaggtcgtcctcccacccctatatatagctagttaccccttcagggtttcttgggttttgtttagatgaaagtttagccattgctacttcgcttgcagcgcgcgtgtcggctagaccgtccgtctgcttgtattcgaaaccccaacttatcatttgtattaaattcctatttgcaatatcagattgcttttatcttattcttgcttgtttcttcgatttgcttgcaggaatagggttgatctgcaccggcaagatcaacaacccacggagaggtgtatcgatcgctaaggcgccacacaacgtctcgtacggttgtagtcggatcgtcaacgtttctcccaaatcgtagttatcacaactcaccgaaagatcgggccaacaatagccttgagtgtcgagaggaactcaaggttcatcacgtgggctctcaacatatgccaatattggcattaattgacaaaagtacccgcgcgaatcacgaagtgagtttttaccacgaacgcacccaatacactccaatatgtccaaaattcatgtttggatgctttttgaacttattcaatccggtcaaaaacaacgcacccgtgggatctcaacatatgccaatattggtattaattgacaaaagtacccgcgcgaatgacgaagtgagtttttgccacgaacgcacccaatacactccaataagtccaaaattcatgttttggcgctttttgaactttttcattccggtcaaaaacatcgcacccgtggggctcaatatatgccaatattggcattaattgacaaaagtacccgcgcgaatcacaaagtgagtttttgccacgaacgcacccaatacactccaatatgtccaaaattcatgtttggatgctttttgaacttattcaatccggtcaaaaatatcgcacccgtggggtctcaacatatgccaatattggtattaattgacaaaagtacccgcgcgaatcacgatgtgagtttttgccacgaacgcacccaatacactccaatatgtccaaaattcatgtttggatgctttttgaacttattcaatccggtcaaaaatatcgcacccgtggggtcttaacatatgccaatattggtactaattgacaagagtacccgcgcgattcacgaagtgagtttttgccacgaacgcacccaatacactccaatatgtccaaaattcatgtttggatgctttttgaacttattcaatccggtcaaaaata

SEQ ID NO: 26718 - DNA, 7054 bp, Oryza sativa
tgccaatattggtattaatgaacaaagcaatataagagtacccgcgcgaatcacgaagtgagtttttgccacgaacgcacccaatacactccaatatgtccaaaattcatgtttggatgctttttgaacttattcaatccggtcaaaaacatcgcacccgtggggtctcaacatatgccaatatcggtattaattgacaaaagtacccgcgcgattcacgaagtgagtttttgccacgaacgcacccaatacactccaatatgtccaaaattcaagttttggcgctttttgaactttttcattccggtcaaaaacatcgcacccgtggggctcaatatatgccaatattggcattaattgacaaaagtacccgcgcgaatcacgaagtgagtttttgccacgaacgcacccaatacactccaatatgtccaaaattcatgtttggatgctttttgaacttattcaatccggtcaaaaatatcgcacccgtggggtctcaacatatgccaatattggtattaattgacaaaagtacccgcgcgattcacgaagtgagtttttgccacgaacgcacccaatacactccaatatgtccaaaattcatgttttgatgctttttgagctttttcattccggtcaaaaacatcgcacccgtgggggctcaatatacgccaatattggcattaattgacaaaagtacctcgcgcgaatcacgaagtgaccctttgccacgaacgcacccaatacactccaatatgtccaaaattcatgggggccctgggtgagattctaagctcctagtctgtggaaagttcgcgagaatggaaaaagcacaagacacgggcaatgtatacaggttcgggccgctgagaagcgtaataccctactcctgtgttctggtggatctgtgtatgaagaagctacaaagagctggagagccagagagctcttactctagaaaccctcttctcccctcttttcctctcgtgggatctactctccagatcctcctccccttttcgccccctctctaagtgggcaaggtcctccttttatatctcaaggggataccacatgcaccacttctccctctctctctttttgggtgggggcccatcctatctatagtaaaacttggcttgccttctcttggaagctgaaacactgcctgtttttgagtgtggccacgcgtcctcgttcgtctgacctcggggatcaccctgtcatctcttcataaatgggcggagatttgcaacggctgctgcccgagtgacccttctgatgggacggcccatacctacctccactccgccggaagcaggtgcaacgtgggaacacggttgtcttccggcgacataaccagtgtcagaccagtcacagaccggtcacctttgtccaccacgtgtcagtttagcaatctgcatgttcgcccttcttcatacaacgtcttgcttataatggttgggataaagcctggcatatatctgaccaggaccaacgtgccatctccaggagctagcacgctggctccggctagggacgagtgcctagagactctcatcctgacgggacggggcgaggcgtgtgtcagatcgcctgttgccacctaacccgcaatctgaccgatctgtgaccggtcacagaccggataaacgagcgtgccatactgcgctacatgtggcgtgacgcgctcgtccaaaccgcaataaatgcggttaggtgagccccgctatgctcacctaccccatatacgcggcgcaaaacccacaaggggtcggggcgcctcggccctcggggccgagacgggagcggtccgacccctcggggagacaaagagaagggcggccgtatcaccctcgggcccgacccccccgagggggttaggccacgtgggtgatcgtgtctgcctcaagtctctaagtcatgatactcccggtcccatgtcaccgacagtagcccccggcgttatgccagggcgatggccctcctcgagggaagcggttgggcgtgacgccacttcctaaggcctggtgacaggtggggccggtctccacagttggaaagaaaaccaatcggtcgcaaatcacgcatatcggcattggtaactcgactgtcaataatgatcggtctcttcaagactgccacattactcacaaaaatcgggacaagccggttcgtttttcctggagatatggtgatggcgcttcggtcggcgagcgtaattaacgcgcgcacgatatgttccatctcgactgccacagccgcatatccacctcatgcaccgcaaacgggcgaatgggattagtggaagcgtgggcgcgagaaacgagggggcgagttagtgggcgcgagaaacgaggagccgggaacagcgttggcaagggtataaagtcgccgaggaagagatttgcttccttcctctcgccattattccccttgtcttcgccgcttgcgccctaactccttgtttcctgtgccctaccttcgccacacgcgctcgctctcaaacatctcttcttccggcgtcatggcacggggctccgctccgcttgacggtagcgtgctgccgccttcccgcatcgtgagcgagagacaggccgggctgccgcgccacttcatgccggaatctgccaccggccgggagataatctcgctgggcgagggacgcccggcgccacactacccggggcggtccgtcttcttcctccctttcgcaatggcagggctggttccgccattttcttctttcttcatggatgttctggagttttacgatctccagatggcgcacctcacccctaacgcggtagtgacattggccatcttcgcgcgcgcggatccgggatgccgccgatcatatcgtccacagcttcgagggttcggcccctcggctcgcgttcgccctcgactccgacgaggagggcgatgacggcggtgtgggcgacagtggcgacgaggctggcgacccgggcgcatcggagtgagcccccaggcccccgccaatcttcagtttttttcttcttttctttcttccaaggccttcgggcctcctttttgtatagattaacttaatctgcaatcaaaataaagaaatttctgtgtcaatttcattttgctatgtgtatgagatgaggatgatctgtgccgtggtccttttatgtcttaacttgattaagggctcgtgcccaggtcccagtcctcaaaaggcgcgggtcggggctagtgcctggggagatccacgtgtcaagactggccaggccgggagcgtggtgaccgagggttatgggtgacccgattgtgggtttttgccgattctcccccggagttcaccacgccccggggcacggctcggttctgggccccttttggcgattttagccgacccgagcccccgagggcaggattgagcacaagtgacctatttcaagtcaagattcttcaaaaggaaacaacagcacagatacagcctttaggaaatcgaaaatgcttttattgaaatacagatagaagaaaaaatatgcatatgtggtagcccccggccaaccctgcacgcctgaagggggtgcggggttggcccgagcccgaaacctgacacccgaactccattagggatagaagcgacgaaggtgttcgatgttccacgggttaggcagctctatgccgtcgcccgtggccagccgaacggagcccggccgggggacgccgatcactcgatacggaccctcccacattggtgagagcttgctcaatccagcacgcgtttggacgcggcgtaggacgaggtcgtcgacgcagagtgatcgagcccggacgtggcgctgatggtagcgccgcaggctctgctggtagcgtgcggctcggagggccgcgcgccgccttcgctcttccaagtagtcgaggtcatctctgcgaagctgatcttgatcagcctcgcagtacatggtggcccgaggggacttcagggtgagctcggatgggagaaccgcctccgcgccgtagacgaggaagaaaggcgtttccccggttgctcggcttggtgtggttcggtttgcccagagcaccgctggcaactcctcgatccacgaatcgccgtgcttcttgaggatgttgaaggtcttggttttaaggcccttgaggatttccgcattggcgcgctccacttggccattgcttctcgggtgggcgggtgaggcgaagcagagtttgatgcccatgtcttcgcagtagtcaccgaaaagctcactagtgaattgggtgccgttatccgtaataatacggttaggcaccccaaaccgggctgtgatgcccttaatgaatttaagtgcggagtgcttatcgatcttgacgaccggataagcctcgggccacttagtgaacttgtcgatcgcgacatacagatactcaaacccgcccggggcccgcctaaacggtcccaggatatcgagcccccagccagcaaacggccatgaaagtggtatgatctacagggcctggccgggctaatgaatttgcttggcgtggaactgacacgctatgcatcgccggaccaggtagaccgcatcattgagagctgttggccaataaaaaccttgacgaaaggctttgccaaccaaggtgcgcgaggcggagtgggctccgcattagtcttcatggatatcagcaagaagctcgacgccttgttcccgaggaatgcacttcaggaggattccgttagccgcgcgccgatagagggtcccttctatcagcacgtagcgtttgaagatgcgctggacgcgttcacttccttcgcggtcctcgggtagagtcttatctgtgaggtatgcttggatctcaacgatccaagcaatcaatctaagggagctgggagcgctcccctcgggtcccgaggcctggactccgacgggcctcgggggccggtcaggcgcgtccgtctcccctaaggggtcaggtcgcgccgacggctgggcaagcctttcttcaaaggcgcccggtggggtctgggctcgcgaggaagcgagccgtgagagttcgtcggcaatcgtgttatcccgtctgggcacgtgccgaagctctatcccgtcgaaatgcgctccatacgccgtacttgccgtacgtaagcatccatctgcgggtcagagcaccggtattccttacagacctggttaacaaccagctgggagtcgcctaacaccaggaggcggcggatccccagtccagctgccaccctgagtcccgcaaggagtccctcgtactctgccatattattggtcgcccgaaagtcaaggcgaaccaggtatctgaggacgtctccgctcggcgaggtcaatgtgacccccgcaccggcgccctgaagagacagggagccgtcgaactgcatcacccagtgggcggtgtgaggcagctgcgaggggcccgagctggcctcggggactgagacgggctcgggagccggggtccactctgccacaaaattggcgagggcctggctcttgatagcgtgacgtggttcaaagtgcaaatcgaactcagaaagttcaattgcccatttcaccacccgtcctgtaccctctcgattatgcaagatttgggcgagggggtaagacgtaaccaccgtgacccgatgcgcctggaaataatggcgcagtttcctcgaagtcatcagaatagcgtaaagcatcttctgggcctgagggtatcgggtcttggcgtcccgaagggcctcactaacaaagtagacgggccgctgcacctttcggtggggccgattttcttcgccaggggccgcatccctggggcgctcttcgtccaagcggcctcgcggggcgcacttgtcttctgtgccgacgacctcggggtcggaggacgacaggtgcggccttcccacagtggcctcagggccgtcctgggggtcgggggctcctggcgtcgtcggacaagcgggcaaagggtcaaccccggtcgtcaggagccttaggccaccgttcggctcgggggcctcttctccctcctctctcccgggtcgagtcggcacagggttaacctcggggtcagagggcgataggtgcggccttcccgcagtggccctcgggccatcctgggggtcgggggcacctggcaccgtctgacaagcgggcagagggccagctccggtcgtcgggggccttgggccaccgttcggctcgggagcctctcctccctgctctctcccgggccaagccaacacagagtggggatgcgcggaatgagggttgtcctcatcgcgctccacaactaacgccgcactaactacctgcggggtcgccgctaagtagagtagcaagggttcacctggctccggggcgaccagaactgggggagagctaagatacgccttcaactgagtgagggcacgttcagcttccttcgtccaggtaaacggcccggagcgtttgaggagcttaaataagggtagcgccttctctcccagcctcgatatgaaccgacttagggcggccatgcaaccggtgacgcattgcacatccctaagcttgctgggggggcgcatccgttctatagctcgtatcttctcggggttggcctcaatgcctcgggcagagaccaagaacccgagaagcttgcccgcaggtacaccgaacacgcacttatcggggttcagctttatgcgggtggagcggagactctcgaaagtttccgccagatctgaaagtaaagtttctcggtcgcgcgtcttcacaaccaagtcatcgacataagcctcaacattacgtcctatttggctacccaaagaaattcgagtagtacgttgaaaagtaggacctgcattctttaacccgaatggcattgtcgtataacaataagttcctatgggggtaatgaacgcagttttttcctcatcctccctagccatgcgaatctgatggtaaccagagtatgcatctagaaaacacaaaaggtcgcaccccgctgtggagtcgacaatctgatctatgcgaggaagggggtaagggtccttaggacatgccttgttaaggtcggtgtagtcgatgcacatccg

SEQ ID NO: 26719 - DNA, 23257 bp, Oryza sativa
aacctttgcttgtcccgagcgaaggacgaaaggaaacaatgacttggttgttgattaggatttgctactatgctgaatatctcaaagatacaggtgcaaggtatatgtactctctctcagattaaataatctttggcacggtggcttacccttacccctgattcccacgagacactgcttctccttgccttgggcagttgaaagacagaacagcaattagagcaccaatcacccgatctttattcaactcttgttctagaagttttcaaatgattttggaaaagaaaactaagttcctcaattgattcactcagtctctctaagtgtatcagcattatttcctcaccaaaagttgccttgttgattcctactctaacgtttatatgtggagctcggtagggatttattactgagtcaaaaacttagagtaaggtttatatgtgggtgtatgatcttgatcatagagcatgagaagtatctacacaagtcacaagagtttgacaaagttcaatggaatagcaagcaactaaaatgtatatggtgtaatcatgatagcacatttttggctctggtaggaatttatatcaaatgaggaactttcaattttatcatttttgaaaaacaaaacatccgaaattcaagccaaactagtatctggatcatagctactcatatttactatctcatatctcgcaacaacttagacttagatcagcaagtacagcccatttacctcaggttcccggatagttgttggctacttatatctaacctttgagagagtacttaccaagaacccatatatcagagatataaaacagagcaactattcatcatttcaacaaagagaactaccttgtcttacctagcttgactcaaacctatcctatctttttggtattttctgttttgcaaatttttatgttgtttttatttctttataggatgcaattggaaagcaaatatgctattggaaagggaaatatgcaatgtgatacaagttacctcaggggggggggccaagtctccccccaagcttggcttttgcacagggtccttgataggatttaatccctgaaagcgaaagtacgcttgaaggtcatcgtgctgttgctgcatcatgttgttgatgttggcgaactgagcatcagcagattgttgccattcttgcgtctgagctatgtgttccgtgaggttgtactgaatctcccccatctgcacatcaagggtgtccattctcctagtgatttcacccaagtcccaacgagaggaacttgagcgccattcacttggggatggaggcacaccacttgatttggagggttggttgtccccccagtggatgtcatgaggcgcatgccaccggtcctcactagcgcttgcccaggttgagactctgatgctatggcgtgcagcttgggtccatccaggtgcatccccagttggtgcccaacctgcctcatacatctgcacaggtgtcgaggatgatgaacttccttgttcgttccttgtcatgttgcgcgtctccctgtatgttccacctgcaagagattcttctatggtctgcaggggaatgataagttcatggcagttgtacaaatgataccccgcatttggcaacgggatttcatttgtacaaccagggaaaaagtatatcaaagattcatctactccatatttcaaaatattcccttgcactagataggcctcatcaatacgcggacgagcggctgagataaaagcaattgggtcgctaacgacccctagcccttttgctatccgagtaatcagagaagtgcactcaacaggagcagagaactttatactttctaatcattgtcttatcatacatttcacaggagcaaatttgatctttctaaccatggcaaacatgataattaattcatctcccctaatggatctcagatcacttctaggaaacaaagtcatagcaatccatttgtgcatgagcctaagtgtaggattatgaatatcatttgttctagttttcttgcaaattggagcaccagaaatatcttcccaaaacctatttttctcgaacccagaaattcctttttggagatcggttttacaggaatcgtgaaaaccaagaagtgtactcaaacctttccatgtgagcgtgaactccttacggaaaaagtgaaaagaaataccatcttctatttctttcaaagtgcatagaaattgcaaagtaagcaaacgagaaccaggctcatctaccacagcaaatctctgccaaccaatagctttccaaatagaacgaaattcaacatccatacctatttttttcagcaactccggtgagtattctcgcatgtgagcatacttctggtcgctcagcatgtagtaggcttgtctctcccgatcactgacaaggtcgaggttgtcacgccctgaagtttccccctacttctttctttaaaatttgggttaaataaatcgtccggagaaatggttcaaattaacctagagctaattccctaactaatgaatgcaattaataattggaaatggcattgtgggatttttcttgggttccacatgtcgcaatacattaacaagatttttagtggaattttcagagccgtggaaataattttaaccatttaaaaatgagcaagtgcaatattttaaatcccaggaaaaatcctttcttctttttccttttcttttcctccttttttccctcttcttgggccgttggcccagtccaccccgtcgcccgcgcgcgcccctatccttcttgggccggcccacgcccctctcctcctcccttcgggacgccgacaggtgggccccacctgtcgggttgtccccaacctccggccgcccacgcccgcgccaaccgccgccgaaaccaccgcccacgccgccgcgtatcccgctgctcccgcgcccactccgcgccccgtgaccacgtcgccgcccacaccctcgctttcccgccgttgcatgcgcgcccacaaggggcggattcaattttgaatccccatctctctcctcctccacctctccacatcgtcgccgcggaactgccgctccctgccaaatccggcatccccacctctatataatcgtccaccgcacctctctccaccttttcccctctttcgccgcccactcccgagctccctaccgctcccgcaccgtgcacccacccaccgctgcttcttccactactccggccgcctctagccaccgctagggccgccgccgcaccatgccgccaccgccgttgggttcgcgcggccgaggtccacctcgtccaccacccctccgtcgagttccgccgccggagcccgcttctccccgcgcgccggtgagcttccaccattgccgccgccttcggccatggttctcattcgtcgcggagtccctctctccctctaacctctctcttttcctctcttaaggtatcccggagcccgtccgcccatcgccctcgtcctcccgtggcttgccgtcgccgttcgccgttgctctttccccacactggccgagcccctcggtgaggacccgactccctcccttcctctctctctttgtcgcgccgcccgccgcttagcgccgccgctgtccgccgctcgccgtcgtgcgccgccacttccgcgccggtcgccgcttcctcccgcgccgccgcttgccgtcgccagcgaccgctcgccgccgccactccccatggccggccggccggttttgaagccgagccgagccgtgcctagctgccgccgcgccgtccgatcggcctcggggccgatctggaccatcggtcccgtggaccggcggtggaccacccgcatggtcccggtccacggtagaccggcactgatgcggacatcacaacctccgatacacacaacaatcctccaacggtcattcaaggaccgataacaagagctcgtgcgcgacaattaaatttagaggtgagctcgttcctatgttcttctttgtatgaattcgagaatagattgctacctaatgattatattgtgattaggaacaatggaggggtaaaggagacacttggagaaggacttagagccatggaggatcatcgaggacgtccaagtcaaggtggagggccaaaccaagttgacgtcgggtgcaattcggagtccagatctagtctgcactaaaacgggcgcctaggtcgcatacgtactcggattggggcgtctttatatggatggaaagctaagaagataacctttccaatggttttggtccgacgtccaaattctttccgagtcaatgggaattgaccgaacaagttgacgtctagaatctgtcccggtgctgcgtcaccgtatttgggcctttggcccgtgtatcgtgttggaacccattatttgtggcctaaagaatttgttattcactccgatcacgaatcgcttaaatatcttcgctctcaaaataatttggatcgtagacatgcaaaatgggttgaatttattgaatcttttccttatgttatcaaacacaagaaagggaaagataatgtgattgcagatgctttgtctaggcgctatactttcttgtcccaacttgattgtcggatttttggacttgaatcaattaaagaacaatatgcgcttgaccctgattttaatgaagtgatgataaattgcaaagagggacgtacttggaacaaatttgtgatcaatggtggatttgtttatagagctaaccgtctatgcattccagttggttccgttcgtcttttgttgatacaggaggcgcatggaggagggttgacgggacattttggagctaagaagacggaagatgttttggccatgcatttcttttggccaaggatgagaaaggatattgagaggttcgtggcacgttgcaccacttgtcagaaagctaagtctcgtttgaatccacatggtttgtatatgcctcttcctgtaccttctattccttgggcagatatttctatggactttgttttgggattacctagaactaagagggggagggatagcatttttgtggtggtggatcgtttttctaagatggcacatttcataccatgtcataaaagtgatgatgctgttcatattgctgatatgtttttccataagattgttcgtttgcatggtatgccttctactattgtttcagatagtgatgcaaaattcttaagtcatttctggcgcacgctatggaacaagttgggtacaaagctattgttttctacaacatgtcacccacaaacagatggacaaacggagatagtcaaccgcactttgggtaccatgttaagggctattttgaagaaaaatttgaagatgtgggaataatgtttgcctcatgtggagtttgcatacaatcgggcaacacattctactaccaagataagtccttttcagttagtgtatggtttcaatcctcgtgctccaattgatattttgcctttacctactagtgagagggttcatcatgatgctaaggcacgcgctgaatttattttgaaaatgcatgattcaaccaagctcaacattgaaaagatgactgaaaagtatagaattgctggtagtaaaggtaggcaagaggttaagcttgaaccgggtgatttagtttggttgcacttgcgaaaggatagatttccggaattgagaaagtctaagttgatgcctcgtgctgatggtccttttaaaattgttgagaagattaatgataatgcatataaacttgagttgcctcccgagtttggggttagtcccacgtttaacatttcagatttgaagccatacttgggagaaaaggatgagcttgagtcgaggacgacttcaattcaagagggggaggatgatgcggacatcactaactcggatacacacaacaatcctccaacggtcattcaaggaccgataacaagagctcgtgcgcgacaattaaatttagaggtgagctcgttcctatgttcttctttgtatgaattcgagaatagattgctacctaattattatattgtgaataggaacaatgaggggtcaaggagacacttggagaaggacttagagccatggaggatcatttgggacgtccaagtcaaggtggagggccaaaccaagttgacgtcgggtgcaattcggagtccagatctagtctgcactaaaacgggcgcccaggtcgcatacgtactcggattggggcgtctttatatggatggaaagctaagaagataacctttccaatggttttggtccgacgtccaaattctttccgagtcaatgggaattgaccgaacaagttgacgtctagaatctgtcccggtgctgcgttaccgtatttgggcctttggcccgtgtatcgtgttggaacccattagggttgcgtcgagaggggtttgcacgaccctaaactctatatatcagtacccgccgccatctttaggtttttggattttgcttagattaatctgtcgagaacagtttcgccgctagatcggtttgtaagaccccaactcgtgagcttaattattcatctgcaacattggttgtttttctatctcgttcttgtttgtgttcttcgattggcaaacaggaattagccttttcggcgaggtcatccccgtttcgacacaggtgataactagaggagacgtggtgctgcgattgcggggctcaagagcgtgtgtgttcaagaagccggatcgatttgtgtcgcgactccgtccaaatcgttgtttatcagaacctttcggaagatcagaaaccctagtgcacatcaggcaccctttgatccgctgccaagtggggcccgcttgccggcgccgccccccctttcgctgacatcagccctgggcaatattgcgcaataaagttattaaggacttttcatccgagctccgtttaagtccattcaagtctcagtaaattcataaaaatccctagaatccattaaaaatggttttgttctctgtttcagtagtcttatagtgtgttttgcttgtatgctttgtttgtcgcatagatctcggccatttcgtcgatccgcggttcctcgaagacgttgctgaggtctcatcagtgcgagagcaaggcaagtcatgcattagatttgatcatattgtactcaatttacaaatatcctacatttctattaaatgttgcattcttttacaatgtcatctgggatgggtcctattactcagccatatattgtttaccttataccattgataacttgggtatcaaaatgactagatgttggtttaggaaatgcttagctatgtctagctcaactagtacacaaatggggatcacattattacatagactttgactattagcatagctttggattggtgccaccgcgatggtgttagttaattaaaatacactgaacggtgggctgtgggtacatggttttactggtcgcacccatggcagttaaggaccggttcacgggaaaccctgggagacttaccatgcttaccacaagcgggagtgggtaactgcttgatctgaagtatagctcgaccctttcctaggaaccggtggcgagggtgggcatgatggagttgggtcggccggggtgtctggttgtccagctgctggattcaccgcggcgcaagaggggactgcccactgccttttgaggggtgggggtgaaaccttagcgtggtgtggatggttaggggagggttatgcggagggtcttgtcacgatttccccctttgcagtatcatggtgatacttcggggcatggcgacatgtgtggaatcgtgtcttgtgggtacagctgtacacctctggccagagtaaaactattcgaatagtcgtgcccgcggttatgggcgatcaaccagattcaccgtgattagtctcacccctagttagctaatgaactggcgtagttcaggtggttggttgggcctgttgcaacgtgatgtagtgttgggcagtgattggttaatattgattaattactacaactgttttactactttcaactactgcttttaaatgcctgctttattgcaaatgaaccactagcctcctttggttatatcctgcatgacttgctgagtatagtgggtagtactcagtcttggtctcttttcccccacaccagagctgatgatcttcctagtgggagctgtcttgttgaagttggtttcgtcgctgccatcaaggattgcctgtggagtggagtcgccccgcagcagaagtcaagcctccaagtttagtttgttttatctttttccgctgcatttgtaatcttttctatttttgtaagacgtggatctgtatgtcaacaattattgtttgtgtaccctggcttgtcctggacagggatttaatgcacattcagcttagaaattccgattcgtgaatttctgggcgtgatagaggtcatcgtcgctcaggagttgttgcggagcgtcggcgtcttccatcgagacatcggctgatgagcaagtactagactcgtcatgacgacttgatggagagcctgaccccttgaatagacgagacagtcgcctcctcatactgcacaatggagcaagaactagctatctcggcgggggttagaaatgacaagagtttcacccgccggttagtttcaccaaagcaacttgtatgtatgcaactaaagatttgaacttgaggaaaactatcaaagcatgaatgaacttgaaagcaaactttggagagggaatgaaaatgtgttgaaatggggtggaattccctctctcggtcggctggcttttatagggtgcccacaacggtcaagaatgacatgtgggacccactagccgttgcctcaaaaagtgaggaagctgaccgttgcctggccggttcggccgaacacccctggtgggcccaaccggccccactttcggctgttggaatccaacggtcagtgcggtcgtggcacagtgaatttttattgaacaatttattttggtttgctctgaaaaatagatttgaataatttcctcaaaattcaaaaactcaaaatgcaattttgaaattcaaacatgtgttgatgcaaaaattcaaattgttgaaaacaaatatgcggatacataccaatttacctgttggcgaaggtcgcgtcatttaaagtccgacgtgcaagaccgtacctcctttcgattcagtgcgcggattttccacccgtctccggaggtgatggagcaggcgcctttggcttttccttccacacgttatttgatttcggtgcggaaaacagcttcttctgagccggctgctctaacttcttggccggtacaggtgattttaccggtgtcctccaataacggttcctgggcattgttttttccttttccaggaagttctgcatgaactctaccaggcttatccgtcttgggtggctccacttcgaccacttgaatattctgcgggttcggcccgtactagattctgaccatggagcattgttccgtccttagttgaaactcaaacttttcctccttcccattgatatggaaacggatactccccattcccacgtcaatgttggctcctgcggtgctaaggaatggatgccccaggattagcgacgtctccttccccgtgtccatgtctagcaccacaaaatcaaccgggatgaagaaatcccatatcttgacaggcacatcctcttctatccccaccgggcaatggactgacgagtcagccagttggaggcgcatcggtgttggtgccaacaccgtgaagttgagtttgtcaaagacgtctttgggcatgacgctgacgctggcaccaaggtcgcacaaggcctggtcgaattgttgtgccccgatcgagcaggtgatcgtgggacacctcggatctttcttcttctccgggagcttgtggagtatgacgttgctgcagtgttccgtcgttgggagtggtctcttgttgttgagtatgtccttgagataacgggcgtatgttggtacttgcatagcgtccaacaacggcacgttgatgtggatcttctggattacttcaacagaacgtgcgaactgctgacggtttcctactccgctgagggaatggcagcaaccgtgtgtcgcagtactcctgcggcacggttttctctggctgaatctccttgtcagccaagtcagtagatggcgtttcttttgacatcccattagttcctgcagggttaggatatggcggatcacgagtggacttacctcccctcgtcgtgatcgccttaatattttcaatggaggagtcgggttgccccggaatcctctcggattcatttgcagggactaaagatgccaactgagctaactgggtttctatcatcttattaaagctcagctggttttgaaatgcagaagcaaagccgtctagcttgacatttgtcgacgggggatacccatagaccggatatagagggtattggggtacgctggtacgaggatctacgtagtacgacatcaagcaaacaaaagatagggattatactggttcaggccccttaagaggtaatagccctaatccaattaatatgggattatatgatggaaatcacagattacaaagagaatagtggaactcgatgataccgatgagatcgtaatcaaatcggttcgactagatcacccagcgacttagctcttgcaggctccggcttcgtaggctgtggtggatgtgttggcagtcaaattcgatgccctaggtcctcccgaggggtcccttttataccgcaggttagttggtctccaagtaggactcggagacatcggaccctacacgatacagtgacgacccagttctatccgagtagggatccttcccatctgtgaactccgtgatgaatttccttaacgtgtacagagaacgtccgtatacgcgtagatataccatatcgatatatgacgtatatccaagggtagagggtatactttatctataaccccgacaatagcccccgacttctgcttaaatgaactcatatgaccgatcgcgacttctgatgttggggttgttgtcgttctcgactggttgatctcggtgtgagaaccgtagagacaaggagtaatcaacaacaccatgcgaagttcaacggtcatgagtgaatttaaattgaagtccgaaaactgccgcgcgtaacggacccagaaattttcggcagccatctctctcctttccttggaattcgtaccgtcggtagtgcgtctatttaagggagttttgggtatccacgttgaagtccacctgctgcgaaaaactttccagcctccaagcgctcctcgtcttctccgctcccgcaaaaagccaagcttgctcatctcagtctcttctccggcgatctacggcggctatggatctcgacaagtccacttccaccggtgcatccctgaagaagctgcaggaggacggcgctctccccagtcacgagaccatggagagagaactaggaggtattgaacccgaacctatcctgggccgcatggttgcggttgaggactatattctttgtggttttcttcctctgccttccgaatttcttcttcttgtcttgaatttctacggtctttcgttgctccatttgaaccccaattccatcgccttcctcagtattttttccgatctttgtgaggcctacattggggtagagccgtttcttgatctctttcatttctactacgagttgcgctggatggaacctaagaaggtatccggatgtgtcggtttctgacttcgggatggcctgaagtcgcgatacatccccttccagtgcccctcttctcatagcaaatggcgggcgaggtggttctatcttcagatagagaattcggatcccgtcttcgttgtcccagaggaacaaccagacaagatttcgtcttggaccaccaaacccgccttagccccctcccttcagtccttcatcgatatcatcgatggcctccgaattcgagggttgtcggggtatgaagtcgctgccgacttcattggtaggcggatccagccgctccaggctcgagcccacccagcctttgactattcttggccggaggacgggacccgggtttctcctcggggtatttttcttatatttcagattccattccttatgtgcatgttcctccttttttatcgaattctggttctcgatctacaggtttgaacagcgaaaccgtggagcgccgcgtcggtcaagtgatgatcaacggccccacaacggcgagcaacgtccctatccccctttgcgagaaggggacagccgagcgtgaagctgcaatcaacgtgagtgtactcgacgacccctttatccttttcttccaggatcgcattgtgattcatgtagtgcaggctctccctctgactgacgtcatcgggccgctcgtggaccaccaggcggcggcttcgttgaaagagggcgtcacccaggaggtgtccgacgttgctgctgctgctgccgctgccacgaccagtggcagcaacattccaaaaaagggaaggaagttttcctccgtggtttgtaaccgtcggaaggcgcccactccatcggtaagcccctttggtcacttgttgcgtagtcggaagatattgtcctcacaccgtactcgttttacttaggcctctcccacctcagcgacggcagaggatggtgacacttggcgagaagtaagtagacgaacttgaggtcttgttatttcattgaactctggcaggccgtcttgatggcaattacggcaatccttcatagggcggcgcgggcaaaggcggcgcaagacgggtctggagggaactccagtgcgtctcttgcagcggcttcgaccgaggttgtggtcgtgcccaagagtcgtgaggcgacgcccagcggctctgtcggcggccttgtgcccgctcgaggcccgctcgctgacatcctcacctggggggagctccaaatcgagatggagcgcatcctccaggctggtgctcgcaggatagggcgcgagattgaggaggcgaaggcggtggtgtcatcgtcggtgaacgaacgcgccaagctggcgcgtgacctggcggaggtccacgaggacctccagaagatgagggagctggtggtcggcaacgagcagcagcggcaggggctcgagcaacacatgtcggagctcgagaacaacctgtcggagatccgcggctcgctgtggaccacctacaccgggctgaaccagctcgccgtggagtgcggtgttacgaccaccatcccggcgaatcccgacgagttctcgctgatgacttcacttgcgaaactggcgacggcgatggaggagatcccctccaagcatgcggccaggatcggggaggagacgtccaatgggatctacatcggggcgtgccacgtcctctcgtgcgtaaggttggcgcatcctgaactcgacctccagaggatcttggatcagggggctgctaacgacgcgcgtaagggcgtgatggaagaagtcagagatctgggggagtctgttctccccctttttgaagaataggatttgagttcccctgtgctccttagtcagtcgtgcttgtaaaacttttgttggttccaactgcctttgtgtgtgtagtcatcacctttgttttctttagcattttgatctcgagtactttgttgtcgttgtagagatgtcgatgtcgaggatgtctagcagcgcgggtagcctgagttgcctgtaatcgttccggcacttgcgctcgagccgtatgtgccgcaggacgacgtagatcggaacttgcccgtggaagcgggcgtggcgacgacttccttaggttggttttttttgttttcatctgctttgctgatttgtcgggattgacttaatttgtcgtgttctcgagagagaagaacaacttgacttagccgtttccatgctgagcagacctcgagagtgcgctggccgaccgagatcgtcgcatccaatactggaggacgaagttcgaggtggccgaactggagaggactatggtggaagtgaagaaggatcgggctgtggaagcactccgaggtcgcgaggtgtggttcaactcgtacctcaggagctgttgcgcggtcatggctggagtctccagggaactccaggtaccacgcggggatcccgaggagtcggcggccggatatatctcgtggttgaatggggcctgtgcccagctcgaaggtatcgacaagcatatcgacgaggccctgaagcaggagtgccgtcgatagagccgatatgctggagggcatgtgctggcctgtatcagagatcaccgtccgcagctgcacctcgagttcctccacggagggttttcacgttctcggaggactcccgcagagatagataacttggcgaagtcgatggcgccgcttgcggagaaagtgttccagtcgatggactggcgctggccttcctggtagtctttatatcctgtgacaaatatatcagagagacatgtaatatattttgaaatttttacgaactgtaagaagtacttgtgaaatagaatataaatctatctaagtctccttactctggatgtggtgtgtaagagtgtcttctcacttcgcgacttcgatcaatcacttgagtcatacactctccctagcccccggccttgtcatcggagaatttttctcgaaagataaggctcttggacctttgacctgccttggttgaacaagcactgatcctagccaccagccgtgaagttagaaaacccaatttccgattacacggcttggttaatacgcacggtgagaactcttacacgaccagatcttacatggtcttttgtctctacaagatccgacaaggccttatcggctctgggcgtccccagccgaagttcccttagattcctcggaggccttgtcaagacggcgtaaagggacagtaggataggtttcaacgctaggtgtcatcgtggtaaaggatcgtcaggaaggaacaatttgattgtaatctttacctgaaaataaactttattgaagctgtaagatgtcttacaagtatgaatactattgatttatacatagaatttacgtaattgatcaatgttccaagaatttgccaactctcgaccatcgccgtctgcaatcttgaatgtgcctggccgcaagacatgcgtgatcgtgtacggtccttcccatttgggtgagagcttgtttcgccctgcttggctttgaacccgtcggaggacgtagtcaccgatcgaaagtgtgcgtgctctgatgcgcttctcgtggtatcggcggagggcctgttggtagctggctgctctgacggcgactctttctcgatgttcctcgagtaggttgacatcgtcgtttcgctgctcctcctgattctcatcgaagtacttctatactcgtgtactctgatgtcgtagctcagtggggagcatggcccatgagcgtacacgaggaagaaaggtgtctccttgttggacgttgtcggtgtggtacgcacggcctatagtactgatgggagttcttcgacccacttcttgtcgtgtgacatgagcctgtcgtagacacgggtcttcattccttgtagtactatgtcgtttgccctctcaacctgtccattaaactgagggtgagaaaccgaggcgaagcagatcttgactcctagcctgatgcagtaatcctggaagtcggcacagatgaactgggagccgttgtccgttatgatgcggtgaggcaatccatatctgcagaatatccctttgatgaatttgatggcgttgttggccttgatttcccccgtgggtgtcgcttcaatccacttagtgaatttgtcgatcgccatgaataggaacctgtagccgccttgtcctcgtgggaatggtctgagtatgtcgagcccccagcacgagaacggccaagtaagagggatagtctgaagcgcttgcactggtagcttagtgtgtttactgcgaaattgataggcttcacaccgctgaaccatgtcgcaagcatctttgagggcaatcggccaaaaaaacccttgtcgaaaagcttttccgaccaatgtgcgaccggcgacatgcgacccacagatcccttcgtgtatgtcgaggaggagatgtttgccgtcgtcgaacgagacgcatttgacaagtaccccgtttggcgccttcttgtataggtcgttgtcgatcatacagtagattttggcttgacgggttattttctcggcttctgcatcgtcctcgggcaactcgtcgctacttatgaatttaatgagcgggatctgccagtcgtctatggtctcgatgtcggcaacggcgcgctctgcctctatatgatgcgaacccgctagggtttatggcccgatctttcgatgagaggtaagggataactcgattagatgaagacgacgttcacggcccgactacaactgtccaaagacgctgcgccttagcaaccgatacaccgtctccaatggtcgccgcgaacttgtggtgcgcatcaacccggccacgagggcactcgtcctgcaagcaatcgaagaacaagcaagaacaagtaggacaagcactgaaattgctagataaagatgaaagtttcactatcaaacacaatatggtgggttccgattacaggcagacgggcggtttagccaacacgcgcgctgcgagccggtagcaagaagctatctctatcatcaaaacccgcctgttcttggcggccactagaggtataagaagaggggaagaacgaccatagggtcgtgctccaaccctagggcgtgcccctaatgggcccaacttggatacacagcccattgggccaaaagaggtgacgcagcaccatggacagaaaatagtcgggagtaaaatgacaattgcggccgctccagaacagatatggacatgtggctggatccatttgaaagtagacttgataagctttccatgaagtacttgcacgcccaaatcggagttcgcatgaagtcgtggcggccgtcagaagttggcgctgccctgcagtccgaatccaccctgtgcgaatcctcttccctttggatcctctccatcgttcctgagtaaaacacgagtgcacgcgtctccggggtataaagacgaggaatatgaactcaagaaagaactcacctgataatttagttgacgtgcacgagcgcgggtaataggaccatcatgctgtacatggggggacgtggatgtatcgatggtgttgatgtcctcatcactatagcccccgagctgatgtcgggggcgactaggctatcttcattgtttgcctctttcactgatggctttgtcaggacgtccaaaaagttgccaggttcgagtggctcccgtctggacgcacgccttgctagatcgtccggttcgatgttgtcattgcggtatacgtgtcggacctcgattccatcaaatcttttttctagcttcctaacttctgcgaggtacttggataactcggggctagagcacttgtagtctttgtgcacctggtttgcgactagttcggaatccccttttacgatcagtcgcttgactccaagtacagttgctgctcttatcccagcgagtagtccttcgtattctgcagtgttgttggtcgccctgaagttgaggtgaattgcatgcttgaactgatctcccgaaggtgatgtcaagatgaaccctgcccctactccttggctgttgagtgcgccgtcgaacgccattatccatgtttcgttgtcgatttgactgtctgacctgttttcaggcatagtccaattggctacaaagtcggccagaacctgggacttgatggctgttcgtggcacaaaatggacatcaaactagcttagctcgactacccatttcgcaatgcggccaacaacgtctttgtttctcacgacttcaccaagagggaaggaggaaacaactgtgaccttgtgtgcttggaagtagtggcgtagctttcttgacatcatgattactgcatagagtagtttttggatctatgggtatcttgttttcacgtcgtggagagcttcgctgatgtaatagactggtctttgcaccttctctctctcgacaacaatgacagtactaacggagtatggcgtggcggcaatatagaggaataattcttcattaggttggggagcaacaagtacagggggatttgacaggtagcgcttaactgcgataaatgcctcttcggcttcctgtgtccatacaaatttgtcgtgtttctttagcagggcgaagaaaggttgtcctcgttctcccatcctagcgacaaacctacttagtgccgccatatatccagttagtttctgtacttccttgagtcttgtgggtgacttcatgttcttgattgccttgatcttctcgggatttgcttctattcctcttccagagacaaggaacccgagcagcttgcccgatggtactccgaacgtgcacttctctggattgagtatgaggcaatatcgtcggaggttgtcgaacgtttcccgcagatcgtcaatcaatgagtcgcttgtcttgatcttgacaacaatgtcatcgatgtaggcctcgacattgttcccaagctgatcgttaagtgccccttggaccgtgcgttggaaagtgtttcctgtggttatcagtccaaatggcatcttaacgtagcagaatacaccgaacggcgtgatgaatgatgtcttctcctcgtcctctttcgccatactgatttggtggtagccggagtaagcatcaagaaaacttaacaactcacaaccagctgttgagtccaccagttggtctatttgaggaagagggaagtgatccttgggacacgccttgttgaggtcggtgaagtcgacgcacatcctccacttcccgttggccttctgcaccatgactgggttggctagtcattctggatagagtacctctctgatgaagccagctttaagaagcttatcgatctcttctcgtatggcctgttttcgatctggtgcgaatctccgcagtttttgtgcgaatctaagtagatcccctacctggcgcgccactgtcgacgggggatacccgtagaccggatatagacggtattagggtacgctggtacgaggatctacgtagtacgacatcaagcaaacaaaagacatggattatactggttcaggccccttaataggttatagccctaatccagttgatatgggattatatcatcgatttccattcaaccggtgagccatttgtcgatttcttgcagtagtagcaaccttaggtggtgttctacatcctgcatgtgatgttattgacatgcatgcaatagaacgagccgttcaccgccgtgacgcacgggtgcatgcatggcgtcccgagcgcttccgattgcagccgccgcctgcgtcggtccagtcaccattggcgggggaaaagttgaggaatggaatctcaatgtcttgctctacattttatcttttgacctcgtccccattagagccggcgtttgccgccggcgagcttgagatcgagctcagccatggctgtcgctgcttcctgcacgagtggagaagaagttgaacctggttgtaagttttagaaatcccagggttcgacatgcaaaactacagtccaaaagaatctatcctttggatccacagtcgcctgggacccacctgtcatccggctcaaaacaaaccgcaccatccgcgcggaccacgaaagaaacgccgataaaaaaaagaacgccaaaaaaaaaagaagcgcatctaacctccgccctccgccctccgccatccccacgcggccacgccactcacccaaccccgccgccacctcggatccgcgtgtggccgccgtctccgccgctccacgccgctcggagccgcgggccgcgttgccgccgctactacgcgcccgccgcttcttgccgcctcctcgtgcgcgcccgccggttccccactccctccacctcttcacaatctcctcccgttcgcaaccgccggggcacctccgcccgcgccgtccaccgcgcgtccgcacctctccgcgcggagtcactgccgccgagcgccggccctcaatccgcttgcatccgccggagatagctgcggggacgacttcaggacggccaccctctacctcacaagttgagttcgccctgtaagtttcctcttcctccttcctatgtgatcgattgaacaagaattagttgaatgcttgcttgttccttcgctagctctgctgtaatggagtggagcaaagttcaatctttgggtacaatattttcatttgttgggaggatagcaaggatctgataatggcaatatacaccgaaacagtgcattgcgctcaacatttgtgctctatttacagagttataaagtaaacaatagtagtgatgcatcaatcatgaaattctcatagctgtatggcattgcatttatatagcaatctggttagatgtgcactgacattaactttactcttaattatttacttgaattagcaaggtgataaggtcatgtaggtcaatcctgtacatgtatatggggattgttgtttgatgttttctcatacagccatatttcaattatatgtggtctatgcaagctcatatggttaattaattctaacaattcttccttctgcctggctgctctgatcttttcttactacatcgagatacaatcagatcatgacatgtctattctcttcgtccattgcaaaaaaaattttgtgtgtgtttgttaatcacttcatctttttccagattgtatataaattatgcttttaatcactccatcttctgccaaattgtaagttcatacctttcatttcatctggaccctgtgaaaggaacatgatttcctatctagatttgtcttttttaattaacttttaacctttttctactcagtgtattgatgggtcagatggtgcatggaaacaggacgcggttctatccgccagtgaggtgcctgccctgccaactacttagggtgtgttcggacctctaggttcccaacccaaatccctcgttttctgcgcgcacgcttttcaaactgttaaacggtgcgtttttttataaaaagtttctatatgaaagttgcttaaaaaaataaaattaatctatttttttaaaaaaattagctaatacttaattaatcatgtgctaatgaaacgctccgttttccgtgcggaggcactgtgttcccatcatccacatgcgaacacagccttaggagtgtgccagtattctacatggttgtctcctccatgatcacttagcaggtcaatttcaacacttgcctctcacaaaaactagatatatgatattttatcgacaccggtagttgctcgatgttcttgaagaatagcatgtcaaactgaataatcttagccaagatcatccagcgatagatttattaagtttgatggttacgattgacagtttccttttcctattaacttatctgtgctatcaaataagctttagtgatcgtcaacaaaagcaatgtgtacctatgaagcaaagagcacaccagctagagctgatcatttgttttttagggtttactgcgtgaaaagtccaatagagatgtcaatttttatctccttactatctattggctattgctctctagggacaacatatattgttcagaatttttttggttggttcatcttgtttgccatcagattcatttgaggtttatctatgctttgacgatggccaaggaggatcagttccatttgagccaagcgattatagttttttttcctgtgcttcatgtaaaatttaattattatgcttgtttctttacaggaaagttgtgagatcatgaggagtggcatgcctaagttgactctcttgagcttgatatgatgtcctgaacatgcatgttcaggtgagcaaaattatactttaatgcaccagttttggaattcaaactcaaagaaacttgaaaaccctggttgtaacttcactaaacaaatgtacttatttaaggcatgaagattaacatcttgactttagttcaatgatgggtcattgtcattgacgatcacatggtccacagaggccttggtgtcttcgatctgccatgatttccaacaggttaagctttgtcatctcatcttctgaaatctgaacatttttatctctgcatttgtttctgatggtttaaacttgggtttggcactggatgatctggttcttgatcatttggtcatcatgtacttcaaaacttgcacatttggtattgaatgtagactcaaaacaggctctatatctatgtttgaaactacccagtcctaaaaatgcttgtaatacattacaactatctaatcctaaaaatgcttgtagtacataatttagaaattaagatggttctttcagtataaggtgatgtcatcagaattgcttcatgaagtacttgcaaagctatttatcaattcaatcctatgcttattgtaatccaacaatcttttgttcatcaaaatgaccctggaaatattatccttttactaagtgctgggattgaagcaggcgatatatatcgttaactttatattggattatctcaataaggccggccttatccttagttgtttactacggcttggttggaggttggccaaatagagttgttgctttcacgattattattattatgccattgccttgaaggtatgcatcatgtatggcccgatgaacgctgacactataatgtttgctgaattttcttacagtgctcatattctgcacgtgacattgaatccgatatattgcaggggctcagattggcgaggtacatcgaaacaattcaacaaggatgatataacaacttacaatatttcttgtttcctgcttcctatctatgatattcagatgctgattaaatcagttgtttggcaggaattatcaagtcaccatggtgttttacaatgtcaaatggcagatgtccaaaaacgtctcaggtaataaataacttgagctgtatatcgaattatatactctcaatggataaaaaatgcaacaaatatgcataaatgactaaattcttctattcagtgccgtattcagtaattgtttggtggcatatgatcttaaaaggaccccttaacacatatatattgcattgatgtcagaaatcattgtcgattctcatagataatagccagaaaagggaattaattgagtgacccatataacaacattacatgtccttcagttattggatcaaccacacgaaggttaacaatattgaccatataagaagaatttcgcttaagttctaaaagagtatctg

SEQ ID NO: 26720 - DNA, 1235 bp, Oryza sativa
tttgctaagcaacatctgaggggcctacaatgagttgttgcttgcgtaagaagtttcagcatcgaaattcataatatgtgcactgcaggtctgaggttcaaatatctgaccaaagtactaccccccttgccagattcagttccagaatgagacacagtaacaggtgacggaacacactgtcgtggttccatagcggttgcgtgcagagggcaagcagcttatgaagccaccccttgtttcatcagaggtgagattgagctaaaggtgatgaatttagaaacttcagtagctggcatcaactgaacttactagcaaatgctttattctgaaacctgacaagatctcaggaactaacaaaagaaaatccagtctttacgcacggacgttgggtgttcagtgagcagggcgttgcagagctaccattgctacttcagcatgaagaagcagtcagccaacaacatcggcagcaagcataggctgaaaatgagaatgttaatctaattaaatcaaaaaattagttcatgttatgtcattcatttagtgtagttatagtttgtccttgtgtatgcttatactgccatcagcgatcggccaatctatgccattaggatatgcatgtaagaactcagaagtggtgtgcgactgtctattatcaattgaaaatcgcttgatttttttcacacaaaataagcgtctgatagataaatggtctctggtttttttttttagcctctgtaagttgtaatatttgtaaaataatgaatggatacttgaaaactgatgtttgacattgtttcggtgtaaatgaattggagttcaagtttacaaagaattatgttcaaatcgaacactccaacgtgtttgagcaatttaaaacaatctcaaccttttttagagctatatggaataatcacatatttatgaatacacatatttttgttagtaccaagactgaatactctttcaaaattaactgcacgctcactagtaattgaaaacatacgtgaactaggaaaacatcaaaaatccataactaattcatcttaactcattttcaagtgaaccaaatttctatgtattcataaatttgtagtctttatgtttgtaaattaaaacattacaacttcggaactgaaaaagtcactaaaattgtgagtttcataaaaacacttatttttgcacctaggagttgtataatctctagaaactttatgctatatcctgggctgcaggaa

SEQ ID NO: 26721 - DNA, 5202 bp, Oryza sativa
ttgatcttaaagggagagaatatttgtgatatccttatgatcatagctataaaaggggaaaatattctaggatcccacatcatagcattacatatgcatcatatgcgtaagcatgtcattggcatatatatcactcctatttactcaatgacatgcatggatataaatcaattgccaagcttcaatacaatgataatctatatacttcatatccaaatgtggttattattaatgaatttgtcatcaatcaccaaaaaaggggatattgtaagttcaagtgccttaatttggtttggtgattaatgaaaaatctaataatatgagactaacgtttttatgaacttttctttgactagtctcgtttggatatgaaaataaaaatgatgagagttgtcaactaggttatttcccgatgatgagatgtggtagatatgcattctttggtgatgaaatgcatggagataaaacgttatgtaccacttcttatctcctactttttgataggttcatatatatgatttccatgttattgttatataagtgtgagactaacgtttattcgagttgtatcttatttaatctcatttacattaagaacatggaaatcatgaatgtatgtgttttatgctggtctacatcattactacatatgccttctctatgtgtataggataaacccccattgatcattctctaattatgcatacacttgcatctcttgtatatttatttgtatgcatatatttagggggagcaaatcctatacatttattgtgcatgttgtagatccatgttgttcacctattatttatattggatctttgcatttaagcttgcatgtgagtatatgacacttgtggtgttaatgaataatgaatactcaacaagcatattcatatctttcatatgcaactggttggtcatcaagtgcaggatgacaaccgatttgttgggactaatgttctcctttgagctgtgcaaaggaataggtcccaccgtgatgaggctaatggatgacaccacggtttgacgatcaccaagccaacaacatcgccatgttgacaagaatgaagtcaagattgtgatgagaagaaagtcttgacaaaggatggtcaagacctaggcataaacaagattcaactgaatagtcacatgtgttgatcttggttcaagcattgaccccaagttggatggcgcaaggcaaaggtataatcgagcgaagatgttttcttagtctttttcccggtcttcgtgtttggtgtagaccggatttgctatataggcgccatactatcaagaggggtctatgaagcgagcacgtggatgatcttgtgccatattagttcatatgcatgtaggtgcatttggtgggcttgtctagccatgtgtgatgaattttctcatgtcctaaacaaagagagaagtgggcatgtccaataggagtgagtgacatcttgtgagtatgtccggtggatatcctttggagcgtgagcccttcatccttgacataagttgtgtttcttggatgtatttttcatgggttggatagccttttgaataagctttccatagagtccaagaacatctaattccaatatccgagtcaagagatatcgtcgttttactgtcggtgggtcgtgctgaaaatcggtctgctgtcagaccgacctattatggccggtcagacctcccgaaggcctcgaaagccccccaacggatagttttttgtgcgttggactgagggccggtctgaccgggtttagaagggcggtcagactggcaggcacgtcctaaaaggtgttttagcctctaacggcttgttttggtggttgggggtatatatacccactccccagcagcaagggtgaagttttggcactccattgcattatcttgaacctttgcaagagctctcacacccttgtgcacttagtttatctagtgaggtgttagagagtgagttaagccaatccaagtgcattgcttcattgttatagctagtgtggcacttgatcatcctcggcaagcatcctagacttgttactcttggaggttgccgcctcctagacggcttgtggaggtgttgcccggtgacctctccgaggagattgtggaggaggcccggcgccatttgtgagtggtttggagttcaccacgttcggagtgaatgaagaactaccctggtgatcgaggcttgggtagtcctctccgtgggccggctcccaccttgcccaccccttgacgaagggggcgtgcggtggcttcgtggttgagcggtggagttgggctcgcctcaacggggattaagaaaccggcaataaaaaattccttgtttcttgtctcatttatttgttgcacttacatttgtgcaatttacattcatatagacatatttgatcccatatcacttaggtttgcaaaacttaacttagttgcttagttaaccttgcacctcaccttgcctagcaacttaggttagttttgtttaagtgccattaagttttaaaaccacctattcacccccctctagtcggcatccttgatcctacagtcctgcgccggctcgaccaccctttcctgcctgccatgttcgatgactttgacaccggccagaactactcccccactcactccgccaccgcatgcctggtcatcgattcccagtcgcgttcaccaggttctacgccgctgaggtgctcctcgcgctcgagtttctgcacatgatgggcatcgcggcagagccagtgcacgcacggtcgagctcgttcgtcggcacgcacgagtatatggcgccggatgtggcacgcggtggcgggcacgacgtaggcatggactggtggtcatatggcatggagttcccctcggccgtcgctgcctcgccgcacgacgccgcgacgcgagacatgatttgcgcgacgaagagcctgccaccgccggcgtattctggctagccgacgcggcgctgtgtagggagagagaggggcttacatgtgggcccacgtggattcatttgagctaagggcaaatttgtctttaatgattgtttctctctcctattcctctagaaataataaaataaagcagtgggtgaccaggagctaattaccagttttttgcgatgccctacagcaaatacacgttctttcgatgtcctctagctaattacatgttttttggatgtcctgtagcaaattttgcctagattaaatatactaaacgagaatcaattcgatgttaggatagcctaacagactgatatcaggcttaatatattttatccaagttggatcttgatataaagggcagattcagtatatcaagtaaacaaataggaaacaagataactaaaccaggtaagatcggctgaaaccccgatactatccctattagcaatcatagagcaagctagatattatggttctagatattacttaatagatcaaactcatctgatgcagcattaagcataaagagaaacataagatctaaacgagccaatgagagccttttcgggaaggtggatatactatataatctaattcaacgatagtgttggaccctatcggctgttttcgatgatagaggctagacgacgagatcacatagtaaagtcgatctagattataaagcatatatgataactcgacgatttacatagacaggattagagtgtcgtaaagatgtttgcactaatctcgagaacacaagccgccataacaaactttacctcttgtcggagatagaaaccggtccagcccaactcgaaagcaagaactcgtcgaaaacaatgaaaagtaaaagggtggcgatgcgccgagagtgtattgaactgatgtttgtttgtttacaaggtatcgtgtcatatttatacccaaaatacataatatgtcattgtcggacatgactccacttctattacatctcgaaaatacgaataagtcccttaggcggactcttaccgaaaatatctctaaggaaactaccaaaatatcctaactaatactccctccttccaaaaatgtgaactatttcttttacaccaagaccaagaagcaattaattcattcaccatgtgacaaaaccaatgaacatgcaaccaataagcattaaaatggcttcttgggttcctatcaacaatttaatttagcacataatgactacaaataggacttagacttttggaaaaaccaaagaatgaaataggtcttagacttttggaaggagggagtagattcaattgccttcttcagactcaatctatacttggcaatacttgtatagcacttcaaccaatcccgacactggttctacaattatctcgccgaaatctgttacatcggttttgtgggcacctgaacattatatcgtccaatgcaatttgtcaccaccacataattttggatgagtgggatccatacatgcataaatagccactcatacctcagtgtgccatgatcacaatttgacaccattcaatataaaatccgcaatgccgaatgaacaaaggagatattgttcgaactcaacatgccaatcaacttcagcctgagacatgcccgtcaaaccacacgaagccgcgaccaaatgtgttacacatctcaggagactcgactcaaattgctaaaactctacaacatctcaattactcaaaattcatactcatgcttagctagtccccaggaaaagcggctagcctcacactttcatcggaagcaattgataagcatcacaaatgtataattatggataaaaggacagcaagatacatattttaaaacggggttcacaagcccatcatacaacacaaaatatagcagcggaagttttgcaaattcatataagcagaagtaaaacccgtggtgtgcaaacaaccccacaagggcaaccaaccggggcaagagcaaagctgcaactactcgctaccctcgccaccctcggcgggatagtagtagggcacaacatcaacaccggcatcctcacctgaaaatagcaacatgagtacgaaaggtactctgcaagacttacaccatatatgatagtacaaaggagtatgcatgtttctacatcaaagaaaatggctaagtggttcagattttgcataaagctaattttgttgagcaagtagtaagttgcaaatatagcatttgtaaaaataacataatctgaaatttaggacagcaagaaagtaaatctgaaattgaa

SEQ ID NO: 26722 - DNA, 746 bp, Oryza sativa
aaacacaagaaagggaaggagaacatcattgctgatgctttgtctaggagatacactttgttgacacaacttgactacaagatttttggcctggaaacaatcaaagaccaatatgcgcatgatgctgattttaatgatgtgttgctgcattgtaaggatggaagaacatggaacaaattcgtcatcaatgatgggtttgttttcagagctaacaagctatgcattccagctagctccgttcgcttgttgttgttgcaggaagcgcatggaggcggtttgatgggacattttggtgccaagaagacacatgacatccttgctagtcatttcttttggccacagatgcgaagagatgttggcaggttcgttgctcgctgcgctacatgtcaaaaggctaagtcacgcttacatccacatggtttgtatatgcctcttcctgttcctactgttccttgggaagatatttcaatggattttgtgttaggattgcctaggaccaagagggggcgtgatagcatttttgtggttgtggatcgattttctaaaatggcacatttcataccatgtcataaaactgatgatgcttctcatatcgctgatttgttctttcgagaaattgttcgcttgcatggtgtgccaaacacaattgtttctgatcgtgacacaaaatttcttagccatttttggagaactttgtgggctaaattggggactaaacttttgttttctactacttgtcatcccca

SEQ ID NO: 26723 - DNA, 1820 bp, Oryza sativa
cttccaccttcgttggagaccgccgaatcaccgccgtcgtcttcgccccgtgggatgctgccgcctccctctgctcgagccccatcagctgcctccttcgccgccatgcccctcggtgagctccgccgcctccctcttcgcctcctccgctcgttttcgccgctccccggtcgccccctcgctcgtcgggccgacgccgccatcaccattgtcgtcgtcgtccttcccgcgtcggtgagcatctccctcctcctcccctccctttctttttctctctttgcccgccggccgccgcatgcgtgtcgccgtcgcgccgcgccgcgtcgccgcctgtgtcgccgccggtggtcatccggccgcgcgccgccgtctggtcgggttggtcggcgagccaaccctcccctccgccttgcacctctaccgtggactcggtccacggtgggctagatcccttgtgcccgctgacgcgtggggcccgctcttttggtggacccggtccaagccctcccctttgactcgctgacgtgtgggcccgcctgtcggcgccggcgccccttgctgacgtcagcgaataacatttcctttgagaaaataattaataattgcgcaataattcgataataattatagaaattcattaaaatggctcaaaaccttctaaaattcatatctaattcattcgaactccgaattgagccattcaacttgcaaaattcatctaaaattgagctctacatgtttgtttactttttatgtactgttttcttggtgtttattagagtttttcctcattttgcgtgccagcgtgtagtttccgtcgtttcggaagtccgcggtcgcgaggaaaagagttcggaagatcaaagtgaagaagcaaggcaagtcgcacattccccttgagcatgttgatcccaatttataaatgttttaccgtttacaaataaatatgcatgttttgctaattacatgggatctgggtattacctatctgctcgcttgtgccatgtttacttgatatctgttctttgtcaaccttgggtaatactttgactagctcgtgttacttatgtgacctagctagaactatatgcttagccatgcttaattaccactagctcagtcgatgggataattgcagtattagacattctagtatcttgttgagccgcgtgctcgagacatctgccaggtttcatggtcgtaattatccaactaaaatgcgactgaatggtgggctgtgggtgcatggttttgtgagtcgcacccatggcaattaaggaccggttcacgggaaaccctggaagacttacagcgcttgccacaagcgggaatgggtaactgcttgatctgaagtatagctcgaccctttcctaggcaccggtggcgagggtgggcgtgatggagttgggtcggccggggtgtccggttgtccagctgccggattcaccgcggcgcaagaggggaccgcccactgccttttgaggggtgggggtgaaaccttagcgtggtgtggatggttaggggagggttatgcggagggtctcgtcacaatcactcgacatggtgacgtgtgcatcatgggcacatgatgacgcggtgacatgtcggtgggttgtgtcttgtgggtacagttgtgcacctctgatcagagtaaaactattcgaatagccgtgcccgtggttatgggcgatcgaccagattcaccgtgattagtctcacacttaataaatcgacccaatgcactgtagtacaggtgggttggttgggcctgttcaacgtggtgtagcgttgatcagtggagattttaatgttactttaat

SEQ ID NO: 26724 - DNA, 515 bp, Oryza sativa
tcctgcagccccgcgatgcagcgaagccgacggtggcagggcgcggcttggcagtggctggagcggcgaggagcagcggctggagctcgtcggtgagtggtggagagagggagcgcggtggggaggtggttccggcggtggaggagggagatggagtggatgccggggtgcggcgaggcgctgtgatgctataggtggcggcggtgcagcgcggcagcgacgggagcggcggtggcgggcggctggagatcgccggcgagcggcggtgcgtgggctcggcgcggggagagcgagggagggcgcggcggcttggggaaaatgggggaaacggaggaggggaggccggggattgtttttatagctcaagggggcgaggagagggccggggagcggcggatttcgagggggaagtggggcggcgtcgtgggggagagagagacgccggaggcggcgacgtggccggattttgcggggagagggggggaaaccgcgcggacgtgggcggcgaggtccca

SEQ ID NO: 26725 - DNA, 6805 bp, Oryza sativa
cattcttacaccacctcctcgtgattacagttctaccaacattaattaattaatttgagaagcaatcagcattaatcaaagcgaaggggtcaggttaaaattatactctcttgagttgcccactttcggtggtcggcaaccttttacccgtgcactagcttgagtgtgaagcgcacacgtccggtactgtacgaatccgtattatatccatacgacgaaaaacacatctatcctcgtacacatatacagaggcgggattacgattttaaagtatcgtgttcaaaatataaaaggttaaagaggattttatagctaaaagctgacgtgcataatatatatactaatggtataacatatttataacatatagtatacgaatactatactaattgcatatagtatatactctctccattctagaatataaccatttttagagttgaagaccgttattaaaaagatagatagaattaaatagatgagagttgtgattgaatgagaagttgaggtaggtgaaaaatttgtacagtgaaggattgtgattggttgagaagaaaatattgatgtagaagttgttatattttaagacaaattctagaggctgaaagttgttatattttaggtcggagggagtaagttttatatgaaattcttacatattcatctgaatactcttgagctggacctgacatatgaaatcctcaactgaagtttggtctctgttaagtctgcggctcaggcactcactcgctgggcaggcaagaataattgtcgttttgttaccctctcaaatatggtgccaagtgccaacgacatttaaatggatcgtgttcttttcccattttaccaacaaacctctctcgttttccgcgcgtatgttttttaaactgataaatgatgctatttatgaaaaaccttctatataaaagttgtttaaaaaatcatattaatatttaaaaaaaagttaatacttaattaatcatgcaataatatgagcttcgttttgcgtgccggggagaagggttccaaagaatctactccctccgttccataatataagacacatctattatttttttatgttccataatataaggcatgcctgcatgcatacaattaattatgacatcttcatattaaattattacttttttaaaattctccaccctcaatatctctaattctattggatgtatttattatatttattagggtggtctaaactaggaggtgataataattatttcttgatatttaggttaagactgattgtgccttatattttctaatggagggagaagaacaaatggtttggttcgagtggtgctacactcagactaggtagactggtagtcaaatgtcttttattttactcatggcaacgtgattggaaaaaaaaatacaacttgctggctacaatatatgttactctgttattagtactggtcagtaataagggaagttctatcatcatttatctattttttaaaaataataattatatgccttatgacttatatatggtgccattactgcatacaatcgccggatgcggtaaggttacatagtttttttttttgtaaaaaaaaaagaagcccataggtccggcttctattgaaagaccaggggaaagttttgggtgcagccccagacattacagtacagaggcaacgcctcaaaagattacaagaagttcaataaattttgtacaaatttttcaaccgctcaacggggtaactacacagttaccgcctgggtagggtcgataccactacaccaagcttacgatgccaataatataaaccatttctgttatcttaaatataggaaaaactataaatcgagcttctgatttttctaaaacaaaaaccagattttatttgaccatcggttaaacattaaattatacgtgataaaaaaatcaaataaacatttaattatttttcaagtgaagacacatgttaaaacatgttattaaatgaaacaatgaaatatatgattttccatcaaaatataaaagatttaatcaaaataaatataatgatgtgattggattatacatcatataagcagtttaaaaaaaatatttaaagtgagaaggaataaggagaagctagcttagctgcagccttgcatgcatgtaagtattagtctttactcgcctcttgattccgtggggagcaaagccgattccggcgccggcgccgtcgacgccaccaccacgaggttcgtcgcggtcggtggcctgtagaacggcaccacctcgaaccgcgtgtagcacgtcagcgagtaggcacgccctcctctcgtcctgcaccgcaaccatgtccatgcaagcttaggttgtatttggtcgggctatggcttttaaaaaattagctgtagactgtagcattttaaaaagtaactatgaaatatgggctgtgatttttgaaaaagctcatttgaggatgcccaccccagcattgcagtctcaatgtcaatccttacatgggcagcgacgccgcgatgctctggaggcagcggcggcagtcgtccggcgagaggtcgtcgacgcactgcacgaacgcgtagaggctgtcgccgccgtcgccggtgatgttcgtctgcccgaacgcgaaccgccggccacgggaagacgacgacgacgacgcggcggcgagcgcgaggcggtccatgagccggctgagcgcggcgccgaactgggcggcgtcgccggcgctcgtcatgttggggttgtagacgagaactcctgggccatgtccggccgcgccaggaacggcgcgccgccggcgtaccggagcaggcagttgttgtacagcatggcgccgcccacggcgcgcgggcaggcgagcgacaggttgcccgccgccatggccaggcagagccggcacacctccggcggcgcgtcggcgtagcagatggcgaggccgtgcgcggcgccgccggcgtcgttggccaccgcgtatccaccgccggacaccgcggcgtcgacgacgtccttcagcacgccgcggaggctcgtgccgtaggcgctcccggcggtgtagttctgcggcgagcactccgaccacacctgcaccgtctgcgcgaacgccggtggcgtggtgcgcgcgacgcagacgacggcgacgacgatggcgaggagcacggcgaggttggaatccatggcggtcgctgtgtgcaaagcgagtggcactagctctagctatatagcagtctagcacctctttagctatggagtagaatggagtattagatgtagttgatgatattataagtcgtttgacttttttaagttaaactttgttaagtttgattaaatttattgaaaaatttagcaatacctaaaatatcaaattaatttttattaaatctaatattaaatatatttcgataatatgtttgttttgggttaaaaatactattatatttttatataaacttgatcaacattaaaaaagttttattaagaaaaaagtaaaacgacttataatatgaaatggagtatgttattgtgcaccgactctgttttaacatggaccattaataaatttttaaggaaaacttagtgcttacatttataatacaacaacgtttaatttataagctctgataaaatagacaaatgataataaaattttaaatatgaatagcagtatagcactcccctataaaaaaaaaagaaagcagtatagcacccagtgacaagtatataatggaaagaatatgcacaactttttcttcctatatttgacagcacaatgcatccaactgtctttcaagtatataatggaaagaatatgcacaaactttttcttcctatatatgacagcacaatgcatccaactgtcttttagccaataactttatgccaaacttgttttgtgaatcatgtgttatacaatgctattctatatctttaaacaccagctgacaatttttacagtaagtagctagttatatatattatcgtacctgctttgtaagagaaggtgatgagagagaaaaagttagcaattcctaaacagtcgccaggcacaaaatcatcccaatacagcatgatgaatccaacagcctgctagccaataactttggcatactcaaatagtgaatcatgtgatcaagcctactccattcgtctcatattggaagagattatatcctcaaaaattaataaaagtgattttataattctaagacggtactttattcttcacctaccacctttgtaactaatttattccttcatatgatgttttttactaattaatttctccaatcatcactttcgtattgtcttttttcctttcgccactttcttattttttgcaaaaaaaaaagtataatcccttatatcttaggacggaagaagtataagtcaacgttagatcgttagtaatatatgacgtgaaaattttttgtaaccaacagtactactattgtgttttgataccatagatataacttcttgactttaagtgtactttctgtctacaccctaagtaaaaaaaaagcctaattgtagctataaacctgcatgtgtaaaaatctaatcttagctatgaagctgaatatgtgctcacattatttataattagaattggattttttttatgtaaggagtacatgtgagcaattaattagtgctgggctctccagtaatcattcatattaagaacattaataaagtggaatcctaggaatacttaggactggggtcagcgaggcccatgtgtcaatgaatactaacttaattctctgagacagtctcctgtcgaccaatagcaagcatgccgtctttgaccagacaagatgcaggtctcgtcaagagtcattttatctctggcagtttgctcatcattttttacttggctgtgtttagatctaaagtttggatctaaacttcagtcctttttcatcacatcaacctgtcatacatataatttttttagtcacattatatccaattttaaccaaaatctaaattttacgctgagctaaacgcaacccatttgtttcaatggagtgtgtacatgcaggaccaagaaccagctactgatcatttcaatgggccgacaaccagtcacagcagcagcaacgatacgtcatatattttagacgaagagtagtataataagtagaactggagtattccgctgccaatgaaatgaagtttattttatagcaagaatggatttatagggtggtcctcagaccacgcaaaaaattcgccaacccatatactaaatataggaatttaggaaaaaaaaaagaactctaacacatgaacacagcctagaaaatgaggtttagagtgcatccaatgaacatgcacttgtttccaatactccctccttcccaaatgttagacttatttcatattttaattttttttcaaatatgttaaccatatttgtagttttcatttatctaaaacttaaacgaggagataaattaaatgtttaatcggaacctgaagagtcatcttaacccttattagttgtctctttttaatctttattacatgccagatgtgttaatttctcctttgtcttggtgataaaattaatatgtttaactcttttggtgaaaggagtactacctatgagcccattaagaattatttttcaaatagaagaaagtataagagaacaagattatctaggaagattagtaaaacaagatatttagtcgatacattacaaaaaattacttttactaatcatccctcctcctcgatcaaccagccaagattcctgtccaaattaaaatgctataaccagttacttcctccaatctgcaatgcaattaacagaaacatacaacgattgtaatgacagtccaaatccacgtgcatttactcaacttcctgtacattttcatgaacattatattgtacttccctacgaactaaatagattcccccaacttccatgtacattttcaggtacattgtactgagaataagtctaagaaatccacgggagcaatccccttctataattgcatcgaaaattcttccttgaaaatgaatggcacaacagaggtactgagaaagaagtctaagaaatccacaggagcctagcaatcccttcttctataatggtagcagaattcttcctcgagatcgactttttactatattagaccagtgttacctcatcaaactcgagtggcttcggccacatgcccacatcctcaccaactccacctgctatgaaatcctaggaagatgagaggagaggaaagaaggcctgaaccctagatcccaaacagggaggggcgacggtaatggcttgccagaggaggaggagaaaaggctagggctggtgagaagggaggctcaatggtatcttgagtatcttgagcgagggaaattcccctctgtaaacatggtttggttcccaaggatcccacatgaaacgggtttggaatacctcatcccgtgggctttcaattggataagagaattggcccataaaattttctcgttggtcttttcttcgggaaatgggtcagaatctcaacagaattcaggctactaaatgagacatattgtggtataaaacttttctcccttgatcgatctcctccaagctctcttaaccgaacaagtagagacggggatcagctagtcccatatactccctccgtcccatataaaaccaacctaataccggatgtgacatatcctaatactacgaatctggacatacatatgtccagattcatcgtactagaatatgtcacatccgatcgtagatttattttttatgggacagagggggtataaggtggtgtt

SEQ ID NO: 26726 - DNA, 9547 bp, Oryza sativa
gccagcaggtggcggcggcccatcttcttccccatcctccgacgacggccacaaccggttgtggcggcgtctgcgttggcagcatacgggggcagcaggccacggcgcatcggcggcggcaggcggtggcggcggctgcgggcggtgttgcggtggccgcgacgggcggcacgcggcggcggcgtcggcaggcgactcgcgtgcgggggcgtcggcaggaggcagcctgggcgacggcggcggcctgtgcggcggcgcttgcgcaacggcttgggaggcggcggagatgtgtgggcttcccggcggcggtggctcgtgggctgaccggctgcggcggcaacgtcaaggcgacgcctagaaggtgttcgatgaaatggcgacaaaggatgtagaaatgtggagctgagtaatctagccaaacacttttttacctacctcagctcctagaggagctagctctcaccggagttggagtttggagttgggagttggagttaggagctctaccaaacggggcctaaagttaagtccctgatccaaacaccacctaatataccaacttaataattctaaaatgaggctgttttctgtcgagcatgcacgtcattgaccagaccagatgcaggtcaagcgtcaaaagtcattttatctgtgcttggtcatcattttcctttgatttcatttcaacggagtgtgtacatgcaagacaagaagtaacaagttgagataggccgacagcagtcacagcagcagacaagtcggctgagttcctttggacgagatgggaaccaatctgctcacagtccattagcacgtgattaattaagtattagctatttttaaaaaaaatggatcaatatgatttttttaagcaactttcatatagaaactttttgaaaaaaacatatcgtttagcggtttaaaaacgtgcgcgcggaattcgagagagagtagttgagaacatcgtgtgccgaacacagcaaactcactttggaacaagaaaaaaccaagggatactaagaatttttatcaaaaataatcatacagaaccctctaaaataaagaattggttactacccatttttaaaaaaattcctatgaaatagactattctaatgatttttttaaaaaaaaagtatgaggtctcacctcatatttttctctgcatgtgtcagactttctgtgttttttgtgtgctaatcgaatgatagttttgaaactttcatatgtttcataatctcaatgagtaggacattctattcctactttttttttctatttctatctttctttcaatcctacgtttcaaaggggcgaatatataatggtaggccatgctaccaacggatgaaagtattaatctagtcgttgtatttgaatcagaggttagcttgagcacgcataacgagatgagcaattagctcattaactatttaaaacttgaaaaatatatttaatttgtttttaaaaacttctatttgtatttttttataaaacacaatgtttagtagctcagaaaatatgctccctaagcatgataaattagctatgccattaacatgattagaactaagcgtaacaccttacaggtttacaccaacaaatattgaaggaggccgttcaaacatgatactccatcttatacagcatagatatatatttaaggtgtatatgatgaaactattttatatctttggtaagcgaaacacagttgtagtggaggcgtgagtgaataactccatccaccaaattaaatcctattgtcaattaatatatttgtgtattctcatattacagaaccagaagttatactttcattgtacataaaagggaaacatcacatctatttttttaattttaatgccatgttagtgtagtactgctcacaaagtcacaagttaggtcaattacctaggactatgcattgtgaagtacagagaatgtatgtaattgagaggtcatgtccttcgatattgtaataactctgtttaattaacaaaaatccccctcccaaagaaaattttcttctgagaaagaggtaatagaacaaaacaggtcagtatataccatggatgaaaggaagcctcagtagagattttttactccctggttaacaccaacagccatttcagcacaatagatcacgatttagaaagggtagaggcctttcatgttaagaagagccactatatacaaaatgttcagaccagaatggagatatatccacaaaatcgaatgggcacatagtttcacacccattccatccccattcacaagtccgaacccttaaaacattggatcatttcccctaaaatgctagcaagtctccagggaacaaaatatgaactgtacaacatcctgcaaactcatgatcaagacttctcatgtaaacagcatcttcagttgctcgatacgagcggagcggacttcatcgtcggtcagcgccccagagatcatcctctgcttgcacgcttgcaccttctgcatccgctcctcgaccgtatcctggaatccagacagaatgtgtttttatttttgctgtgctttctggcaaaagtgagcagatgttgtgactgggattgtcaatgtccttaccttgacgatgaagcgccttacttggaccgctctcttttgcccgatacggtgaattcgcatgatagcttgttcttccactgcaggattccaccatgggtcctatatgaatgcaaaaaaaaaaaaaagttgatgtgaccatttaggttagaaagttggtgcaagaataagtatttgcaggtcattggattgacagtgtatagttcaattaccattaggaacacattggaggcagcagtcaaattaagtccaacacctccagccttgagtgacataagtagcacctaattttcaggaaaaaggattttcagaatatgtgatgcttcaagaatcaaacgttgcagaaagtaaagcaagagtacaactagaaatgtatgtgcataccagcttgtccttgctttcactgaactccttcagaaccttttctctgtgtttctggctgagcttcccatcaaacctcaagaatttgatccctttctgattgaagggaacctcaagaagatcgaagaaggaagtgaactgactgaacacaatgctcttctccctcttctcctgaaggccctccaggatcttgatgagttttatcaccttacatgagtccttccagttattctcagggtcaacctggaatcgacactgactaggcaatgtgatcagctcagatttggtaatggggcttcggcaaagtgggcatggtcctccagaaggcgtcctccagctagagagcaggcactcacggcacatccggtgcgcgcatggtgtgagcactggatcatcagaagctgattcaaggcagattggacactcagtagttgcgccctggcggatttcttcaacaacctcttctacatacgcctgtgaaggtggcgcactgcgtctcgcggaatcacgttgcaccccatcaaggaacctctgtgctagctcatcgaggtcagtatacttctgagtatcagctcgactgcatatttagaatttaacaggagttagaaatgacatgatgaaaatgtaagggagcatatttctttgcaatccatgtctaacctgatcactagaaaagggtggtcgcagcactgccttagccgaaggagtaactcaagaatattagcgtagttgttaagaacactgccttgtgctacaaatttatcaaattgaacctgttgggagtaccattttgtgttagacaaaaacaaatctcagccatgaacattaagaactatgggaacaatggtccaaagaacaattcagtgaaggttccaatttcttatattaacccaaagtcctgaacaagaaaatttaaaacaaagatacctttgatctcctgaaaagcgcttcatagaaatcgcgttcatcttcagattgttcgcactccacaatctcaatattagctggtgggaggactagtatgggactggaaacaagcatttaattgttgtgagcaacagtacttccaagagctaaggcatggcagatgataattgatgcagtttattgtgttgacaaagtaacaaaataataaaatgcgtactttcccattttgtcttttgtttccttcgttctcctcagcatgagtggcctcagaatagctctgacaagtttcaatcccctctcatcaccattctcataaggtctttgaatcagcttattccaccttttgaaatcaaaacagcttgagtcagattttcaatcccaataacacatcggattagattttatgtagccagaaaatgttcgtaccaacttgcgtcaccccatggttctacatgtaggaagcaaagaagactgaaaaggtcctccaaattattctgcagcaaatgtgatacggataagttagcttactagaaactacaaaactattcatcaatgcttcaaattctggcagttcaacaggaagtattaaaataacaaatggcaatggttgcaaactcacctgcaatggtgtacccgtaaggcaccatctgcaatgagaagttaattcataagctgctcgtgctgctttggttctgggagatttgatcgtatgtgcttcatcgagcacaactctataccaatctatcctgtgaaagatactgctgccatcctgtaaatagtaccatttttcgttagttaaaatataatgaccacttcttgcaaaaaaagctatgaccattacactgtagagaaggccacagtccaaactcttacattcttgtgagctgattgaagaacaccataggttgtcaagacaacactatgctgagccatgaatctcaggtcagtggttctgtcgccaccatagtagacaaacacagaaagagctcctggtgttgaatgtgcctccaattcatcctgcaaagggcaatgatcacattactagtcttgcaaatcaaaagttcctagcagaaactagaaaaaggatcaaacaagctgcttgaaaatgcaaggctggaaaaaatgaagacaaaagaaagacaaacctaaaaggttcccctttcaattgttctcaagttgaaagcaagcaaaataaaatacaactataaaaccggaaaagtacaatataatggtaagcatagatataatttcttaccttccactggcctagcaatgccattggacagattataagtgtgcctcctcttacagaggatctcgaagtttgtgccttggtgtcacgatctctagtacccctcttatcttgttctaactccccccttgggtttgatagtattagagcaatagtcatgacagttttaccaagacccattgcatccgctagtatctgcaaagcaagagatgacacatatagcaccatcagattaggcagatgcaaatattcatattctaacaaaaatttcccctgaaaaacatgcatatatacaacttcctcagaaaaaagtgcggaaagtgagaaagcattgcaaaagcaaccatttcttcaaagtttgtaaaccccagcaaccattgcagtgttcatcaagcatgcaaaagcaaccatttcatttgtttatattaaagttctagtggtaatattaaaaaagcatataatgctgcattgggcaatctaatgagactacaaaacaaatcagggaaagcagaacactaccatctagaattgtcattaaaaaaataatactgtctatgtacagcctaaacaaggtacaatgcgtatacgagtgacccttaaaacaaaacaaacttacccctcctcttgctgactgagttacactttgaaactgggttgttgcctcgccagtgaaaacattgacatacactgcaggagctctcctggaaacaaacattacaacttgtgaatatttagttctggacattttcctaattaacatttcgatgcaactatgcaaatgaaactgaaggaacatacttgtcgacgattttgtaggcactccaacagggatgaagggtttttttggcttgatcaccatcaatacccttctccaattgagacatccagaacagagcttccttctggtatggttttagaacggagacaagagtgcttgggggctctgcttcctgtattccacagattgtttaaaatcataacattgttcatatacaaacattccgatagtgcagagtggcaatcaaatagaggtcttgttcttacctccaagtcatatgtttcagcagtgccaacaattttgtttaatgcagcctctgaaatagcttgctcatcagtgccttgctcaggaaatgtttggccagctgtgcgtcggttttccaatccaactatagccatgggttcatcttcatcattgtcatcaccctagttcatgtatccaaaacaaaaagatcaacaaaaagcacataactcggaaaaagatattacatgctagcagaaattatcacggtaacaattcataaagtaatttagatcaatgccacaacgaagtacattttgttttagcaatcaattaagtatatttaatcaaaggcttgctcttctgtactacatgctacagagacatacgattgaacaaataatcacagttcacgattggcaagagaaattgaagctcacccttagattccgcggtctctttcctgcagcaagctcctcaggagtgatatcagcctgcccatgacacaagcattagcatatacaatcatcaggatcaagagcactacaagaactgaagagtttcagggaattgacatgagtgctaccttggtgaatgcccttagcttgagcaatctgaacagcctgtaaagagggttagtggaataatcaacatttgcaggagcaagcaggtcccatgatgagttgttgccgcttgcggtgaatacagaacggtggatgtagaagctgcagaaaaggaaaaaaaaaaaacattaccatcaacaatttaacacaaatcatcacaatgacacaatacacaaactaaaaaaaagaagaaaagcaaacatgcataatcaaccattacctaacatacaacaaaatctcctgcatcaatctcaattccaccgtgggaaacacaatcttcccctgaatcttcaccttggatgagcttaccagtggcacgaggcacttggtccattctgtagatagcttcccaatctacaataacaatgaaaaataacagaaattaatacaatttctcacaaataaatcaaccattaccaacaacattattagaaatgaaatgatagcatcacaagagcagcaaacctctccagctcgattggtggagaagcgcacgatctccgccaaagcagccgccttcttgttcgacaccttgatcccaccataggtcctctccaatgaggggaacgagaaatggacgagctcgccggcgtccagcctccgcctcccgcggttggtggacaggccggtgacgtacgacctgccgacgaggaaccagtcgcgctcctcggggaactcgccgaactcggcatcaggcggcgccaccaccatcctcagatcactcgacggcggaggcggcctggcacgcacacgccgcgactcgagcatctccatggcctccggtggcggcaccgcccggatcggcctcgggttcaggtacggcaccgggtgggtcgccgtgaggtcgatggtgtccgcctcgtcgtgcacgcgagacctcttcttcggcctcggcaccaggcttatgccggcggcgttcgccgtcgccgcgcctcgcttggccgcgacgccgtcttcctccttgacccgatccggcatcggaggcggcgctttgacgagcagctcgtcctcccgctccttcttgaccctcgcggagcagccgttcgattcttggctccccaggggctcgtcgtcgaggacctcaaccttcaccggaggcggcggcggcttcggggcggcgccaccagcgtcgcgttccgccttcaccggaggagcagccgtcttggcacctttacccttcttgggctcgggtttgtcctcgacgccggcggtggcgtcatcgaggagcgcgttgatggcgcgctcggcgttgcctccgcagcgggagattgcggcgacgacgcgggcctcggggaggcccgcgccaagaaccgcgcggacggcggcgatctcgtcggcgtagagcacctcctgggacggcgactccggccagtcgccgtgcatgtcgtcgccgccggcgagaacaacggaggcgggtggatggaggaagggattgaggcggaggcggaggaggaggaggagaggattggggatggagaaatggcggggactcgagatgggtggtgggttttaaaggaggtttttcgcgggaagagaagaggagggaacccggaaatgtttttggcgcgagaggcaaatttttaccgcggttttttgagggagtaaatgggtgggagattggaaatgacagcggcgttggaaattgcactgctcggcctcggtccatgcgttggagtggactggatttgtcacaaatctgttcgaatttctgttgaatttttatcgcccaaatttagagcttcccctcacaaaaccgcccagtttatttttgattttgaaccaaactcacaaaatattgtgaaactcgttatctcgtcttgggtgttgttttctgccacgttgggtgggtgaattcaggttgttacatgttcttaactataaaaaaaatattgaaaaataaactacgataaaaaataatcccaaaatctaatccaaatttaatgttgaaaatttcaatttttgctgataaatagtataagcataagctaaaaatgaggccaaatgtctttagtgcgcgtgcgaaactattagtaatttatttgtctttagacctttacacatgttgttaaggatatccaggtagcacatgtgcatcttattatcatagtgtcattcagattccagttgactggctacttggttagtttaggactttaggtcagcggatcattgtcacgttgacttctcgtctgaccagtgaccacaaagggaaagaataataagggcatgtgtaaaaaatacaggaatataataggaatgcatgtgtaaaaaagatgattgaaaaatgtagaaaatttgtatgagttgatgttcggatggagtataccaaaaacacaggaatttttgttagataaattgaggccgttagaacaaaacacaggaattctcaagctaacgagctattctcagttgtccccatgcttggatgatgtgattagcagcttccccaagcgaaggaaatcaaaaaaatgagctgtgagtagatgggaactttcctgtgtttctgccatcaaatccgtagcaaaggaatattgcctttagtattcctatgactcgttccagggatgatccaaatgcggatagcctgatacagtgattcaatccatatgaatcaaaatcctacacttattatccttcattccaaaggaggcctaatacttgtacatgttcttgtgcaccgcctagcatatccagaaacatgaccacggtggattaacaatgagatactccctccgtccctaaatataagggatt

SEQ ID NO: 26727 - DNA, 14431 bp, Oryza sativa
atcccttatatttagggacagagggagtactatttaaagataaattagcatctttcggctgataaactgatgtatgaagaaataagtgtgtaaacatgttcacaatgaatccaaacgtaccgagaggtatattgggcaaagctcttctgaaaatgaagatccacttcaactttttctgagcggttggttcagatccaatccaacaaaccaggatggaccccaaaattccagttagagagttgttgccgaaggagcacccaggccatgatgccgttccaaacttactttgagaagaagaattggacacaataatcgaatgaagaatcccatggtttccatatcaaacttgctgatgcaggattgatcatctcccaaattgcacatggtatgcagaattgcagactgtatccccaaaggcattccacttccatctgactgtatcctcgaattgatccgccaaggacaagggtactttgcaaaagcagtttccaaatgctgagatatacggtcagaagattacttgagagatcatgtcaaatgtcttccacccgttgctcatttcgcatcgcacaaaagaccatactgttcttccttttttgagtgtttgtatggatttggctccaagcttttgaatggtcgcagtccggtccaatttgattgcaaaaagattgccttgtgactacaatgacaacatctgtgggtgcagcaaatagagcttggcttgtgtgattgtgtcattgcaaggagtcgatgaacctactgatgggttgtttcgagcacctcattcataccactaggccaagtggatctggagagctctagcaaatttctccaaatatggtacttgaagtcctccaaattccatacatgagcatgccttctgccaattcactttacattttccaccatgaacctcctcatcctcagccaataaaagtgccttctatccttgctgactttccggaatatggccaagacatgggccaaggaaggcaaaaactctacttttgccaacagccaagttaatacaattctaagaatgcgtgaaaaaaatggcatgacacctgctcaatgtgaccatctagccatgcagtcaagtttacatgtctgtctgtttaccagagtcaggcgaacaagcagagcaactcaggtgaggatcatcaaacagaaaagatactatacatagccctcaagcagcatgcatccatttacctccttgtgctccacatccttcagtggaaatgactagctcccaccaaacgccaggtgacctggccctttgaggctttttttagagaaaaggccgaaacgaccctgcttactgcttatatagaaagcaaaatttgtccttgctggggtttccagcttacatcaaagtgcatacatcaaccaaaggggacccctccggcccaactcaacaggtttagacaagagcgtatacagcagacatagcagacccctccaacaaagtaccagaccgtaagaaactctaactaacccaccccagttctagcatttcgcagttcagcacagcagtcctttagtcttcttgtcagcaactccagttcatcagtctccgcaactttgaagagtggcctccactgcattaacaaagaagtgatttggaaagggagtattagtggggagtaggttattttatcacgaaaaaccatgttatttctggtaatccaaagagtccaacaaacagcagcaagcagcgccaatttaacattcatgtgtttgaaaacagttctgagctgagctaaacagaaaaaatcatcgaagttgacaggtatccggtcccaacccagcacatctctacacaaacaccaaacaaaagtagccatagggcatctgaaaatgatatgttttgttgtctctggctccccacagagtaaacacaggactgaaccactccaacccttttttgctaaattagctgaggcttgaattctatctctcaaacctaaccagatgaagtgtttaatctttagagggcaaggagcactccaaagctgttgtaattgggtgtctatcatccccctgaaagttaaaactctgtaaagggactgggtagtgaaggttttattatcctttagagcccatctcaaagtatcataagtctggctagtgctaatgttctcaattatgactctcagctcttcccattcatccatctctcttgggccaaaagatctcctaaaagacagcccctctatcccagcctgtttgatttcagccactagtatagattgttgattgcaaatctcaaaaagtaaggggaaagatgtttttaaaggacaagggtgaacccagacatccttccaaaataaaatgtgtctaccatctcccactagccattctgttcccagtttcacccaatctctagtgcttagcactcccttccagaattgggagccctcctcagctctgcactggaacactccaccctcttgaaggtatttgttccttaggagggaagtacacagactttgatccggagattctagtttgaaaatccattttgccaacaaagcaatgttcatagctctagtttcagtaaagcccaaacctccaaagtcttttgggaaagccatatcctcccatttcaccatatggtatttcccatttattttgtttccagcccaataatatctccctctaaccgaatcaaatttgtggtgaacaccctcagggagggaataaaagcccatagcatatgaaggaattgaagataagcaggcattaatttgaatagctcttccagcatgggataggttacccatccatgttcccagtcttttttctaacttctgccctttgaggctttggtcactgtccagataggcaggagctccacaacaaccttctgtaccagcttctcctcctgaaagtttttcagaagatatgcaaagtctcctccagcctccctaaaatccaccaacacactacatagccctcgctgggcgagaatttcaagaatgaactccaagctcatccgatcaaggactaaaacttcaactcctggtggcttcacggtgacaggactgtcagtcagaactactgcctcagatgcgcattcttctctgagaaactgaatatttaattgggaatttcctccctgtgctatgatgatataaagaggctgctttgcaccagcttcatgggatgtaggcaaggtagtcatattgaccgaaatgcctgaaattatgactccatcatattctttcagtaactgtgagtaataccctccgggttgatcagctccagtcccaatttgatttacgacgactccattcacagagagcgtagttctgttattcatgtggcagacaaaccatcaccgaattgcacactgtatttcaaatgaaagggaaaaaaacagcatgatatgtcgtggaacagaagatgacaattattgcactaacatagcttaatcagttagcatcctaaatttggccaaaccacattgtagaagaactatcgcggtagatatgtaacattgtttgcttgcaaaaattagctacaatataatacgcgttagcagatccataattgcaaaccatgtgtactgccattacctaattaaataagtgcctcaagaaaaagaaaaagaaataggaatatggttgcatatttacctcaaagttgcaaaggccttcccagtaagcatgcaatggatataagcctcatttaggttgcggcataacgcttcttcctccatacacaccctgacatcaatcccagcactttggagcctttcaatccccttggatgccacaataggatttggatcagtcatcccaaccacgacatccttaagtttggcattgatgagtgcttcggtgcagggaggtgtcctcccgtaatggttgcagggctccaagctcacataagccgtcgcattctctgctaaatccctagcatctctcagagcaaatacctgcggttggtaacactactatgttagtatactagtatcaacttcgttataaatcagcattaagttttctaagtaccaaacggacatttttcttttccataatcatacactgtgcactggtttttacaatacagagctgcaatttcgctcgttgtattaatatctactaattccttaattttttcatacacacatcttacaatgttacagatggtgtggcaaaaatcaagattaggcacaatattctatcacacattgtgcgtgatgattccatctggattgaacggatgtgaaaaatctcgacattcttaatcttgcacgaagcaacactaattaatgaataataatgatataaaaaaaagccattctattattcatgtaccaaactctaaaatgagagttcgagaaaggggaggcaacctcggcgtggggctggccggcttcggggtggaacccctcgccgacgacgcggccgccgcggacaacaacgcagcccaccatgggattcgggctggtgtggccggccgccttgcgcgccagctccacgcaccagcggatgtagaccccgtcgtcgtccatgtcggcgcaggccagccgcggcgcacccgaccgggaggcgcgagcggcgaagggaggtggaggtggaggcggcggggcgcggggtgaggtggtggcggcgcgagagcgagacgggcgaggaggccatggccgcggcgccgaggaggagaggacgccgttggaagtcgccgcttccggcgaagggacgggcggacgggggtggcgccgcggcggaagcaaaaaaagaaaaattacgagacctgccatttcgttgatctcctcctctcttgtaatgacacgtggcgtttcacaatcttaaagcaaaacgccaacctaagagcaagtacagtaacgggctacaaatcggtaataaccacacccacacggggttaccggtgaaaaatcacgcactcgattgtcgatttccttccacgcgcaaatcaatcgccatcccttttccttcgcaaccttcctccgcacatcgccccatctgcctcctctgctcgccgcaccaactcgtcctagcgccatcaccgattcacctccagctgccgccaatccgcgctcgcctcaccgtagatcacgtcaccgtccgttatccaccgagacttcattaggtcatcgtcacaccacctcacccctatccccgccagtctccgtcgcgccgtccggtccgtgggctcgctctcacaccaacaccgtttcctataccggccctcacgtccggtctccatagctctatggcaagtttgcttctgctgtccagtttcagtttcttctccctcccagttcattattttcttttgcctatttgattttggctacgatgaacgagagcaaaactattttgtcctgcacaggagatgttcgattgagtgccgcataaacaatcgccaacactcttagtcaaacattttgttgtcgatggtaggacaattttaagggcatgtttagtaggtgaaatgaaaatttttgagtgtcacatctgacgtttaaccggatgtcggaaggggtttttagacacgaatgaaaaaactatgcaattagtttttctttttatctatatttaatgttccatacatgtgtctaaagattcgatatggtatttttgcaaaaagttactggggaatttaaacagggcctaagtgtccgccaccagtgatgtgcactagggttcccgatcttccaaaatgttctgataaacaacaatttgggcggagtcgcaacacaaatcgatccggcttcttgaacgcacacgctcttgagccccgcaatcgcagcaccacgtctcttctggttatcacccatgtcgaaacgcggatgacctcgccgagaaggctaatccctgtttgccaatcgaagaacacaaacaagaacgagatagaaaacaagcaaaattgcacatgaatgattaagctcacgagttggggtcttacaaaccgatctagcggtgaaactgttctcgacatattaatctaagcaaaacccaaaaacctaaagatggcggcgggtactgatatatagagtttagggtcatgcaaccccctctcgacacaaccctaatgggttccaacacgataaataggccaaaggcccaaatacggtgacgcagcaccgggacagattctggacgtcaacttattcggtcaattcccattgactcggaaagaatttggacgtgcgaccaaaaccaatggaaatgttatcttcttagctttccatccatataaaaaacgccccaatccgagcacgtatacgacctggcgcccgttttagtgtagactggtcctagactccgaattacacccgacgtcgacttggtttgggcctccaccttgacttggacatccttgatgatcctccatggctctaagtccttctccaagtgtctccttgttccctccattgtttctaatcataatataatcattatgtagcaatctagtctcgaattcatacaaagaggaacataagaacgagctcacctctaaatttaattgtcgcgtacgagctcttgttatcggtctttgaatgaccgttggaagattgttgtgtgtatccgaggtagtgatgtccacatcatccagaatgttaggtcaaccaatttctatgaggaatttgtcaacaaataaaaaaactccaatttagtctgcattacttgtgttgagcatgtttatatctcataaatgcagacccgcaagaggtttgctctgattgtgacaacacgtcagtaagcaaggatgataataaaataaaaataaaagcctgataagttccttgtgttttcatgaaagtattttttaaccaatataaggatctagccagatgcaccaagatgaataactaactttctaggcagcagatctggtacacacaaaagagatggttagcaaaaattgttcagagaaacataaagtttgcaattttgcccctgtgtttttttaaatgaagaggagttttgccgctggcttggatggctggtttttccacaggaatccggcactcccctcccctctgctggtgggcgaggaccgaggagtatatcgatcgcctcggattcgcacggcgtcacctgatccacaaatcacggctaggcggttttaatttcctagctaattgcgttggtaccattgcaaacaccagaacgtgatcaccacctgcaattctgcatgcccattgcatgcaagccgctagcaacaacctacaaagaacaaccagctggaggacgcaaaagctctcgtacgtctcgtttggcgcaagaaacgcatatatacgcacagctagcacacataaaggtctacgaaaacatggggggcgacgcaactgcgatcaaactgcaatcaggtctctctctcatgcgtcccagctgctacttctgctagctcgctccaatccgcgtatgtcgtcgagcccgcgcgggttagcacgccgatgggggagttggagacggtatcgtactcgctggaacccctctttttaattagtaccataccgtgaatttttattgtgttgaagccacataaaagagggcgtatctcaatcttagctgcctggtctggtagtgcggacttgtaaccccatgctttggggggcatggagttggcaattgtgctagtcgtttcctagtaacaaccaaatctaaaagtcccttaataagggagacaccctcattttaagggagcctgcaagggttcgaccccacacaaagtaaaaaatgtgctggcgtcgtaaatggtttggaattgtggcagcaagtcagcccgcccaaactggatttcggcctcctagctagagaaaacgtacccagcctcttggtcaactccacatttttttcttctctctgtcattcataaacttcttgggtttttttaatgtcttcaccagcaagctaacccgctcaagaaaatgtcaactccacattttttccttctctctgtcatttataaatttcttgggtttttttaatgtcttcaccagcaagctaacccgctcaatatgtcattcataaactttttgggtttttttaatgccttcaccagctagctaacccgctcaagaaaatgtcaactccacattttttccttctctctgtcatttataaacttcttgggtttttttaatgtcttcaccagctagctaacccgctcaatctatcattcataaactttttgggtttttttaatgtcttcacgagctagctaacccgctcaagaaaatgtacccagcctcttgtccacactgcattttcttttcttgactagctgtcattcttggatttcttaggtttttttaatgtcttcactatctagctatctttcttgggatttgttttgccgccttcgctagttgttgttagggatttaatcacttaggtttttttaatgtgttcactagctagctgtggttcataaatttcttggggtatgttttgccgtcttcactagttatagtcaaggatttaaatttcggtttgaaatttcaccgataagcagatatctcaacctgaaattctcggccaaaaagaaggaagagaacgaaaggagaacagaactcggggcagggttgcgtgtgcgagccaagtggcgtaggtgcatttaccaacaccaaaaatttggtgaaggccaaatggtgatagcgctcacctgatacttggactcgaaggggagcaggtagtgtctagagattttttttttcttttctgccttattcactcaattcatttcatgttgatagctagttcgcgtggacgaatgaggtaattcctctccatatagtggcacatcactagcctttccttagggcctatacggcaagagaagggaaagtgaatgggagtttgaaggaggggattgatggtaggattggtcatgagagttacatttttagtccccatccttggttttgttttcgcgtcgaattccctccgagtcgcacgaattaacatgcccttggtaagggatcggtgagagttggaccccttaattccctatcccaaaccctctcaaattcccatgtcttccaaccaaattacaggcttaaactctcagataacctaaactcccattccctatcaccaactccctccaaccaaacaggtgatgtgcgcaagggtgtcccgatctttcgatgagagggataagacgattggatggagcgacgttggcgatacgactacaactatccagggatgttgtgccttagcaatcgttacaccaactccagaggtggtcgtgaatcttgacggatgcacaatcacccaaccacgagggtatttgttcctgcaagcaatcgagaaccagcaagaacaagatgaataagcaactcaatttgcgaatcaaagatattggaatgaatcaacaacagtaacaagtggggttcagtaacaagcaattcggcgatctaatcgatcacgagatcaactcagcaaagtagcgacgctatactttgatctaaacaaaaccaaagtgttcttggcagtggctagaggtataagaagaagggaagaacgaccacagggtcgtgctcaaaccctaggacgtgcccctaatgggcccaacttgatacacaatccattgggccaaaagaggtgacgcagcaccatggacagaaaatagtcgggagtaaaataaaaattgcggccgctccagaatagatatggacatgtggctagatccatttgaaagtagacctgataagctttccatgaagtacttgcatgcacaaatcggagttcgcatgaagtcctggcggccgtcagaagttagcgttgtcctgcagtccgaatccaccccgcgcgaatcctctcccctttggatcctctccatcgttcctaagtaaaacaagagtgcacacgtctccggggtataaagaagaggaacatgaactcaagaaagaactcacctgatagttaagttgacgtgtacgaacgcgggtaataggaccatgaagttgtacttgtggggacgtggatgtatcgatggtgttgatgtcctcaacaggttgttagggttgggaactttttgtgacaagttgacaagcacgatcgcaacacttaaacgccttgcggtgatatggagtcgccaaccacctcggtctagccaaaaggccaaatcaagatgggtttttgtagaaaacggctaaaccggctagtgaagctgatttagagatcaaaatcagcctctaggccaatttagatcgatatgagataactatccatctcgtgggcaaaatggaaggttttcaggacaaacctacaaagaggtgtcgcactctcgtggcggcggcggactatttacggcgcaaatcgacaaagatggactaaaactatgataaaatagaaaatatggctaaaaagtaaaggtaaaagaaaaagcgattcaagtggattgtatgttcggggattacaattgaaccggccttatcccttaaataggggttggttttgccctctacaggccctcctccacatccaactcagaatagaaaccaaaggaaacccgaaaatacctttccaagcaagaaaacccaagacccgatgaaaatagactcgggctcgaaccctgacggtctgcccggccacataattgcggtcagaccggagttcaggccgcagtcagaccgcccatataccggcggtctgactggccctgacggagcgtggggctcctcaccgggagaccgcgcaggcccccctttgccggttcggccggggactcagggtgagattctaagctctctgtatgtggaaggttcgcgagacaggaaacacacaagacacgggcgatgtatacaggttcgggccgctgagaagcgtaacaccctactcctgtgttttgggagatctgtgtatgaaggagctacaaagtatgagccagcctctcccttgttctgggttccccctctcccccaaaagtccagtcccagtgggcaaggtcctccttttatatcttaaggggataccacatgcaccatttctctcttttttgtggggacttaccccaccttttcataaatggacggagatttgtatagttgccgtccgagtcaccttctgatgagacggcccacaactacctccactttcgctgggagcagatgcgacgtggaatcgtggctgtctgctgacgacatgaccggtgtcagaccagtcacgtcggtcattcttgtccaccacgtgtcagcttagcaatctacatgttcgcccttcttcacacaacatcttgcctgtaatggttaggatgaagcctggcatatatctgaccaggactaacgtgccatctctgggaggtaacacgctagctccagctggggacgtgtcacatcctgatttttgtttcaggatttataaattatttaataaattattattagaatttatattaaatgttcattaatttacaagtgaagttaaatgtgggaaataaaatttcctaaatttaaagcatggatggatttaatttttattaaattctccatggttaattatactctctggaatattctcggatttttcgaagctcaattcctaatttttaatcttacaaagagtatttcagtaattacccacatattaaattaatcattaaatggtctaattgtaatttttttaagtactttgagtgtccaagtattttcaggatttttcttgaaattatttgagcattggaagtatttttaacaattcaaagatcatttcattgattaatttaattggaaaagtaataataatcctcttcctagtcttgggccctttccagcccatctccctcttttgtgtgcacggccgtgcagcccaagtcagcccagccgagctcccccccttctctttctttctttgctttgttttcagccagcccaagacaaaaagtctaatttgcctccctcgacactgtttatcttctacctcaagcagccgaactgagaccgatttggctcggttttttctcctccaaatctgacctttccccttgtgtttttctaaaattagttgaggggaaatattcctcttatcctcctctatctttaaccccaaaaatcggagcaaatcgttgagtatcttatccgaatcaaactcgttttcgagtttatctccaaaaccgagtttttgatttcccggatcgatttcttgcgggaggagtccgatctcttcaatccaaggctataaataggaccccctagtcctcctctttcgtttgccccctctcccgtcctcttccgtgctccgtagctccgtcgccaccgccgccaagcaaaccgccgccgccggccatctccggtgccgccgcgccgccgtctccatcgtcgtcgccggtcgccgtcaccaccgttgggtgcgccgtggtgaggggaagctcggccacccttccttttccgtcgccggtcatcggagctccgccgccccgtgcaacccgagccgccgccgtcgcctcctcgtcgccggccgtcgtcggtcgtcgtttggcacgagggtgagtatcgttgggttcgtctcgtcgtcctctacgtgttcatgtcctccaaatccgcagccggtcgctctatctccggcgaggtcgccatcttggtccggccattgatgaggtcatcatgatgtcatcatcgtttttctttttcctgtttttctaatagattaaatcttcggaaattcataactaaatcatcgtaactcggttttgagtggttcaagttgctaaattcatctaaaatcatgatctacatgtttgtttactttatatgtactatttatttggtttttattagtctttttctttgttttgcgtgttagcttgtcgtttccgtcgttgcgaaggttcgtgagtgcgtcaggagtgttcagaagattaattgaagaccgattattgcaaggcaagtcacacagatcctaaacacaataatcctttgagcatgttgatcctatatttaaattctctatttatttcaactgtgcatttattttcgaatgtcaccgggtggtgtgaacttattcctttgttatggccaatttgcattgattactttattccttgataccttgggttattataacttgactagttgggctttatatattggttcagctagatattagttatgattgcttagccatgcttagaaacattagcacactattgggataacttatgactcactattatttaaggatggcttaatgatagttcacgatggtcaatcgtgattggttaattaattacttgccaactaaaacttgataatggtgggttgtgagcatatggttttgagagtcgtgctcatgacaattaaggaccggttcgcgagctactgttgtgagacatttaccgtgccaaccacaagccagcgtgggcaacggctttatcttttgtatagcgtgattcattatagtgcgccagactgagaagtggcgagaagtccacgggggtcgctggggagtccatgcctctggtttttgagggggtgattatgatccaggaaaggtgcgctgtaatgggttatgttgtgcaaggggtattgtcacaactcctttccgaggtaccgtggtggtattgaggcacatggtgacatgatgtggggttgtgtcttgtgggtacagtggtacacctctggccagagtaaaactattcgaatagccgtgcccgtggttatgggcgagttgagcaatgtttttcgtgattagtctcacacctctcacaataattatggatgttataactggtaataatttgcttagctcctggtttggagttagatctgtacagccgggtatggttgttcaggatggttgggcctgtgtagcatgggtgtgctgttcagtgttgattaaaatttttaattaattactctactgttttactactcttaactctttgctaaatgctgctttcgcaaatgagcctatattatgccatcctttggtatccttgtgcacttgcatatttgctgtgtggcttgttgagtatgtcacatgctcattcttgcaataatcatcaaacctcagttgaagataaaggatccagaaggagaagacgtttggcttataccccagttgagctgcctgtgggagtggagctgaagccatcgctagaccgttaattccgctgctgttttcttttcttttgtaagtgtgtaacgttattattatgatggatttgtatattaaattgtcagtttgtgtacctcggctgattcctggacgaggattttatgcacaaataagttcggaaattactagtgaatttccgggcgtgacaggacgagcgcctagaagccctcgtcctgacgggatggggcgaggcgtgcgtcagatcgcctgtcgccacctaacccgcgatctgaccggtctgtgactggtcacagaccggataaacgagtgcactgcactgcgttacatgcggcgtgacacgttcagccaaaccgcaataaatatggttaggg

SEQ ID NO: 26728 - DNA, 4861 bp, Oryza sativa
ctcggcccttggggccgaggcgggtgcggcccgaccccctcggggggactaagaggagggcgaacacatcaccctcgggcccaacgtccctcgggggtgccaggccacgtgtgcgattgtgtctgcctcaaacctctagtcatgatactcctgatcccatgtcaccgacagtagcccccggcgttatgccagggcgatcgccctctttaagggaagcggtcgggcgtgacgccactcctaaggcctggtgacaggtgggaccggtctccacaattgggcagaaacccaacggtcacaaaccacgcacatcggcaatggtaactcggctgtcaacaatgagcggtctcttcaagactgccacattacttgagtagcacacgaatctggacatggcgattcgtttcgtctggagatatggtaacgtcgcttcggtcggcgagcgtaattaacgcgcgcacgatatgatctatctcgactgccacaaccgcatatccacctcatgcgccgcaagcgggcgaatgggattagtggaagcgtgggcgcgagaaacgagggggcgaaatagtgggcgcgagaagcgaggagccgggcacagcgttggcaagagtataaaggcactgaggaagggatctgtttccttcctttcgccattattccccttgtcttcgccgcttgcgccctaactccttctttcctgtgccctaccttcgccacacgcgctcgctcttaatcttctcttcctccggcgccatggcacggggctccgctctgctcgatggtagcgtgctgccgccttcccgcatcgtgagcgagaggcaggctgggctgccgcgccgcttcatgccggaatctgccaccggccgggagatagtcacgctgggcgagggacgcccggcgccagactacccagggcggtccgtcttctttctcccctttgcaatggcagggctggttccgccattttcttctttcttcatggatgttctggagttctacgatctccagatggcgcacctcacccccaacgcggtgatgacattggccatcttcgcgcatctgtgcgagatgttcattggggtgcgcccatctcttcggctgttccggtggttcttcaccgtgcagtcggtgtcgccgccatcggtagtcggtggctgctacttccagccacgggggccggtgctgaaccgctacatcccctgcgccctccgcaagaagtgggacgactggaagagcgactggttctacactcccctcgccgacgaagcgcgcctccgacttccgagccagcccccggcgcaggcctccagctggcgggcgccggtagatctgggggatggctatgacgccgtcctcgaccgcctggcgggcctgcgatcccaggggctcacaggggccatggtgtacggcgactacctccgtcgtcggattgcgccgctccagcgacgcgctcggggcgcctgggagtacaccgggtccgaagacttcacgaggacccaccagggagtgagatgggactgggctcctgaggacttcaagatattggtccaacgggtgctgaatctcaactccgtagaggcggccctcattccccaaggaatcctccccctctgcagcgatccagaccgcgcctccatcctgaccattatgatggcggtcggggcctcagaggagcgagctccaaagggccacgacggcgcaggcgggagccgcaggggggaacaatctaccccgagagggcgtcgtgcttctaggtctcgcgacaggggcccggggagcagccgccctgccgacgcccgggggaagaggaagcagggaggaacacctcccccatctcctccccgagggggcggggcggcgcgtgccagcagcaggcgcccggagggggccgcgcctacatcgcagcccgagggggagcgcaagaagaagcggccccgcaagatgggggagacagaaccatctcggggaaacctcatttcccctccaaagtggttgtttaaccgaccccctcgcaggttcgtctctcacccatcgtggctgtattcattctctcaacgcgagttttcactcacccatcttgttcgtcttctggttttttcttttgtttcagcgagatcccgtcgcgtccctcccgccattccaagtccggccagtctgaggccgaggatccggcggccgcagaggccctcaggcgggaatctgaccggcgagaggccgcggatcgcctacgggaagctgaggaggccgcccaggaggccgcccgggctcgccaggccgaggaaaccgctcgggaggaggccgcccgagcccgccaggccggggaaaccgctcgggaggaggccggatttcgccaggacgaggcgatggcgacttccgaggcagcttgcgacgaggccgcgggcgcgtcgcttgggcccactccctcgggcgacgctcaggcgacaacttccggggtagctggcgacgaggctgcgggcgcgtcgcttgggcccactccctcgggcgacgctcaggaccaaccgggtccgggggacatccccgagtccggcacttccatcggcggcccgagccgcgtggcatcctctccaaggcggcttttccccacgccttctatcgccccactgaacgcagagccccttctgcaggccttggccgccgcaaacaccacggtgttggatgggttaagtgcccaggtggaggtcctgcaggcagagcgggcggagctcgacgccgcgtgggcgcgtgtcgaagaggggcgacgctcggtggaggccatggtggaggtgggccgtaaggctcaccgccggcacgtctcggagcttgaaactcgtaagaaggtgctggcggagatcgccaaggaagtggaggaggagcggggggctgccctcattgccaccaccgtgatgaacgaggcgcaggacaccctccgccttcaatacgggagctgggaggcggagctagggaagaagctcgacgccgcccagggggtgcttgacgctgccgctgcccgagaacagcgggcggcggagaccgaagcggcgtcccggcggcgcgaagaggcccttgaggcgcgcgccatggcgctagaagagcgcgcctgcgtcgtggagagggatctggcggaccgcgaggccgccgtcaccatccgggaagcaacgctggcggcgcacgaggctgcttgcgccgaagaagagttcacgctccgcctccgcgaggacgcactcaccgagcgggagcgagctctcgagggggccgaggccgcggcgcaacagctggcggatagcctgtccctccgcgaggcagcgcaggaggagcaggcgcgccgtaatctggaaggtgcccgcgccgagagggccgtactgaaccaacgggccgctgagctcgaggcgcgggtgaaggagctggacgcgagggcgcgcagcggcggggcggccacgagcgaaagcgacttagccgcccgcctcgcagctgccgaacgcaccatcgccgatctgcagggcgcgctggactcgtccgccggggaggtcgaagccctccgcttggcaggcgaggtagggcccggcatgctttgggacgccgtctcccgcctagattgcgccggtcggcaagtgggcctctggagagggcggaccgtaaagtacgccgccaaccagggaggcctcgcccagcgcctctcgaagatggccggggctctccaacggcttcccgaggagctcgagaagacaattaagtcatcctcgagggacctcgcccaaggagcggtggagctcgtcctggcgagttaccaggccagggaccccaatttctctccatggatggcgctggatgagttccctcctgggaccgaggaccgcgcgcgcgcgcaggtccgggatgccgccgaccatatcgtcgacagctttgagggctcggcccctcggctcgcgttcgcccccaactccgacgaggagggcaatgccggtggtgcagacgacagtgacgacgaggccggcgatccgggcgcattgaattgagcccccagatcttcttttctttcttctaaggccttcgggcctcttttttgtatagatcaacttaatctgtaatcaaaaaatgaagaaatttttgtgttaatttcatcttgctgtgagtatgagatgaggatgatctgtgccgtggtccttttgtgtcttagcttggataagggcttgtgcccaggttctagtcctcaaaaggcgcgggtcggggctagtgcctggggagatccacatgtcgagactggccaggccgggaacgtggtgaccgagggttatgggtgacctgattgtgggtttttgccgattcccccccggagttcaccacgcctcggggcacggctcggttctgggccccgtttggcgattttagccgacccgagcccccgagggcaggattgagcacgagtgacctatttcaagtcaagattcttcaaaaggaaaaaacagcacagatacagcctttaggaaattgaaactgcttttattgaaatattgaaaaaaaagaaataagaatgtgcacgtgtggcagcccccggccaaccctacacgcccgagggggtgcggggttggcccgagcccaaaacatgacactcgacccccccctcaggggtagaagcgacgaaggtgttcgatgttccacgggttaggcagctcagtgccgtcgcccgtggccagccgtatggagcccggccgggggacgccgaccactcgatacggaccctcccacattggtgaaagcttgctcaatccagcacgcgtttggacgcggcgtaggacgaggtcgttgacgcagagtgtcgggcccgaacgtgacgctgatggtagcgccgcaggctctgctggtgggc

SEQ ID NO: 26729 - DNA, 6798 bp, Oryza sativa
aggtcatctctgcgaagctgattttgatcagccccgcaatacatggtagcccgaggagacctcagggtgagctcggatgggagaaccgcttccgccccgtagacaaggaagaaaggcgtttccccggttgctcggcttggtgtagttcggtttgcccagagcactgctggcaactcctcgatccatgaatcgccgtgcttcttgagtatgttgaaggtcttggttttaaggcctttgaggatttccgcattggcgcgctccacttggccattgcttctggggtgggcaggtgaggcgaagcagagcttgatgcccatgtcttcgcagtagtcgccgaagagttcactagtgaattgggtgccattatccgtaataatacggttaggcactccaaaccgggccgtgatgcccttaatgaatttaagtgcggagtgcttatcgatcttgacgaccggataagcctcgggccacttagtgaacctgtcaatcgcgacatacagatactcaaacccgcccggggcccgcctaaacggtcccaggatatcgagtccccagacagcaaatggccacgaaagtggtatggtctgtagggcctgggccggctgatggatttgcttggcgtggaattgacacgctctacatcgccggaccaggtcgaccgcatcattaagagctgtcggccaatagaaaccctggcgaaaagctttaccaaccaaggtgcgcgaggcggagtgggctccgcattcgccttcatggatatcggcaagaagcacaacgccttgttcccgaggaatgcacttcaggaggattccattagccgcgcgccgatagagggtcccttctaccagcacgtagcgtttggagatgcgatggacgcgttcactcccttcgcggtcctcgggtagagtcttatctgtgaggtatgcttggatctcggcgatccaagcaatcaatctaagggagttgggagcactcccctcgggtcccgaggcctggactccgacgggcctcgggggccggtcaggtgcatccgtctcccctaaggggtcgggtcgcgccgacggctgggcaagcctttcttcaaaggcgcccggtggggtctgggctcgcgaggacgcgagccgtgagagttcgtcggcaatcatgttatcccgtctgggcacatgccgaagctcaatcccatcaaaatggcgctccatacgccgtacttggcgcacgtaggcgtccatctgcgggtcagagcaccggtactccttacagacttggttaacgaccagctgggagtcgcctaacaccaggaggcggcggatccccagtccagctgccactctgagtctggcaaggagtccctcgtattctgccatattattggtcgctcgaaagtcgaggcggaccaagtatctgaggacgtctccgctcggagaggtcaacgtgacccccgcaccggcgccctgaagagacagggagccgtcgaactgcatcacccagtgggcggtatgaggcagctgcgaggggtccgtgctggcctcggggatcgagacgggctcgggagccggggtccactctgccacaaaatcggcgagggcctggctcttgatagcgtggcgtggttcaaagtgcaaatcgaactcagaaagttcgattgcccatttcaccacccgtcctgtactctctcgattatgcaagatttgaccgagggggtgagacgtaactacagtgacccgatgcgcctggaaataatggcgcagtttcctcgaggccatcagaatagcgtaaagcatcttctgggcctgagggtatcgggttttggcgtcccggagggcctcactaacaaagtagacgggccgctgcacctttcggtggggccgatcctcttcgctaggggccgcatccctggggcactcttcgtccaagcagcctcgcggggcgcacttgtcttctgtgctgatgacctcggggtcggaggataacaggggcggccttcccacagtggcttcggggccgtcctgggggtcgggggctcctggcgtcgtcggacaagcgggcaaagggccaactccggtcgtcaggggccttaggcctccgttcggctcgggggcctcttctccctgctctttcctaggtcgagtcagcacagggttagcctcggggtcaaagggcgataggtgcggccttcccacagtggccttagggccttcctgggggtcgggggctcctagcaccgtctgacaagcaggcagagggccaactccggtcgtcgggggccttgggccaccgttcggctcgggagcctctcctccctgctctctcccgggccaagtcggcacagggtggggaagcgtgaaatgagaattgttctcatcgcgctccacaaccaatgccgcactaactacttgcggggtcgccgctaagtagagtaacaagggctcgtctggctccggggcgaccagaactgggggagagcttagatacgccttcaactgggtgagggcattttcggcttcctccgtccaggtaaacggtccggagcgtttgagaagcttaaataagggtaacgccttctctcccagcctcgatatgaaccgacttagggcggccatgcaaccggtgacgcattgcacatccctaagtttgctgggggggcgcatccgctctatagcccgtatcttctcggggttggcctcaatgcctcgggcagagaccaagaaccctagaagcttgcccgcaggtacaccaaacacacacttatcggggtttagttttatgcgggcggagcggagactctcaaaagtttccgctagatctgagagtaacatttcctggttgcgcatctttacaaccaagtcatcgacataagcctcaacattacgtcctaattggctacccaaagaaattcgagtagtacgttgaaaagtaggacctgcattctttaacccgaagggcattgtcgtataacaataggttcctatgggggtaatgaacgcagttttttcctcatcctccctagccatgcgaatctgatggtaaccagagtatgcatctagaaaacacaaaaggtcgcaccccgcagtggagtcgacaatctgatctatgcgaggcagggggtaaggatccttaggacatgccttgttaaggtcggtgtagtcgatgcacatccgaagcttgccgttcgccttgggaacgaccaccgggttcgccagccactccagatggatgacctcacggatgaatccggcctccagaagtcgcgccacctcctcgcggatgaaggcttgacgttccggggcctgccgccgcactttctgccggaccggccttgcacccggccgcacggcgagacggtgctcaatcaaccccctggggaccccgggcatatccgccggtctccatgcgaagacgtcagcgtttgcccgcaggaaggagacgagcgcgtcttcctatttgccgttcagaagaccaccgatccgtgtggtcttggacgggccgtcgcccaaggcaacctccttgaccgggacctcgtcgcctgtgatcatccgctgcctcggggtggcgggggcggaggcgccaagcctctcgtcgccaccctcggtcttggacgcagcggcgaggtggtccgcgcgctgctccagacaagcgagcgcgactttgaggtcgccatggacagagatggggccaccggggcccggcatcttcatctgtaggtaggcgtagtggaccgccgccatgaacttcaccaacgcgggcctccccaggaccgcgttgtagggcagactgaggtccgccacatcgaagttcacccgctccgtgcggaagttggcggatccaccgaaggtgaccggtaggtcaatgtgacctaacggccacgtgtgccccggcgtcacaccgataattggctgggacggccggagcaccatccccggggccttgatggcgtcaaaggccgcaggggaaaggatgttgagggccgctcccccatcaatgaggacacgccccaacttcacgttgcaaacggtgggagaaaccaccatcgcaatctgccctccccgggcaacgcacggtgggtggtcggtctggtcgaaggtgagggcaacctctgaccaccgcgcccgacacgtcgcctcatgagtaggggtcgcggccagaagctctcgcttcatggccttgaagctccggcgagaaacgtgagcacacgctcccccatcgacggtggcaatggtggccccaggctcttggaaacctaggtcatcatcgccgtcatcgatgtcctcggcgggggccttctgcttggcctcacttcgccgattatcggaaggaaccgccggggatttgccctctcggcgctcctgcctcctctcctcctcccacttcctcgtccgctcagccaaacttttgactgcacggcagtccgcgaggtcgtgaagggaagtgttgtggacagtgcaccacttgccggttgggcgctccctgttgggagcgccggcctcgttctttttatctcccgcaggcctcccctttcgggtggcccgcgaagcgccctcgacggcgaggacatgaccctcgtcgtcggcatgggctgacctcttcttcttcctcctgtcacgccgccctatctgagcggcggatccgggggcggccgaagctaccacaccggaaccggaggggttccaagtccatgcctcctccttacgagccactcggtccgcgagctgaaaaagctccgcggtagtctggggctctttggaggcgatcttttcgagcatgcggttgtgccgcacaccccccctgaacgcgtaaatcaccgcgtgtgcagggatgcatggtatggtgttgcggacttgacagaaccgctgaatgtacgagcgaagtgactcatcatcccttcgctgtactgcgtgcaactccgcttcctcacctgggcgcggatatgtgccttggaagttcatggtgaactgttggcacaaatcctcccaagagtggacagacgcgggtggcaagttcattagccaaccccgcgcctgtcctttcagggccatgggaaagaaattcgccatgaccctgtcgtcacccccggcggcctcgatcccggtcgtgtagacctggagaaactcggcggggttgacgctcccgtcatatttttcggcgatggtgggccggaaccttgggggccaacggacattccgaaggctcgccacaaaggctctacagccgacaccaccaaccgggggcacggagggctgatccccgcgtccgtggtgaggtgacactccggacgaggaggcgccctccgttgcgtggggagcacgtcggccattacgccggcgctcgatactgatgcgggcatccagttccccacgcagatcttcccgggtcggaggcgttgactaaggagtggcggccgaatggcgaacagcggctgccgctcgccgcgccctccgtcttgacgacgcggagccggtggtagcagcaccagaggccttggtggcggaggaccgcccaccagcatctaggcgctgccgtgcagtcatgaccaatttggccacatcgtccagccaacgttgggctagagactccgggtcatgggcgacgggcgggtgacgtaggagcgcgcccgcagcttggagcgcgccctggggcgtgctgccgtcgccgtatacgaggaggcgacgctccccatctcgccgcctttctccacctcctgtgggtgtcgaagtcgcggatccttcggccctctcgagcgccttctcccgcctaggactttggcgtggagggggcggtggagtacgagctcgacggcgtgggtttggctccccgtcgtcaccgctcatactcggggagaggtcgtgcgcctttgctggctcggccattgggctgaacaagaaaagcttggcgcacacgaaagagtgcgagagctcagaaaatccctcgcagagccccctacctggcgcgccagatgacggagcgtggggctcctcaccgggagaccgcgcaggcccccctttgccggttcggccggggactcagggtgagattctaagctctctgtatgtggaaggttcgcgagacaggaaatacacaagacacgggcgatgtatacaggttcgggccgctgagaagcgtaacaccctactcctgtgttttgggagatctgtgtatgaaggagctacaaagtatgagccagcctctcccttgttctgggttccccctctcccccaaaagtccagtcccagtgggcaaggtcctccttttatatcttaaggggataccacatgcaccatttctctcttttttgtggggacttaccccaccttttcataaatggacggagatttgtatagttgccgtccgagtcaccttctgatgagacggcccacaactacctccactttcgccgggagcagatgcgacgtggaatcatggctgtctgctgacgacatgaccggtgtcagaccagtcacgtcggtcattcttgtccaccacgtgtcagcttagcaatctacatgttcgcccttcttcacacaacatcttgcctgtaatggttaggatgaagcctgacatatatctgaccaggactaacgtgccatctctgggaggtaacacgctagctccagctggggacgagcgcctagaagccctcgtcctgacgggatggggcgaggcgtgcgtcagatcgcctgtcgccacctaacccgcgatctgaccggtctgtgactggtcacagaccggataaacgagtgcactgcactgcgttacatgcggcgtgacacgttcagccaaaccgcaataaatgtggttaggtga

SEQ ID NO: 26730 - DNA, 13180 bp, Oryza sativa
ttctaagtataatattgtttattaatgttgcataaaaccactaactcaatggcaagaagaagctgaagcggaagaggaggagcagaagaggagatgtgagttccagagcagccacggcggcgtcgagggatgagatcctctccaagattgtcaccgtcgccggtgacgggactgcccttctcccccccgaggcacgcaccgtcacggagtgctctctccatggcctcatcgccttcctcgtatcatacttctgcttcctctctcatcgacgcgtgttcgtccaggcaacccggccgacatcgatgccttcctcaccggctcattcgcgctcgcctctcatcttggcagcatcatctcatccgccacaagaatcattcagtcgcaagcctctctgttcaggatttgtgctgcttgtcaggattgctccagaagcagccactcaagctcaagaaatcggacgactaacccatggattttgttgctcaacggcttcatcgcttggacatggatgctagtactgacagtgtgccagcaaacagcaggttgaatgaatcactgcgaagtgttcttcttgacagaatcctcaatctttatctcaaggcactttctcggctaccaatggaagatttttgggctcctcatcacaggaccctgctcaaggcaggctacttgcttaggtccattgagccctgttagcaatatcatcgacaacaccatctggtatgactctttgttcctctcatcagagaatttcgaggtggatattgttggatagtcatagtataggaaggagagaaatactataaatattgacacgttgtattgaggcttgggggtcggtatatataggaatacatgtattggatcttaagtaaactcagagagatagagatggaaactaatcctatcctaccatagcaaaccttatacaatacgatcttgtctacatactctaacacccccccaccccgcagtacaagcgtgagccgtgcggacacttggattggagaagaaaccagcaaaaatgctcaatacggatgatagccctttgtaccatagtcgacgtagccgaagcgaaaagtgcgatggagccatggtcgatgaagctgtgcgtagagtagccatggtcggtgtagccgaagttgggaagctgatgttgaggtagccgagccatagaggtggtagagcgcgcaaggggcgccaaggagtagtcatggacgcaggggtgggcgtcgtggaccaaggtgcgtgaggacgctctgggagggtgcaagagattttgagaaaattgtttgtggggaatacaaactcacaaatccagctattatcaatagttggaagatgaatgataaccatctaggccttgtcactgatgactttatctatttggatgttgcctgggacgtcaagttgatccaatatatgaatcataccgcaagggtgatgaatcttgatgtgaatgaagaaatgaagcggataaaaccaatgggtattgtagaataaggttgtgttctttccccttctttcccaactcacaaacctcttttttcgtgagcacgttttttaaatttctaaacagtatttttttttcaaaagttttatgtagtaaagttgctgaaaaaattatattaatctattttttaagtttttaagctaatacttaattaatcaccattggcttttatcccgacggcgccctaacgtcgccagttggcgcttcgaaggaagaaaacaatacgagaccaccgatgtcgacgcgctgcaccagccagcgacgacgccgggttcataatcatcaaccctgcgggagctagcgctccatcccggggtcgtcgtctagatcaccttcctggcttcctctgctcattgccgcagctcggcgccggcgatgtccaagccgcgcgccaccggagcggctgcgtgagggtcactgtcctcgtccagcacacggtgaccaacgtgcgcgagcaacaccggagaggttgtgatcgagcttgaggtgacattggtgccaggagaattcagcttcggtcatgctgcctctcgcctgacggcccgtcgaagaaagtgcaatatgaatgagaaaaagaacaagcaattgcattgtgaacagctacaaatacatatgcagaaattgtattacaccaaagttttctagactggacctgccttatttctggtggtggcatgtgtgcatgaaaattatctcatggtatccatgaaaggaattgtttgtatattctaggacttgtgatagtaagacctagttcactcgcatataattgctgttgactggtgcagttcaaatcaactatcttatcggtgcacaaatgatggtaaaaaaaaaatctatcagattaaatgataaacatgcaccatgccaccatcagattaaatcataagaggaacaaatgatatgtcaagaataacggatgcaactcatgcacagcatacaatttcctgacctcacaaagcatgtctacacgatctcatggaggtgtatcctgatgcgacaatacgagttacagggttagtagattactgtgaaaatagatgttctacatgcaatgctacttctaactgaagggttagtacatccgggtcccttcttgatgaaccttctgctatatccaaaggtttccaccatgaagtgcactcaattcaccctacatcccatgacagtcttcataaaaattacctgtgaaaaaaaacaaatataagtaaatcttgtattggttaggaattcggttgtaaaaatattataaaaaaatatcgcagtttaaacttgtcatccctaaaaaaagcacttgtcaaaaatatctcctacaaaatcatgaagttaatttctgcatttttataaacctaatattggttttgtacaaatacagtggcagcaagagaatttctgaaggtcatatctttgcaaataattagaaggcttcaaaagaagccctcaagattggtttggaaattttagtcagtaaaagcaaatctattcaagctcaaaaaagagcaagaggacccatctcaggaggagcaactgcacacagcagtcaggacacaacctagctatttactagtgatctagtcttgtagctatcaataatcaccataatgagatctcatcattgtgttgtctcaactaattacatagttaaacagaaataattcttgaattatatcactgttggcgtaaataattaagaaacatgaacagaaatgaaatgtatacaaatttataatcaacgttgatcggaaaataaatccatgtcataagaaacatctagccaaatttctcgttggttcaatttagctagaattaaattaataagtagtcataaacaattaaaatggtactaatactatttctgaaaataaaaaaaaacttaaaattactgagagagagaacattgattttagcccggcccaaacttgtggcttctgctaggtacgtgcggcccatttggcggcgccctaccccaccgcggacagcaacagcgacgccctcccccaccatgagcaaaggcggtggcggcgccctcccacggcttcccacgggtggatccgatggcgatagcctctttgacgctccagtcgcctcccctatattccgcacccatgtgcgacgacctcctttaccgctacttctacgggtgcttctctctgagtctgagcgagaggcgattaaaatatgtcactacaaatatgtcattttagataaatgtcactactattcatgatatcggctgtatgccactggaatttggggaaattagaattgtgccactccgtcgagttttccgtcagaccccagacgtgggactcacatgtcagttccattttcttctatcctcgctcttctttcttccccatgtgcaattcaagttaacggactgataagagtatgagataaacattgattccggttgtaaaaaataatcggtacagaaaacaagaacaggagccaagcaaaaattatctcaagtctatccaccaacacaactcctgctttattatctcagctcctccctaccacgtgtcaaaaaaaaactcttatctctcttaccccttctctattctctctctaccttatctcctaccatccacactccacagccattctttcttctatcctttctcccttctcacaacacgcaggagcgatggcgtcctcggccttggcgagcagcaagccagcaacagcagcgatggcgttggcgagaaacaggtgcggtgtcctcgtcctccacgagcaacaggcaacaggagcggcggtggcgtcatgtcctttgcgagcagcgaacagtggcgtcggtgagcagtgggagcagctctgagcgggaggtgaagatggagatggtgggacgatcggaggggggaggcgctccggtcggccaccaggtccaccccgtcctcctcgttgtggcggcccccttccctggcgacgagcgtggttgcgggtggcggtgaggagcacgctcctccatccccctccttgtgatttcctttttgtgatgaatgttttaagagatttttttttgcagttttttcctccttttgattttccccttccttgtgattgaatctgtgatgaatcggtgaattttgatgaatcggctgtgaatctgtgagtgcaccctcctcgtggcacacggcagcgcgcagacaagccatgacggcctgagggcagcggcatgcttggcctcggatacgcagtggccccggtgatttaattcttgtgatttaattttttgggatgattttgattcattgttgttggatttgtgattttgtgattcagtttctctcgtttccatgcttcttggctcggatcggatttgatctcctgtatgcgcgtaccggacgggagcgacgcggtctcaatctcacggactgatgaaccaaaattttgggagaggatcgcacacagacgagtgaaaaaaattgcgcatacggacgaaaattaggtgacgaaaggaaaattaagaatattttaattagttaagataaatgatttaaaattggcactgtataccatgtttagaaaatgaattatatagcttagcgtttaagctgtatactagcggactgtcttgccaaacacggactagtgcacctgacaacctgcccactatgtgatcaagaggatgaaaccatcgagcacatccttgtctcatgcgtcttctctcagcaagtttggacctagattttcttgaagctgaccggtgctgcccctcaaccttcagtaactcgttttgctaaacagtcgtggaaagctgtcaaggatgttcctaaggagcaaaataagggggtgacttcattcattaccctagttgcttgcgaaatatggaaacagcgtaatgacttttgttttcaacggatcaattccaaacatcatggaggtgttgcaggcagtgtcaacagaagctaaggctatggtgcctggctggagctcttgcgctccaagttttcctttgtaggtcactaaccaaagggcactatttgcggatgtgttttgggaagggatcacgagcccttggttgtatgggtgatttgtttttccttcttaatgaaatgaagcacagctctcatgcgttttattaaaaaaaaaaaccagcctagcctttaacccgtgcatattttaactaaaatttctttagtgtcctttatatgctacaaaatcgactcaacaacttagtggttccaacaatcaaatctaaccaagataccatgctagagtcgtatatcggttcatgtgttaggaaagactgtatatttgtaatcagtacatttaccatacagttgtagatgtcatagatggatagatttttagttttacagattaatgtggggatatctagttttcggcctcaaaatttgtggtcgcttccaggagagcctccaattgttataaagaaatatatgatgtaactgtgaaacaaaatcatgctatcccttaaaaaggcagactaaaatttccacttaaaatttcctacatgatagctcaaatgtagattataagtttataactacagaattgaccaagaaataacataactgaggctctgagcatggaaatgacgacagggacaagtacatggcgctcaccagggtggagagatacctgttatgaattgtagtaacacattgcctgtgcctgaagaaaataagaatccctatattttctcccactccctatgtggacaccatttttagcccaatcttctctatgtatccaagcatcacgaccaatatcaagtacgcccaaaatctgtacaagttagggcttatgaatttgaaatataagagcgcaaaaagggggaaaataaaaaggagcaaaacaacactgcacacatttgcatgctttttacattaagaacatgtggcataaactggcaaaatataaagcacttaaataatttaaagatggatccacctatttagtgagcctctttaaatctattattctgaagtttccaattagatgacattattttatgttaagtaaattgctttcttgctttggatttcttcaattaccataatctgtcaaacttcaccaatgatttcaccaatatgcttatataagcaagcaaaagtatgttaagatacgtggcacaaaaacaaggggtatgtcaccttaacacctgaaaaacacttgttcaggatttgtaccaggttatcaactgaatattctttcagtggatttattctttggctcatgatgcacacaagtatgtagttaagatttgtctatttcccacctaaggggacattgacactccatttgagtttgccaatgtgtaacatcctttccaattaagtgctagatatatttgtatttctactagattgatactacattaccagttactacttttgtgaataataaataaagcatcatatgactataggaaggggaaatgaagtacataatcaaatagtgagattaacatatgatcatgttcattccaaaagttcccttaaaatgaaatgcatttgaacaataaggaaaatgtactgaaaatataaattatcatgtaatatgtaatgatttcattagtttgtcttacaagaaataggagaacaccagactgaagatagatgtaacttaccacaccacctttccatgggacaaataatggataactcctcgactgtaatacctatcaatattagatgagattaataacaaagaaatgatgggccatggttatcacagcatctttggtgaccatggctctcgagcggcccctcgttggacaccaagatgctgtgacaaccatgtgatggaaatgaacctatcatagaatatattagtcagaaatgaacctatcatagaacttgcaagttattttcaagaattggagtgtgcatttgtacttaaaaacttgttcacattcttagtttgaaagaacatacctctgctttctctatcggttgatttgatggaatagtattgagaaccctgaacaaaacatatgaattgttacacacagcagcacatttatagtcttttgaaaaatgactccagtggcaaacctttgttctagaactggtgcaaggcctgctgttgaagctgtaccaccaacctgaaaagccacataagcactcctctcaacttactttgaattaacagtgttgaagtattgactaaaaagacgcctggtactttaccagctgaatgctgcagaatagcttcctttgaagctcaatacgtcctgtggtcagcaggtgttagaaaagtttcaagataaggggagcaaaataataaggaagagtaaagacactacctgtcgaaaggatactactaacaatggcttctacaagaccgatgttatcaaacttttttaatctggtgggaaacatcggataattgtcccacataccgaacccaccattcccacttgagtaaagactgtcacttgtttgccatgtatcttctaacatgtcatcataatcttggaacctgcaggcagaaaaactactgtaaagtaatcaaatccaaacacacaatacccaaactaccgagatgaatcaaaatattaccaagatcgaggaggtggagggtattcttctgggacaagaacccttggataaagtagccccataggaggtacctatttaatcacaaaaaaggcatacataaatcaactaagacgaaataatgaaatgaagaccagcattgttcttggactgtagctcaactacctgtgctagtttttgatgataaacccaaaaaaggaaaaaataagcacataagagaaagagaggagtaaatagtaatggattacattcagagccgatagctttgttttctgatgaccaactgatttttcatgctcatatgaatgaacaacactgacagcatcaaaacttccactctgtgaaaaagaaaaatgtaggttgagatcatggttcaggtgcgaattgtcctttgaaatatatatgtaatccctcatatacgatctcttttgttttgttgtttaacataatatagctctgtccattttattacactgttttcaaacaagtgagtacaagatatgtaactagaatctaaacaagcaaccagatccatttttatgttgaatttatttttgtgctgttggatgatcaactcatgataaagaaaataagactacagatatgcgtttgtgtttacatattcatgaaagtcacggaaaaagtaaagggatgagccgaaaactgacaggagacaagactaatagtaactcatatgatacaagctacacaaatataccactcgagccaaatcaccgactcattgtcattctagagatttgcacctaaagcataacaggaattctataccgtgacattagaaaccattattcaatgctactggtgttatatttttattgttcttttttggtggttgttctgaagatgttgaatttcaatctgctatacactggagatggaaatgttaactggagcacacactacctctgccatctgttgcccttattagaatgaatgcaaataagtataagccacttactcttatctggctgtatgactcttttagtttgttgagcattagcatatctataggcttgttcactggatcagtttggaagtttggccatgtgcaatgacgacgttgaacccaaagaaggcatctagatatgtcctacaaaagaaaaaggatagcaaagctgatgtgtaatgtattaaaaagaactcagactgccttgccgcaaggaagatgataagtaaatactgattagaccaacaacagtgctatcaaataatcatgtcataaataactaattgaaaagacaatctcaaattagtgctaactacaaaacccctttaaaagcagggacagaaaaacagaggcgatctcaaattgtacaggaatttcctatattacttgactaagaaacaaaattcccagatgcgaaaaattatctagatggtttctggtcatatttcaaataccaactcaatatcctaatccatgtttcagcagatttttcactggttactggcagcagtgaaagaaaaacagaaccagactagactcgctgagaagtttttaatgtctactttcagtttcaaacactgatatcagactaaatcgctacacagaaactgcacaaacgcatattttttgaaataggagcaaataatagctctaaaaaagtaaaaacaaagaataacaagtatagatggcgttgtggctagcagcattggaccagaccatttagcataacaaattggagaaagaaacacacacaaaaaaaaaaggaaaacttgttaaccaacactaaacaaaaacaatataaaccaaaggcagaagcaaacttaatatcgtaacaaacttaatgctaaagcttggtcttcctagtaaattattgatgtctacacagattgcatgaccatagcgatatactctaaacaaatgatataatgtgatacaatacaatgaacacaaacaatgaattttcatagtaatgataaactattaaatagaatgaacataaaaggcggatatccaaagtaactaagattggttgtgtaggtcaaacagtataatttagggcatacatctccaccgtatggaagcgccagggctgtgtggggtaaagcaacaccatcctgcatacatcaaggaggacaatatattggtacgtaagcagtatctagaaagctaaagaaaagctattcatattacgacttaagaatacaaccctcatttctcaatggctagtgaaagaccaaagaaaatgctacggttattacctcaacacaaactacttgtgtaacttgcgcgccaatgttgaccacacaagatgtcgacaacccatttccaaatgctgcagctagagcttcctatcaaagcatatacagaagaaataaggatgttcaatgtctcaacttgtggatcatcaaacacataacttggttgaatggctattcttctacaagccttatacagccgtgcaagtaggaagttccctaacctaaccggtctcaatttgtagttccgcattagaatcattaaacctgttgtcagacaatcagtcaataactactaaaagaacacagaaggtagaatccaccagctggtcccctagctgagccagcgtcaacttaagatttcgagcacaaaaaacaagttaaatcctagcttttagatgtgaaattctgtcgttcatatagcccaagaatatgaaacattcatgggtcccttattttgtgcgctggtgaagtatggactggtttaaaaccagaataattagcatctataatcagtgtcaagctgggctacaagcagtactttttgcagtaggctaagggcttagttccactctgggattggaccaaacattgaaatgttatctaatgaaggtacaagaaaaaactgttcagcaactatatctgctgtgctaagaaaattcctgctctggcacaaatctgaactctgaaaagtatccacattgcaaccgaaatatctcaactgttttaacaagttggccactctctcagcagtatatttagttattaacaaagacaataatgcatcaaagcataaacacaggagcacaatacaatccattcagtgaatacaaccttcattgattaactcaacaataacatcagaatagtggaaaccaccctgtggctattgaagtgtacaattctaaatgatatccctttttggagaatggtttccaagtgtacatccaagtactttcataccaattccaatgttccttaaaaatgatgcaaactttcaaaatgacaaaattctagcatcccatctttacaaatttgtgtcttgtcacacttattggagcacttcagaggaatagatagtactgtagtacatggaaatcaatttatatgtggagtttcgtttgtcccactttacgaatgaacgatccaattaattagattttccatgtaaaacagagtattcttacatccagaatgtgaaaagaaagaaaaatgaaaaatgcccagtgattggatgcaaaagctaacctgatgtatcactgctgtgctaaaacccaaatcgcaaagtacgattgacaacatttccttgatttctgaaatggaataaaataattaacttcctttgaccagataaatcagcaaaaagaaaaatcttgctcaaaagtgttatgcaacacgcattatacaatataatttatagtaaagggtaaaaactaaaaacaaacataagatagggtacatgtcaactttgtggccagtattttcctcatctgtcaattcaagactacttcaatgcagaacagtattatgaaagatcattccagattctcacagccagtgtcaagcagacagggcagagttgtggactaaatcacagatagcacaagatgccatcagaacatgaatatattgtgtgctagtagatgagggcaaaaccaccatccagaactagttcagggtttattcactttgatctggattttgtaagtttaagcatcatggtagtttggggtaaatagaattttccttatcttttaaaactttttgccaacatctaactagagaataaaggaaaagcatgtgagaccaaatagatcctttgcttatagtgagaatgttaagatcaatctaacccgcagtagtgagaccagatagatcctttgcttatagttttaaaatatttctgctaacatttactcattccgccccaaaatataaacctataacttttttacacggtctccaacgaagagctttgacaaataattcccatcgtaatatatgatgtaacaattacaaaataaacatcttatgaaagaactttcaaatacaaatttaataacatcacatgcatagaactaaacatatattacttcaattattattagtcaaatgttgaaattgttgatttttcctaaaattgtgtgcgttatattttgggacagggagtaactagagcattaaggacaaaggtacagtattggggactgcattaatatccaaaatgacaagtcaaaggaaacatatgtacttgaaagaagaaatacctcggttatcaaatgtctctcctagaacaagaattgcagaatacagatgccgatctcttggatttatatgcaatttttctgtcaatatccagttccaaatagtgcgcaaatcttctaaaacctgcactttttttaattaaaaagatggtctagcattgtgatactatgctgttcataagaaaaaagaaggcagcatacacaggtttatgacaaattcaaaataaagagttgtcacttagttttctctttggcatacaaaatatcagccatcaaatccagattttaatatttctaaaaatttgatagccagattttgttttgaacattttatatggtatgtcattcataaacaaatacatcacatcagagataaaaactgaggaagaaataacagataatttggaataaatttttaacttttgaacacaaaatcaacagtgcctaaaattacaatatggcactacaaggctgtacaaatgctgccttacaagcagcataaactgattgattaattgttttattaattatgcagaaaaaagaagaagaagaaccagtaagtaggcatggataccagaaagtgtaaataataattctagtggattcagaacgttagtatctcattctttcatcacaattgtacttca

SEQ ID NO: 26731 - DNA, 9951 bp, Oryza sativa
ttcctgcagccccttgaaagaaaaatgtgtttttttattgcaatttgctgtgtgtatgttttctatttccgttctgtagttccatactatacttgctgagtatattatactcacctgttttatttggttttaggtatccagtatgtatgggcaggaagtagcaccccttatctccacagctcacagaattaaactaaacatagttccttaatatttgaatagttcacatttggctttgtaattattgtttacttttatactgtgagagtttgtgtgctatcatgtctacgggttaagtgatgtttaattatttttataaactgtttgtcgtggatgtaattaaatacaggggagattctgccaaattttctaacagatttgtggatggcgtcagctttgttcaatacatttgagcaaatcctttctaccgaagttgtaatgcaaatcagttaatacatttttacttaataaacaatgttccaacaaatatcatgttccgttccttactgattatcttgaatgtaaccacagcctagcttaatcatttgaaatggctgtgttgtcaattacatccagaaggagcattactataagtttataactgaatgagcttaaggaaaatggcatataataattaagtcacatactaatacctgatgtaatgaataatcctgagaaatattgaaatggcctctcctgatcgggtgactcagacagtatgactcagaaggtgggattttcaaagcatcctctccaaatattatttctttatacatgttttcttcagaattaggctcagtatcgtcaggagttgatctttgcaggggatccacgtcagcatccttgtcaactggcctttctgaccaatttgagtagttcagcaaaacattgatatcataaaatagtataggtaaaacataggttacttcactattgatgcaaaactgctcttctaatctccctggaattaaacaaatccactaatacccatgctatgcccaatccaataatcttaagcagctagacgatacatgctatgtaaaaagaatgggatgcaaatttcgactaagcttccaccttttcagataacagttacaattgtttctgaagtacaatgtccacatcaatatagctactgcaaagttccaatccaaatatatccaatgggaaagaaataccataacaaaacataagagttaaatccaacaaaataacagaattagctcgctccaagctccagctaaactagccacaaatcataatgcaatggtcctacagggtacaaagttcactactgccataagctcaggcacaggccacagacattgatacgcgcatggcagcttgcataggattctgccctcttccctcctttccaacaaatgcgcgcacaaatggtttgaccccaagtttctacatttgaatttgactccaattgtgtaaacactgcccaaatccaagttaacttccaatctgaggattaccacccatttggctgggggtgttccacataaggcataacaaatgaattataatgtcaaataaaataagccatatcaaataacattcatgtacaacttccaaatggacaagcatatctacacaaacagtgccctaacttaaagtatacaatttagcttcagctaacggacaactatgaaaagagaaaacaaagaatgaagtgtccccataaaacaagcaaaatgatcagacagtaccaattggtgtagatgatttaatacttctgtccattacatctgtccatgtgaatttactatcatctttgttttgctgtgaagaaagggcatcaacacgtcccatctgaagaggtaaatgcaatgatatcagcatatagaaacaacactaggatctttattaaacaaaacaagtttggtctcaagaacattgatgtcaaacactcaaaccatctaacagagctatactgcaaaatcgaacagttgtagtcatttatagctacacccaaagatgaaaagataaaagtatctttcaaattagacaaaagaataattcaaaaataatctataaatccagaagagttggagaaagtgatgaactaatcagttcactttgcaatattttcaaagattcactgtacaatataaatgaatgtcactatcaattttctcttttcaacacaccttatgagtattttatatatttgatagcccctcaagtttttcatggatattggatatcaaggatctatttgcaaaaacatagacttaacattgaactagaattttgagcttatattaattagtgaaatacagtgttttattgtgtcaatcctgaaccatatctaggtgaagtcgacttacaagaataagcttcctgctattctttagtttctgccttcagcttagaggcaggagaggtatcattgcttacaaaggataacaagcaatatccactctatctccccattttctccctctaccaatgctatttttctttgttcactgaaaagtgctaactcacccaatcaaggcactgatgggcaagaagcaggatttctgtggcccacctgatcatggctatgcattaagaccaaagtgcccgagcatatctttactcatgaaaaggagttagttgttgtgatgtttagttccataacatgtgatcttttgtgaattgatctacatagatgtgtgcatgtcattttgttgggtcctttgtaaaggattagaagatcacatagtttacttaattgtacataatgtaacatacatttggctgctaagaaaaaaacatcaacaccaaagacataatataatgagcccatcttaaagcctttttgttccatacaagagcaaaaggacatctggatcttgcaatagggtggaactcgaatttttaaacccaataatactgtagttgatccagtagggtggagcatgtgctactatattctcagcagattcctctagttctgtagttcactctcattgcctataaccgtacaaccagataggtaagacttaaagatcgtgcgtcctaccttaggaggtaacgcctggttcgctgaaggcatgtcttcatccaaaaagggtattttgagcagcgatgcaatctgcaagtctatcacctcattagctcaagtagaaacataatccaaaaagaaacaacgccaagtgtttgctttttacaatatcatatgccctctcccgctctgcattctgcgatggagttgcatggcagttgagcatctgcaaataaacatgaatgtcgttcaattaggataaagataaattgcattgcatcacaaacctcccaatatttgcaccaccttgtctcgcacagaaagccttggtgtatcatccttctgctgagtgatatgtcgagcaatgcagtgcggtatattgaatggaacatcctgacttgcgaacccaatgcgcacatttgaagatcctagagaacacggataattgattggtcagctgaaagcaactacgaattgaactggcagcaaaactgcatctagataaggcaggcacctagctgctgcgaagataatttgtcagcacacaaccacaaaattatcacacaaaaattactttactaatacggttgcgctttatgcatttcgtccaactacttccaactctttcatccaaaagaacacatcaacccattcaaatcgtccaaatattctcgatattggagggtggaaggcatgaatctcaagaaggacttggccatacgaaatagcacccaaaagaggaggggatgaccagattgatatcaggggctagggtttccggaggggcgcacctgggttgatgacgacgaggttggcgccgcgctcggccatcagctgtgatggaaccaccgtcttgaggtaatcctgcgatggaaaatcacttgttagttagggtttctcggggatttatggctcaaaagtagcagaaaacccagtggaattttggccgcgattgagaggggagagaagccatggggagcctaccatattttctccccggagaaggcgtcgcgcgcgtcggaagggaagggaagggagcgccggagtcggaggcgacggcctcgtcggggacgcgctcgtggtcgccggcggccgagcggcgctgggagtatagctgctaaaatgggccggggcccggccacggcacgccagcccgtgggccgtgccgcgcttgggccgtcggctcgggctgtgggccggcacgcaatggcccaagcacgagccggcccaggcgggaatttttttatttatacatttttttattaaaatatttaaaaaatattttttttttagaaaatttacaaatctaatcgtccaccgccctttgggagagcgatagttgaggcaaccccccaaagggcggcggacgattagatttgtaaattttcgaaacaaaaaattatttttgtaaatattttaataaaaaatgtataaataaaaaaaattcgcccaggcggtccaacgaaatttccccagttttatcttcttttgtttttctaagttggaaaaactatactttgactccctcaactatcgcccgagtatgattcatgttctccaaccacaaaactgggtatatcgacttctccaactattaaaaccactcggtggttttggaggtggttttggttgacgtggtggtcttaaccaagtctttgtcctacgtggcgcttgcgtggcattagaataaaaactaagtcttctcaatctctccgccttatccctttctcaccacgctcgtgcgcgcttgagcgggaggcgatcggcgcgtgacggcgcggcgagttgaaagaggttggctagcgtggtggggaaggctgccgcatgcgatgctcagggcgggcggcgtcggaaaatggccgacaatgaggtcctaccggactgaggactggctgcgcaaggaggttgctgcggtgatgcagactgtggtggggagcaaggggaaaaccgacgacacaggaaggaggtcgcgttgggcgatgccgccggcggggaggagcagagaaggagtagcagcacatggaggaggttggtggcgtggcggtggggatgggaggcattgcggcattgaggaaggatgacgcgaggaggagttcttcgcgggggcatctgttggcggccgagaggaggcgccctcgtggcgctccccaccaccacagctgctgccgaccgccgccgctactgccgcctctctccgccgccgtcgtccgagaagagaaaggccggggggagagagagatataagagagagagggggaggaagaagggaatgagagggaggatgacatgtggtcccacttgttagtgggtcccataatacttttttttgtgaatgacatatgggtcccatatttgttttatttttgtttttattgataatgtcacgtaagcaccacgtaggacaaagacttggtccagaccgctatgtaggtgtcacgtcagccaaaacaatctccaaaaccacttaggaatattgtttgcaccggttttgatacttggaggagtcgatatacccgattttatcgttggatgacatgaatcatactcaggtgatagttaagggagttaaagtatactttttccttctaagttcccacatatttttcctattttctctctctttttttcccatttcccccaagtttttcatatgtgtattacctattttcatcatttttcctagttcccccctattttccttttatttctcctttgtttttccttttttttttgcattattccttttttctaatatttgtattcgtgctaatgggcctgcaccggcccacgtgccatatttgggctatgctggcacagcacgcgcccatggcctccttgggccgtgcctaggcctaaattttttttatttatacatttttttattaaaatatttaaaaaataatcttttttcgaaaatttacaaatctagtcgctacaggttagatattgttggtggaagaattctgtctatttccattggtggtaactatttttggaggatgttaaatgaaatgcaatcaatatataattaattatctatacgcagtagatggatgggccgacggttgtctccatctgtggagcgacaagtaactggtaagctcaaattgtgtttatttgttttagttgccagatagtttgtaggtttgtaacaaaggagatcaagatccaatttcaaggaacctaagtgcacaaatggtttctctgaatcatgaaattttcttcagttaaaactgcttatacatctctgatctctcccttatatggctcaatgattgatttgcttttaaaggcgcgtgctaataattgtgcatttagaccgtgatagattcataatccatacttatttcatctttgttgtgcccatttcaaaaagattacttgtattataaggaatagaggatatgtctgtaatttgaaactacaaaatgtgccacaccttgctaaaactggaatacttcttttggcagggctgaaagaaagtggtgaagcaaacttgcgagagctggatccagcatgtggaggtgctcatcccatgaagtcaatggtggcgatcgagtaggaaccaatgccccgggcctgagtgcttattcattgaggttagttgaggtcgtaagactatttctgtattttgttttttgtttttgtcaggattgaaaatcaataagaagaagaagagacgaagtgtaatcacaagcagaataacatcgatctcttccacctcccagattgtcttgccttttgtttgatctcttctcccttccctttcactgtttgattttgtcttgaaagattagcaccaagttcttatttgattgcatactctcttttttttttgcgcaggaggtgttcgattaaattctgcttaagccatgtgatactagaacgtggagttacattttttttggttgcagggtggtgttattagaacattttttctaaaaggataccatatgtactgtatatatagatggaaaattataattttggttgcattctcatgattagttgcgttgcagccaattaaggacatgtacaaaggtataaacaggtatgagctctatgctatctaaagactaacgtcctacaatagttggagacaatatggtctctaccattaatgtatcaaaatactttttcttactcttttttttcctttctttcactaccatgaaacaaaatttgctctaagaaatactaagagtcgactctaaaccgttgtcgtacataacaactatatttctctttcctcgtttctctttcttccatgtcatcaaacttacttgcatggtaacatagagagaccactaataaaaaaaaccgttgtacatgccctaatttggatcttgtagtttcaaaatcatattgttccacttgctctcctgcagattgctgatttggcgacaaattgtaatagatatatagatacgttacgcctaatgaaagttttggagaaggtgaacaggtgctactattatgctggtcctcacgcgaaccgccgacgccatggctgcccatggcccatccttcctccacacctcgcatccgtccttcgcaaccgccactccacattctttgtcactgcaaggcaagtttctgaacattatcacatcgaagcactttttggatgtttagtatagtgcatgctgccatgtacccacaggcatgtggacaagcatttgtcctgataacttgcaaatatgtgaaaaatatcaattgagggtactggagcatatctagaaatttgcttgctttgtctgaaggagaataggaactaatttagcaattagatatgctgtaaaatcatagcaggaaggctaggacagcaggatccaacaagtagatcggtgagatcaaatgtaaatcatgctgtcaaatgatcttctgtatgcctgattttttcttgtgttatatacttttgttcaaaagttcgaatgcacgactagctttttcttgtgctctctttattaccttgcattgaccatattaccttgatagtatcatgctgctcaaccaaataaccatgttttcaccttttctttttacctgatgttctgcttatttttctatttgggtacatggtatatacctagatgattcacttctgtgtatcatatattctgttgttatcatgtattcagcggttaatattgtggtaaaccgttaggccgaatcactacagtgagggcctgcttgaaagcttggtccatagatcagttggtttttttttttgacccacgaaaaatacaagtgtaatatactggtgtaaagaatttcgatgctgtcaatctacgaaaaataaatatataatctaagtaaccaatacagggtggagtccagggcagcgatcacctcagattcagagtagctgaggggacggcgtagaaggaagtggatggatcgagctgctacacctccgcactttgctgcctcgatctgccccgctgctggagccatccacttcaccatcgccgtggactgtgtggagtgacgagattctttaagtgtatagcaaatgctcaaagttaggattagttaattagcttcggtgtatattctatattacaccgattactgaatgttttatttttcatttgtgtatacgcacaacagattaatggaacaattctctaccatatttttcttttgtcctttttgtttggacatatattgcccacgtatattgtataccgggagctcggggcgctggcgaagtgggcgtgcttggcgaagaggactcgctgtccgtgaaagcggagggaatcaacacccctcccttcatcacgaccttcgcctgcctcttcacgccacttggaccacctttcttcggcgtagccttggcgatctccgctagagttttcgcccctcgaggtccgtttggcgaagcggagatgcgctggagccagcaatggtgttgccatgggaagcttcttcgcccctgctcccgtcggcagcttcgtcctcctcgtcgtcctcatcatccgcctccgactcgacgacaggcactttggaaaccttgcgggatcagatccaggcaccagggacagccttcggcaccgcacgcttgcacttcttcgacgcgctggccccctcgtctactttggcggggttcacccaggcaggcagttcaccatcatgcacctggtttgcccggccgtcaagctggcactgcagcagccagccatactccgcggttgttagaccgccgatgatcttgttggtgtcagcttctgcgtctccaagcaaaagtcgtacaaagtgaaaaagacaattaggctggtagtcagaaagaataagagatcagaaagagacgcgatcggtggcaaaaggcttacgattggtccattcgggaaaaacgagactgggaaggccgagcttttttttgtcctccttcacttcgatcccccaatcctgagcaaggggagcgatccggagcatgcaatgctttttgcaaaggtcgcgggtgctgaggcgacgtgcgaccttgcgaagaaggatgagtctttactccagcgttccaataacatccacattcggcttggagttgatggagatgtggaggtggcgaaaccggagcctacccgcgttgtcggagttggcggcgcaaggattgtcgatgtagagccatttctgcatccaatgccaatcctacttcggtatggacgtagggaccggccatgagtccgaccgctctggtcggaggttgaagttcacactgccgaagacagacttcttcggcccagcgggtgtgtgcacatctttcgtcgatgcactggcggtgaagaggagggcgaagagctccactataggagcgaacccggtcgttcggcacatctaagcgaagacggagagctttgcgatggccaaagggctgagttgcggaagcctcgcctcatacatctccaggacggagggcaagaaattgtcgcacggcagccagaagtccacgt

SEQ ID NO: 26732 - DNA, 1666 bp, Oryza sativa
tactggagtaaccaaatttggtcggtcgcccaaaaaccacaatagtcccggttcaaatagcaaccgggactaaagataattggagcctgcactcgacctgacaacttgttgaaccgagactaaaaataatctttagtcccggttcctatttgaaccgggactattgtggtttttgggcgaccgaccaaatatggtttctccagtagtggatctatttatttatttaccattcaacaaacatatttatggggtaaatttatcattcttgtcttgataaggtacatgaaggttttatatatttttaagtgtaaaatttggtacgtatgtatctctagttatatgattattttcgcggtatggaaaatttagttgtcttttgagatacattttaaaggatagtaaaatttctctccttttcttattatatgctaaaactctactcgtttattgacttattgtccatcatagattctaaactactcaaatcgcaaaagctggagaagaaggaggaaggctcggaaaaaaaaaatatatatggtcaaaacctcgtggtgcaatcgtaccaaacgtttcctcacatgcatactgaactttgaaaagtatgaaggaatcctctctcacaagtcaattaaacaactgcgaacaaattaattataaatgagctcgaattgtgttgtctctataaatactgaacgatgatggcaagcagcaggagctcatcattcatcccaatatctattgcatctgcaagagcgatcgagagagaaaaacaagatctatctatagcagctagctagctagcacaagaacgatatgccggtcttcactgcatcattccagtgtgtcaccttgtttgggcagccagcatcggcggccgacgcccagccattgctgcaagggcaacggccgttcctacaccttcacgctcgccgccgtcgaccatgcggtaatccatctcgatagcactatatatatcgcgctatacatatatacgtatcattaattgctgggttctacaattaatgttccggtgaactaaacttttctatggacggagggagtaattaagacgataacggaatgtctaataattaaatgacagtgcatgctgtctgtttctttatgtaggattttcatgtagtcctttcgtttaaaaatgcatggtgccgttgacttttcacacaacgtttgactatttgtcttattaaatttttttatataaatatcatttatttctttatgacttgttttattatcaaataaaatataatcttaacttatacatttacatatttatactaaatttttgaataagataaatagttaaacgttatgtgaaaagttaacggcgtcgtacatttttaaatggagggagtacttgataaacattctcacctcacctcacctcccatatatgcctgattttcagggcccatgctaataagcaaatcaccgccgtacccggcctcggaagaaacacgcgaatgggaagcagatggacaacatgaacacacggtactgtatacacgtataagcttcacactaccacatgtttcaaaatatagtaacctaagacggaggatgtattaagcggatattgatcattaattgtgcatatgcaaatttatgaacgaattaattgacactgataaacccctatctcaaa

SEQ ID NO: 26733 - DNA, 4658 bp, Oryza sativa
  unsure (1)..(4658): unsure at all n locations
ttcatggggtgatgcctccttcttcatgatgggagacgggatcatgagcaccctcgcttgtgttgtagcgttgaagtcatggaacatccacaccgataaatgcgagagaggtatgtgtatatcactagatttccttttctccattgtctcttcttgtggacacaatccttgatgtttctttttgatggactgaactttttgattttgtttactggtttgttttgattttctttaaaaaataaatgtgtttattaaaataatttaaaaaaaatcaaagttttacaaattcacaccccctgacatcacttagtgtagcgttttttaaaaacaccctcctaaataatattttttataacatgacacatggtcattgggatatgttaacggtcgtcgtacgaaggagctgaccatttttcaggcaacacccttatgaagggggccacttgtaaaatggcagcctagcatattttgtaagcgaccttcttgtaaccctcccaaaatagagtttctctatataggaagtggattttttcccttgagaggatgtccccttgttttgtgcatggtatttaaaaaatcatgaaaaatttgaaaaaaaatatcaagatagatcaatatatgatacatctttacacaaacatacaagttgaaatattacttatacaatttgaaaaaaaataacaaatttaaccacgaattacatgtttcattcatagttaaatttattacttttgtttctagttgtataagttaaattagaatatgtatgtttgtggagtgacatatcacatattgttcaatcttactattttttttgaattttctaatgacttttaaagatgaaaaataagaagacatccccttaagcaattaatagagtttctctatgtgtgtgcgtgtgtatataatatatgtatacatatattgcgctatcaacatgtttgtttttggatttactatgccaataatttgagagatgacaaggatttattgtcgtaggtttgttgtttatccaagaaaatatgtggaggttggcccatgaggaagaagactggatgctagttggatttgagattgccttgccctcgctcctagacatggctaaggacctggatcttgacatcccttacgatgagccagccttgaaagcaatatatgccgagagagaaaggaagcttgccaagtatgtatgcctatatctacttattaattattttgtttagtaaaattttagtcatgccacacacgatagaatataaaggataaaatccatcgtgaaagcgcccgcttgcttctctcttctctggtctctctcacaaatagctactctctccggggtgataatacttatctttttagacaaggacacggtctctaaaaagtaactttgacaactattttctattataatatatatatagaaatattaacaaatatatgattttattaaagtactttttaaactaatctacacatatggtcttcatattttaagataaatattttagaaattatttttaatcaaagattttaatgtttgactttacccttgttcaaaacgactaatattatcagtccgaagtgagtagcagatatggacttattgcatatgcccgaaacatgtaatatgtggatctatcgtatattagggttgcattactgtaaaaccattcacaaattattctccttttttgcttttcttatacagttaaaattattgtgagatttagagttatttttgctctaacatatcgcattctaacatctttttacaatgaatgaatgttttgcattcaaattctaggattccaagagacgtgctacactctatgccaacaactttacttcatagccttgagggaatggttgacttggactgggaaaagctcctcaagctccggtgtctcgatgggtccttccattgctcccctgcttcgacggctactgctttccagcaaacaggagaccagaaatgctttgaatacctcgatggaatcgtcaaaaagttcaatggaggaggtaattattgaagccgatttaccaaaatattttttgttgatttacatgcacaaaatttcagaattccataaagtatattaattaatttctccttatattagctagtttcttcttccttcctctcccagtacactgactcaattcaacactgtatctgtatgcaatgaaacagaagcgcacttctgtatgaaacagaacccctccctccgcacggaaaacggaacgatagattaacacgtgattaaataagtattagttataaaaaacttgaaaaataaattaatatgattttttaaagcaactttaatatataaacttttttgtaaaacgtgtacgtttaacagtttgaaaaacgtgcatgcggaaaacgagaaagataggctggaacccatgagaaagaacgcaccaagaggctaggttcagtagttcgtttagcttttgcaatctccttgtttgttttcattagcactactccctaacttgtaaatggtacctttactaacaactttttatatacaaccttttccagaaaaattaaataaacttacaatattattatgtttaataattacagcttacttattcattatgttttccagttccctgtatctaccctttggatgtgtacgaacgcttatgggccgtcgataggctgacgaggctgggcatatcaaggcacttcacaagtgaaattgaggattgcttagactacattttcaggtactaattaacttttaacatatctgtactaattaactttatgcacgtaggtacccaaagtgaattaattaatgtttagttgaccatatatatatataatatggatattaattatactggaacaggaactggactccagatggattagctcacacaaagaactgcccggtaaaggatatcgatgacacggccatgggtttccgtctcctccgactttacggataccaagtcgacccatgtaaatactgtccctcggttttatgctataaaatatttttcttaattaaattgtttaaagtttcactaagtagaaaattattttgctagaattttggtacgtcatccgtattagagtcagtttttaagttcgttcgcttttggaaatacaacatcgtgtttgagttggattttattgtttccttttggaagtataaaaggagtcgtacaataaatcttttgaaaaaacacgcatgctaacttcaaatgaaatacagactcctaattgtagctcataattttctaaaaaaaatccaatcgaattcccacggtgaattttaccctaactaaaccatataacaataataaaattaaaatagtatttacccgttgcaacacacgggtattttttctagtacaataaaaaacattcaatgttacatttaattaaactaatttgatgttatagatgttgctaaattttatataaaattaaggtttaactaggaaaaaatcatagagacttactgtaatatcaaaatataaacacatgtcctcggaagaaaagataaacacatggagtagtttactaaccgttgctaattaatgtctaataattaagatatccaacaaattaacattactactccctctgtttcaaataaattacttaccaatctagcaattctcacacaaaccaacaatatgtagaagattgtattacatggtttaccttcattaaatacatgacaacgataagtattttgatataaaatttaaattctagaatgataagtaatataaaatggagagagtatttactttaataattgaacctagctaatgtgctcaaacaataatgccatgcaggtgtgttgaagaagttcgaaaaggatggcaagttcttctgcttgcacggggagtccaacccatcctctgtcaccccaatgtacaacacttaccgggcctcccagctcaaatttcctggcgatgacggtgtccttgggcgagctgaggtgttttgccgctcattcctccaagacaggagaggctcaaacagaatgaaggacaagtgggccatcgccaaggatatcccaggcgaggtatgttaagtcctactactccctatgccaaaaaaaaaaaaaaaagagcttttcaggatgaatctgaacatgcatttgttcagacaatcgaaaatcaatgcaattttattaaagtatatatgaatgggatgtgataatactccattcctattgaaaatgcaagtttttgatgctaagnctaccacactaattcagttgcgtcttctaacttcannatatactcctactccctccgtccaaaacaaaaancctttcaggatgaatgatatgcatttgtctagactggaacagagagagtgcctagctagcaatggaaaattaatgcaaatttattaaagtatatatggatggaatgtgataatacttcaattcctattgaaaatgcaagtttttgatgctaagctaccaactaattcattgcgtcttctacttcaatatactcctactccctccgtccaaaacaaaaacctttcaggatgaatgatatgcatttgtctagactggaacagagagagtgcctacctagcaatggaaaattaatgcaaatttattaaagtatatatggatggaatgtgataatacttcaattcatattgaaaa

SEQ ID NO: 26734 - DNA, 2764 bp, Oryza sativa
agcataccacatatatgattaatttcttactcaaaattatttacactttatatgcaggtggtacttgaggagtaatctggagaagtttggagggactgatccacagactacactgatgacatcctacttcttagcttcagccaacatcttcgaggcaacccgagcagcggaacgtcttggatgggctcgcgtagcgttgcttgccgatgccgtctcctctcacttcaggagaatcgggtatatatgtttaaccgctatattggacgcgtgacttcactcaccaaatcgatcactcggttttgctttagtgatcgatcgatcaatggatgcaacatgagcttacctgcatgctgctttgcaggggaccaaaaaattcgaccagcaatcttgaagagcttatcagccttgttccttttgacgacgcttattctggcagtcttcgtgaagctgtaaattaatttatcaaatcaaaaccgtgttaaaacttcaaatggaaacataaatatgtgccaaatctttataaatttcgttttgtaaactgcagtggaagcagtggttgatggcatggactgcaaaggagagcagccaggagtcaattgaaggggacacggcaatattgttggttcgtgccatcgagatttttggaggacggcatgttttgaccgggcaaagaccggacctttgggagtattcccagctcgagcagctcacctcctccatctgctgcaaactttccaggagggttcttgcccaggtaaatatttatatgttaacctgaatttttatatacacacaaaacactgtccttttaatcaagttgtacatacaaatacacacaaatacagtaaaacatgcatagtgtttgttataactaaaatacatcccttatgtagtaaaatttttaccgcaagttatatcgttgtaaaatatcttatagtaaaaaacttttactaatcgatactttatagtacaatttttactagctcaatatgccatttgatgattatagtccccgctgtaaaaatttcactaccttggcttttgttagctatggcacatcctggctatggtatagtacttctacaatacacaaacatatataattgttaatttgcaacgatgaaaatatttaactttgattcaggagaatggggaaagtacggagaaagttgaggagatagaccagcaagtggatttggagatgcaggaattgactcggcgcgttctacagggctgcagcgctattaacagactaacccgggagacgtttctccatgtggtgaagagcttctgctatgtcgcctactgctcacctgagacaattgatagccacatcgacaaggtcatattccaagatgtgatttaggaacaaattaccccgactcatctacactccttataaaagagagtagtggtggtgttggttctgccacccccacctccactaccaattcccgacctttatagaataaagatgtgtcttttgtattaagtttgttgtggtgtacctcgtgtttttcctgagacggggtttaatttcgtggcgtttctgaaaggtaatttctgtgtatgatactgaacgccaacgataagcctctggggtctactctattcctgactcaattcatcctactcctcttgagctagagtcggctattcctgacgctctagcgactaatgatggaaatggaacggtgtgtggctaggaatctacacaaattaatggatttaaatttcgggattttcaacactttttggaccgatgtttcttgaattttagcataatttaactgaatttgactaaattttgaccaaatttgcaaaattttgagaaaaaaaaaaggaaaattgtggcggagataatcacgtccttggaggtgggggttggtccaaaattacccaaatttcaaaaatttcaaaccgaaattgcattatctgcacaaattaacaattcaatatatagatccaacatctcaatagacattaaatactcagaaaaagagacacttagtcctcacaaataagaaaatagcaacagaaagagtacctggcttggcttcatctccgctcccataggtatctcaactaataagtgtaagaaaggtcttctaactctatcttctcgagtgaaaagctttacttcaacgatgatgttatgttaatagcaaggtgagtatatgtaacgccccgattttcgttcgggattaaaaatcattaaataatgcattttctagaaattaaataaaagttaaatcaatttaatcaagtgaaataatgggagaattaaaattttcccttaaaaatcattggccgggaatattttgtaatattctttgtgtcctaaaatactctccggaattttccgtaaattttcggagctcaagaagtaattttaatggcacaaagttcatcgaatcaattaaataaaaaaagaaaacaaaaactccccttcctccttgggccattttcggcccaagaatccttcccctcccgcggcccgcgccctctctctccctctctcggccggcctccctccccatctcttgggccgtcggcccgtttcccctctccctcgtgaagtctgttttacgtcccccatccagctctccctccctctctccccgacaggtgggacccgtggaccccacctgtcatccccttcctccagctccaactgccgccatggccgcccgagccgccccacgacgccgccgtttccgcccaccttctccaccccgcgcgcgcgcgctcgttccggggacct

SEQ ID NO: 26735 - DNA, 26341 bp, Oryza sativa
atagccgtgcccgtggttatgggcgatcgaccagattcaccgtgattagtctcacacttaataaatcgacccaatgcactgtagtacaggtgggttggttgggcctgttcaacgtggtgtagcgttgatcagtggagattttaatgttactttaattactcaacagttttactgtttgctaaataaaatgttttacaaccgcctttatgcaaatagccacaaacccctccttgtatcccttttgcacgtctgcatcattggtgtggcttgctgagtacggtggttgtactcagccttgctattattcccccttttcagaagtgtagtgcttctgagctgaagatggagttagaggaccaaggctcagaccccagttgagttttgcctgtggagtggagctgaagccccgctaggatcgcctttttccgctgctgctgcttttgtttcggtgtgaggactaagtgcctcatctgtaagtattttacgctttagtcacgtttggaactgtttattacttgtcgttttgtgtaccctggctggtcctggacagggatttaatacacaaaatagtctggaaatttgggctaaatttctgggcgtgacagtatatatgatagcatctgataaaacctatgtgatcaagacatgataatcataggacttcatgccaatcagcttcagatcgtcatcaaaacaaacttactaatccttgatgagtagcccgaaggaactttaatgcccttcaagcatgctatcatatcattcttctcttcctccaataaagtgtggtaagctagagaaaggtatactctgccagttcgaacttattggtgctagtttactctgatttatcatatcttgtaaatctcggtgtgaatttagtccgttcttcgccattcgaaggatatttagtagtaacctagtcacactatcacaagcgttattctgtacatgcattaaatcaatacaatgacggtcctcgagatactttcagtatggcagccattagaatatagactttatcttccacatactcttctcatttgtctctccaagatctatgaatgatggctacagaagaaagggaaagtttcagtggaagctaaggattttgagtgtctgaaggatggagatgaagaggccaatgaacaattgaagtgaacttgaaatgaatgtcactactgaaatataaaggctggagtgacggttcacgttttgaggaatgtggtgcgatattcccggtgaaacagtagtgtggtattatgaaatttgatctatccaaatttgaaatccgactacgttctagtatttggctcggattaaagaaccaagtagtttaccttaacctaagcgcatgttttccgattacgatttatttgatgaaatggcttcttgggtaaggacagcaacaataatattggatatatatttacattgaggtcatcgctattgtcaatgttataaataagggataccccatatacctacactaatcatcatcgccaagaataccacacacttatatacggaaatatatccctaaatctctactattataaaaattaaagatgtttttctggtactttggtacatcatccgtgtataagtcggtttttaagttcgttgctttgggaaatacaaaaggagtcatataaaaaatctctttaaaaaatctcgcatgctaacttcagacgatcggactcctgactgcaactcatgattttctaaacaaatatatatccacgcgaattctcacaatgaatttcaccttaactaaaccgtataacaataataagattaaaataaccttcacccgttacaacatacgggtatttttctagtatatataaaaagtaaaaataatagagagtcatgtttggctaggaaagacggtatagtctgatttagggacgatagggtcttgtgtacatgtattctaattgaaaaacatgcgaggaggttaaggtaaactacttaaaacaaattcacagtgagtttacgccaggaggaagcccttcaggttgccgccaaatacaaccagccaacacgtcaagagtagttccgtaggctagattagcaagcttgtttcccgctttgtagttggtgtaacaaaccccaaatcaatacacataaactggagttgggctgctacccacctctgggacctggaccagtagaaacatccttatcctttgcttgcgtatactttggtaccagctttatcttacgtccctcaaataccatagtcggatatgacccgtctactaatggttttaccaataaatattctatcaggatctattttttttacataaaattgaatttattagatttatgttcaaaaatatttacttatgattgtgcttttctatcatataaatgatgtactaatagagcaactgttggttaaaaccagatcctaacggatgaaatacttcttatattttgaatttgagggagaactgagaagtacatgctattgttcctaaatcctatcatacaataaagttgatgcacactaacttctaaatattaacatgcaagtgtgccacatcattacccagtagcaattattatctagagtattttaaaacacatgcatgtgtaccacatcatcactcactaacaattattatctagagtattttaaatatcatgcaaatatgacatatcatttacagttttgttgtatttttagaactcaatgtgcaatcagagtaaaatcattatctccatatcattttcacattatttaaacttgtacatctatcatttatatcatatataaaatgcattcatccacacatcccacggcaaagcacggggtatcaactagtattattaatttgtttgtccatttccccaggacaaacaaaacttattaagaggtatgcaagcacgtaagcgaaccgcaagtacaccgacacacagtcacacacatccatcaactttgcatggaaatcggcttatatggtgatgccactagctggagatgattctttctcctcgccgttgcaccaacgacgagctccatgtcgatatcacctggctgcatcccatccgggaggctccagtcgaagtagtatagaaggcgcgccacgatgagttccagcgtggccattgcaaatatatcaccagggcacctccttctcccggtcccaaatggcaagtactcaaaacgggagcctttgaagtccgctgtgccatcctcaaacctctctggtatgaacttctccgcatcgtcccaatactcggggctcctcgccatcgcccacgaattgatcaacactctggtgccctccacaatctcataccctccgatttcgcaggtctcccgacataaatgggggagtagcagcggcaacaccggattcagcctcagggtctccttgatcaccaacttcatgtatgataggttttcaagcaggccctcgtggtcttgtgggctcttgttgtcgaatactcctcgcacctcagcctgcaccttggccatcacctctgggttcctcatcaactccgacatgagccactcggtggtagatgatgtcgtctctgtccctcccgtgaacatatcctgaatgaaaccaactacatgagcaagaatgaagattgaagaaacatatactccctccgtcccaaaatataagcatttttagacgctgacacggtctttgagatactactttgaccaataatttttataaaagtaagatgttttaaataaaaagagttgcatgttataatattttgtttagtgataaatctagtaacacgattggtcttttttatttttttgctattaatagtcaaagttataaatgcttgacttgtcactattctaaaaatgcttatattttatgatggagggagtatatatttttcagcagtaaataaatgaaattattaccagtataattgccttgacgtgtgttgagctaaaggggaagtcaagctcgccctggtccttgatcctgagcaggacgttgacaagggaatcacccggattcgactcgcactgagcgacgatcttgtcgaagacggtgtccagctgcaagcgcagtcgctccaggcggctcctcagcccggtcatggcgtcgatgaaccgcagcgacgggaagaggtcgccgaagcagaacccattgctgaacttgagcgcttcgtccagagccgtcaagaactgctcctggagctcgccgccgcacgcctgcccgaacgccgccttcgcggtgaacgtgttcgtgcacgagatgagcagcgtggcgagggtgaacggcttcttgccgccggcggcggcctcgatgttcctgacaagggccagcgtctcgccgtccctgatcggcgcgagctgccgcaccatcttggtgctgaggagctccaccgtgcagagcttgcgcagcatccgccagtaggcgccgtagggcgcgaagccgatgtcgaggttgccgtagcagaagatctccgagacgaggaggctcggccgcgacgcgaaggtgacgtccttgtcgcggagcacctcctgcgccgccgccggcgaggagatcacgacggtgtccacctgccccgtccgcaggaacatcaccgggccgtacttgccggcgaggtcgcggagtgcgacctgcggttgcgaccggaggaggtggaggaggccgccgaccaaggggaggttccatggccccggaggccgtctcttctttgacgacgacttgcgggtcagcaacgcgagaagaatgggcagggtgacgacggagacgagggtgacggtggcttctgagtttatctccatcatcgatcgatagatagaggatgtatatatggcttgatgattgattaggtttaattacttggcagtttagcttgacgaagaacagcaagaactgaagggccttttataagcttttgcccaatgccatgattaattaaattcgaagttcatatacggtcgttagcgcaaatttccaggcatgtgatttgacctggacgtagaacgtgatatatggtcagaggaactgctagtgatcacgactactggggatggtcgatgctcagttgcagcgactcatcgatctaagattaagataaaactagagctcagctaaacagttttaacttcatctaaattaagagcgaagttaggtgtaacactctcacaaaataagctagagaggttgaactagaactagtagacggcttcacagcttcactttaaacccaacttttgaaactacattgagttgaagctctactgaagattcccttaaccaaggggggaatgaggaatgagggggtcgatttagtgccaaactgccaacgacgcataggatcgttggatctaccggtgcacctcgtcgccacaggtgaattaattgcactaactgaactaaaaaaagtcagatcctagcactattgtcagttgttttggctactagcttttcagactgcttgaccatacgtttctttcacaaattttatgtatagaagttttttctttagaaaatcaaataaaaccattttgcagactgtcccatgcaagtatatctccaagagaataacagggttgggcagtacagctacaagagaagaacatggctgggcagagctatatattaggaatgaccaagccaatattgaaacacatgaatagataaatcacaatattgaaatctcgtggcatgttgaatcctatagaaaatagatgagtaaatttcacaaagctacaaatactataacaaaactacatatttaactcggtgtatcacaaaactacagatttaacgttgagtttatcacaaaactcaacatttaaaatggggtatcacaaaagtacacattcagtaacaaaattatcatataactactggtttataaacaatttagttacaaaactataatcttaatagttacaaaactacagtgttaatagctccaacataataattgtgctagaatttcaaactctaaaatctataattttgtgataacttcaatatcaaatatatggtttattatacttggctttaaatatgttaatgttttgtgataaatttagtgctaaatctatagttttgtgatatacattttaaatatgtagttttgtgattttttgattaaaatacctgtagtttgtgcaattttctcaaaacagaattgcatgtataattgctccatacatatcattgtgagctttatgaaatttactcaaaatagaattgcttgtataattgctccaatcgtgtctttggatatttcacaggaaatgtataggaattttgagattatgaactcagatggagtatggctgtgttattcccccttctttcccaactcacctatgtttttttttccatgcacacgtttttcaaatttctaaacggtgtgtcttttgcaaaagtttttttagaggaaagttactttaaaaatcatataagaattcatttttaagttttttttactaatactccatccgtttcataatgtaaaactttctagcattgctcatattcatataaatgttaacgaatctagacatatgtgtgtctagattcactaacatctatatgaatgtgggcaatgctagaaagacttacattgtgaaacggagaaagtacttaattaatcacgcgttaatggacaacactgttttccgtacacctcccgatcgcagcttaagagaagagagagaaagggaggtgttgctttgtaattctcattaaaaaataacatgacgttggagggtatatgtttaagattctttggaattaggccacacgaatgaatttcaaacgaattttgtaagcccaaatataatcctacaaaccaaacaacctccataggaaaaagtcccaaggatccaaattcgtcatttttcatttgaaaatcctcccatccagaggggcaattcccagatgccactagcactgtccagtatatatatatgttgttcatcgtcccgggcgtgacagcgtgagatccgcttgtgtacccaacactcctatactttgatggtcagtctcctcgcccttggcttgtgcaagagaatcacaaattcacaaaggcgagcgtgcgtgcgggggagaagagagggagagaaaaggataagtttactgtgcacatatatctcaaagcagattcgacggtcgaattcaaatgatgtggggtatttattgtgtaacacaagttgtgtagtaggactgtaggaagtggcttgtaaaaatgctaccgacttggccaccatctcctcgcctacatcatctgtcttagatatatattatctattaaaaattagagaaaatcctataaatagtaagaaaatattcgctaagctgccatatggtgttctaaaaaaaaattagagaaaatcctataaattctaacaaaaaaataaaacatctgtctcttgattgctgcgtaaagtgatgggtccagaactataaaccgttagaatctgttgatcttaaaccaatctaaatactagtcccacatctcctcctgtggcagcataggtagtcacgctttcatccccttccttttttcccatatatacaactatcatcggtgatatataaaagttttaaattatgatgatatataaaagttttaaataatcataattttacaaacaaagattataacatcgtataactctttgtaaatagaggtaactaaattagctctataatgtttggaaataaaattacaccactatatttttacccattaaactaataatataagatgattttcagttttcctgttaaaccggtggactcattactttgaattattattttaaataatgcaccattttaaagtaaagtttgcactattatatcattatattatttaaccattaaattaacaatttaagatctacataactaatttacatttacacttaaactaatggacccattatttaaactatcatatctatgttttcattaataaacaaagccttcgaagttccttctctagcctgctacacaacacatgtctacaactctaccttccacacgagcgacgaagtgtcgtatctaaggcagttaaggtgatcacgatagctgcaacactaccactttgccacataccaaataaaatatggataacgattagttttgttagtaacttggaaccaaattaaaggtgtgatgcagaaagagaagaagtaaccatcgtgggttatgtttttctaacacttggctccgtttaagctgaaacaaagagcatacgggttataatgtattgtatgaggtcgtatttagatttcatccatacagcccaaagaaattactatttctccatgcaggcgaaagaaattattatattataaatgtgagcataatattaaccaatatcaatacacttcttcctaagacaagagtgttataagcgaatttaaggctctttttttccctgattccgtattttggattttcatttgcatggttcccaagttcctaaatggtggcatgatgtggctcttgtgcaaagagtttttctttgagtatgaatagtgacaaagatagaagtaagaatgagaatatgaatatgtagcaaaaaacaaattaggtgaaccaatgttttttaagtagtcatggtttgttttgcgaagtttgattaactctgaagatgtaaatcatattgaacttattgatcataatttacaacaaaatggtattcttggtgtcggtgatatgggaccgggagtatcgtgaccagaggcttgaggcagacacaatcgcccacgtggcctggcaccttcggggacgacgggcccgagggtgaggtgtccgccctcctcctgatttccccgagggggggggggtcgggtgactcctgccccggccccgagggccgaggcgccccgaccccttgtggagttagcgccacatgaatgggttgggtgaacatggtaagcctcacttaactacatttattgcggtctggtcgaacgtgtcacgctgcatgcagcgtagtgcagtgcgttcctttatccggtccgtgaccagtcacagaccggtcagatcacgggttaggtggcgactggcggtctgacgcacgccttgccccttctggtcggaggttgccctcactttcgaccagaccgaccacccaccgtgcgtcgcccggggagggcagattgcgatggtggtttcccccaccatctgcaacgtgaagttggggcgtgtcctcatagatgggggagcggccctcaacatcatttcccccgcggcttttgatgccatcaaggccccggggatggtgctccagccgtcccaaccgattatcggtgtgacgccggggcacacatggccgttgggtcacatcgacctaccggtcacctttggtggatcagccaacttccgcacggagcgggtgaacttcgatgtggcggacctcagtctgccctacaacgcggtcctggggaggcccgcgttggtgaagttcatggcggctatccactacgcctacctccagatgaagatgtcgggccccggtggccccatctctgtccatggcgacctgaaagtcgcgctcgcttgcatggagcagcgcgcggaccacctcgctgctgcgtccaagcccgagggtggtgacgagaggcttggcacctccgcccccaccgccccggggcagcggattgtcacatgcgccgaggtcccggtcaaggaggttgccctgggcgacggcccatccaagaccacacggatcggtggtcttctggatggcaaataggaagacgcgctcgtctccttcctgcgggcaaacgctgacgtcttcgcatggagaccggcggatatgcccggggtccccagggaggtgattgagcaccgtctcgccgtgcggccgggcgcaaggccggtccggcagaaagtgcggcggcaggccccggaacgtcaagccttcatccgcgaggaggtggcgagacttctggaggccggattcatccgtgaagtcatccatccggagtggctggcgaacccggtggtcgttccaaaggcgaacggcaagcttcggatgtgcatcgactacaccgaccttaacaaggcatgtcctaaggacccttaccccctgcctcgcatagatcagattgtcgactccaccgcggggtgcgaccttttgtgttttctagatgcatactctggttaccatcagattcgcatggctagggaggatgaggaaaaaactgcgttcattacccccgtaggaacctattgttatacatcaatgcccttcgggttaaagaatgcaggtcctacttttcaacgtactactcgaatttctttgggtagccaaatagggcgtaatgttgaggcttatgtcgatgacttggttgtaaagacgcgcaaccaagagactttactcttagatctagcggaaacttttgaaaatctccgctccgcccgcataaaactgaaccccgataagtgcgtgtttggtgtacctgcgggcaagcttctcgggttcttggtctctgcccgaggcatcgaggccaaccccgagaagatacaagctatagagcggatgcgcccccccagcaaacttagggatgtgcaatgcgtcaccggttgcattgccgccctaagtcgtttcatatcgaggctgggagagaaggcgctacccttatttaagctcctcaagcgctcggggccgtttacttggacggaggaagctgaacgtgccctcactcagttgaagacatatctcagctctcccccagttctagtcgccccggggccaaatgagcccctactactctacttagcggcgaccccccaagtagttagtgcagcgttggttgtggagcgcgatgaagacaatcctcatttcgcgcacccccgccctgtgctgacttgacccgggagcgagcagggaggagaagcccccgagtcgaacggtggcctaaggcccctgacgaccggagtcggccctctgcccgcttgtcagacggtgctgggtgcccccgaccctcaggaaggccccgaggccactgcgggaaggccgcacctatcgccctttggccccgaggctaaccctgtgctgactcgacccgggagaaagcagggagaagaggcccccgagccgaacggaggcctgaggcccctgacgaccggagtaggccctttgcccgcttgtctgacgacgccaggagcccccgacccccaggacggccccgaggccactgtgggaaggccgctcttgtcatcctccgaccccgaggtcatcggcacagaagacgagtgcgccccgagaggccacttggacgaagaacgccccggggatgcggcccctagcgaagaggatcggccccgccgaaaggtgcagcggcttgtctactttgttagtgaggccctccgggacgccaagacccgataccctcaggcccagaagatgctttacgctattctgatggcctcgaggaaactgcgccattatttccaggcgcatcgggtcactgtggttacgtcttaccccctcggtcaaatcttgcataatcgagaaggtacaggacgagtggtaaaatgggcaatcgagctttctgagttcgatctgcactttgaaccacgccacgctatcaagagccaggccctcgccgattttgtggcagagtggaccccggctccagagaccgtctcaatccctgaggccagcacggacccctctcagctgcctcacaccgcccactgggtgatgcagttcgacggttctctgtctctccagggcgccggtgcaggggtcatgttgacctctccgaacggagacgtcctcagatacttggtccgtctcgactttcgagcgactaataatatagcagagtacgagggactccttgccggactcagagtggcagctggactggggatccgccgcctcttggtgttaggcgactcccagctggtcgttaaccaggtctgtaaggagtaccggtgctctgacccacagatggacgcttacgtacgccaagtgcggcgtatggagcgccattttgacgggatagagcttcggcatatacccagacgggataacatggttgccgatgaactctcacggctcgcgtcctcgcgagcccagaccccaccgggcgcctttgaagaaaggcttacccagccgtcggcgcgacccgaccccttaggggagacggatgcgcctgaccggcccccgaggcccgtcggagtccaggcctcgggacccgaagggagcgctccaagctcccttagattgattgcttggatctctgagatccaagcatacctcacagataagactctacctgaggaccgtgaagggagtgaacgcgtccaacgcatttccaaacgctacgtgctggtagaagggaccctctatcggcgcgcggctaatggaatcctcctgaaatgcattcctcaggaacaaggcgttgagcttcttgccgatatccatgaaggcgagtgcggagcccattccgcctcgcgcaccttggttggcaaggcctttcgtcaagggttctattggccgacagctctcaatgatgcagttgatctggtccggcgatgcagagcgtgtcagtttcacgccaagcaaatccatcagccggcccaggccctgcagatcataccactttcgtggccatttgctgtctgggggctcgatatcctgggaccgtttaagcgggccccgggcgggtttgagtatctgtatgtcgcgatcgacaaattcactaagtggcccgaggcttatccggtcgtcaagatcgataagcactctgcacttaaattcattaagggcatcacggcccgttttggagtgcctaaccgtattattacggataatggcacccaattcactagtgaactcttcggcgactactgcgaagacatgggcatcaagctctgcttcgcctcacctgcccaccccagaagcaatggccaagtggagcgtgccaatgcagaaatcctcaaaggccttaaaaccaagaccttcaatattctcaagaagcatggcgattcatggatcgaggagttgccagcagtgctctgggcaaaccgaactacaccaagccgagcaaccggggaaacgcctttcttcctcgtctacggcgcggaagcggttctcccatccgagctcaccctgaggtctcctcgggctaccatgtattgcgaggctgatcaagatcagcttcgcagagatgacctcgactacttggaagagcgaaggcggcgcgcggccctccgagccgcgcgctaccagcagagcctgcggcgctaccatcagcgtcacgtccgggcccgatcactctgcgtcaacgacctcgtcctacgccgcgtccaaacgcgtgctggattgagcaagctttcaccaatgtgggagggtccgtatcgagtggtcggcgtcccccggccgggctccatacggctggccacgggcgacggcactgagctgcctaacccgtggaacatcgaacaccttcgtcgcttctacccctgaggggggggtcgagtgtcatgttttgggctcgggccaaccccgcaccccctcgggcgtgtagggttggccgggggctgccacacgtgcacattcttatttcttttttttcaatatttcaataaaagcagtttcaatttcctaagggctgtatctgtgccgttttttcctttttgaagaattttgatttgaaatgaggtcactcgtgctcaaccttgccctcgggggctcggttcggtcagctaaaatcgccaaacggggcccagaaccgagccgtgccccggggcgtggtgaactccgggggggaatcggcaaaaacccacaatcgggtcacccataaccctcggtcaccacgttcccggcctggccagtctcgacatgcggatctccccaggcactagccccgacccgcgcttttcgaggactgggacttgggcacgggcccttaaatcaagctaagacacaaaaagaggatcacggcacagatcatcctcatctcattcgcatagcaaaataaaattaacacaaagaattttttcatcatttttgattgcagattgtaagttgatttatacaaaaaacaggcccgagggccttagaagaaaggaaaagaaaaaactggagtctggagggggcctgggggctcagtccgatgcgcccgggtcgccggcctcgtcgtcacgatcgtcagcaccgctggcatcgccctcctcgtcggaattgggggcgaacgcgagccgaggggccgacccctcgaaactgtggacgatgtggtcggcggcatcccggacccgcgcgcgcgcgtcgtcctcggtcccgggagggaactcttccagcgccatccatggagagaagttggggtccctggcctggtaactcgctagtacgagttcaaccgctccttgggcgaggtccctcgaggatgacttgatggtcttctcgagctcctcggggagttgttggagagcccaggccatcttcgtgaggtgcggagcgaggccttccaggttggtggggcgtgtcattgactggcctttccagaggcccgcttgccgaccggcgcgatccaggcgggagactgcatcccagagcatgccgggccctatctcgcccgccaagcggagggcctcggcttccccggcggatgagtttagcgcgcgctgcatgtccgcgacggtgtgttcggcatctgcgaggcgggcggctaagtcgctttcgcccgcagccgccccgccgatgcacgccctcgcgtccagctctttttcccgcgcctcgagatcggcagcccgctgctccagtgcggctctctcggcgcggacggattccaaattgcggcgggcctgctccgtcaacgctgcctcacggagggacagggagtccgccaaccgttgcgcttcggcctcggcctcttcgagagctcactcccgctcggcaagcgcgtcttcgcggaggcggagtgcggactcctcttcggcgcaggcagactcgtgcgccgccagcgttgcctcccgggaggtgacggcggcctcgcggtccgccaggactttctccgcgacgcaggcgcgctcctccagcgccatggcgcgcgcctcgagggcctcttcacgccgccggagcgccgcttcagtctccgtcgctcgctgctctcgggcagcggcggcatcaagaaccccctgggcggcgtcgagctttttcttcagctccgcctcccagttcccgtgctgaaggcggagggagtcctgcgcctcgatcatcatagtggtggcgatgagggcagccccccgctcctcctccacctctcgggcgatctctgccagcgccgctttgcgggcttcaagctccgagacgtgacggcggtgagccttacggcccacctccaccatgacatccactgagcgccgcccctcctcgacacgcgcccatgcggcctcgagctccgctcgttccgctcgcagggcctccacttgggcgctgaacccatctagcaccgcggtgtttgcggcggccaaggcctgcagaaggggctcggcgctcagcggggcgacagaagacgaggagaagagccgccttggagagaatgcgacgcggctcggcccgccggaggacgcactgggctcggggatgtcccccggacccgtttggtcctgggcgtcgcctggggaagtgggcccaggcgatccgcccgcggcctcgtcgcgagccgccccggaggctgtcgcctgagcgtcgcccgagggagtaggcccaagcgacgtgccagcagctttgtcgtgagctgcctcggaagacgccatcgcctcagcctggcgaacccgggcggcctcctcccgagcggcttcctcggcttggcgggcccgggcggcctcctcccgagcggcttcttcggcctggcgaacccgggcggcctcctcccgagcggcttcctcggcttggcgggcccgggcggcctcctcccgagcggtatcctcagcctggcgagcccgggcggcttcccgggcggcctcttcagcttcccgtaggcggtctgcggcctctcgccggtcagattcccgcctccgtgcctctgcggccgccgggtcttcggcctcggactggccggacttgggatggtgggaggaacgcgatgggatatcactgaagcagaaagaaaaaccagaaggcaaacaagatgggtaagagaaaacttgcttttgggatagaagaaaagacggtcgcaatgagcgtgggacgaacctgcgagggggtcggttaaatgaccaccttggaggggaaattaggtttccccgggatggttctgtctcccccatcttgcgcagccgcttcttcttgcgctccccctcgggctgcgatgttggcgcggccccctccgggtgcctgctgctggcacgcactgccccgccccctcgggaaggagatgggggaggtgttcctcccagtttcctcttcccccgggcgtcggtagggcggttgctccccgagcccccgacgcggggcccagaagcacgaccccctccgggggtagattgatccccccggcggctcccacctgcgccgtcatggcccttaggagcctgctcctctgaggccccgaccgccgtcataatggtcaagatggaggcacgatctgggtcgctgcagagggggaggataccgtgggggatgagggacgcctccacggagttgagatttagcacccgttggaccagtatcttgaagtcctcgggggcccaatcccatctgactccctggtgggtccgcatgaggtcttcggacccggtgtactcccaggcggcccgagcgcgccgctggagcggcgcaatccgacgacggaggtagtcgccgtacaccatggccccggtgagcccctgggatcgcaggcccgcgaggcggtcgaggacggcgtcatagccatcccccagatctaccggcgcccgccagctggaggcctgcgccgggggctgacttggaagtcggaggcgcgcttcgtcggcgaggggggtgtagaaccagtcgctcttccagtcatcccactttttacggaggacgcaggggatgtagcggttcagcaccggcccccgcggcaggaaatagcagccgccgaccaccgacggtggcgataccgactgcacggtgaagaaccaccggaacagccggagagatgggcgcaccccaatgaacatctcgcacaggtgtgcgaagatgcccaatgtcatcactgcgttgggggtaaggtgcgccatctggagatcgtagaactccaggacatccatgaagaaagaagaaaatggcggaaccagccctgccattgcgaaggggagaaagaagacggaccgccccgggtagtctggcgccgggcgtccctcacccagcattactatctcacggccggtggcagattccggcatgaagcggcgcggcaacccagcctgcttctcgctcacaatgcgagaaggcggtagcacgctaccatcaagcagtgcggagccccgtgccatggcgccggacgaagagaagatgaagaacgagcgcgtgtggcgaaagaagggcgcagggaagaaggagttaggacgcaagcggcgaaggcaagggaaatgatggcgaaaggaaggagacaaatcccctcctcagtgcctttatacccttgccaacgctgtgcccggctcctcgtttctcgcgcccattatttcgccccctcgtttctcgcgcccacgcttccactaatcccattcgcccgcttgcggcgcgtgagatggatatgcggttgcggcggtcgagatagatcgtatcgtgcgcgcgttaattacgctcgccgaccgaagcgacattaccgtatctccaggcgaggcaaatcggctcgcccagattcgtgcgccgctcaggtgatgtggcagtcttgaagagaccgcccattattgacagccaaattaccattaccggtgtgcatggtttgagaccgttgggtttttgcccaaccatggagaccggtcccacctgtcaccaagttttaggagtggcgtcacgcccgaccgcttcccttgagaagggcgatcgccctggcataacgccgggggctactgtcggtgatatgggaccgggagtatcgtgaccagaggcttgaggcagacacaatcgcccacgtggcctggcaccttcggggacgacgggcccgagggtgaggtgtccgccctcctcctgatttccccgagggggggggtcgggtgactcctgccccggccccgagggccgaggcgccccgaccccttgtggagttaacgccacatgaatgggttgggtgaacatggtaagcctcacttaaccacatttattgcggtctggtcgaatgtgtcacgctgcatgcagcgtagtgcagtgcgttcctttatccggtccgtgaccagtcacagaccggtcagatcacgggttaggtggcgactggcggtctgacgcacgccttgccccatcccgtcaagacgaaagcctctaggcactcgtctcaagccggagctagcgtgtaatctcttagagatggcacgttagccctggttagatttataccagacttcatcccaaccattacaggcaagatgctacatgaagaagggcaaacatgcacgttgctgagccgacgtgtggtggacaagaatgaccgatttgtgaccggtctgacactgctcatgtcgtcagcacacagccaccttcccacgacgtgcccgcctcaggcagaagtggaggtaggtatgtgccgtcccatcaggaggatgttcggaggacgaccgtgcaaatctccgtccatttatgaaaagaaaaaaagtccagtttggaaagggaggggtgcatgtggtatccccttgaagtataaaaggaggaccttgcccatagaaaaagaggttggttgattctttccagattcagggcctagaacaagggatagatcggctcacactttgtagctccttcatacacagatccaccaaaacacaggagtagggtattacgcttctcagcggcccgaacctgtatacatcgcccgtgtctcgcgtttcttccgagctgatgatctttccacataccgagagagcttgagatctcaccctgagcccccggccgaaccggcaaaggggggcctgcgcggtctcccggtgaggagccacgagctccgtcacttggtataaccggattacatgacagaaatactccttactataagacacttcattataggtactgcatactaattaaatttatataattatggtcttattccaaacaaatattgttcatagaaagtaataaaaatctataaataaatctaattaaaaatattgttgatattctgcactaccaaggcaagctaagatccttcaaactatggagaaaataagaaattgttgaacttctacaaagaaaaaaatatccaacatttaatttggttgtcactgcattatacgccttcatgagaccatttaatcacaagaaattcgagttgctctttccatttgcttgtagctatactgcacggtatgtatatagatgatatgtaggataattagcttgtggtagtttattatttactcaatgcaaaagatgattcaaaactcgcatgaacttaatccatcttctattcaaaagttggtgaatgattttttagatatttaatcaaaatagatcccttaagttatattatgataaaagtatattatccgatctatagtttcctctcaatgtacaaaacaaaatttttaaacaaataatgatcataccttttaacaatataagtgcccacacatgcacgcgggccaccttcctagttatatacgaaaagtctattaaatttcttacaaatactcttaagttaccatatgacatcctacaaacgttactaagccgccacgtagcactgtaataaattagaaaaaaaacctaaatactatgagaagaaaggcaaaacatcttgtcattgattttcattaaatttagttggcacattatttaccaccattatatttatattaaaaaattcacctcccaaaccagggcccacctaggcctgtaggtacatgtgtacatacggttactgatgtacatccgcacccgtcttcccttaattccttcttcctctttgtcaccaattccttctcctatttccatgctttattagttagagaagcaatttttttgttaaacaattaagaaactataacatctaaattgtacaattatttttttatccattaatatgtttatttttttatgactaaactgatattgtatgccatttaaacaattaaaaatattaaattataataatattacatattttatcatcgcacataacttcataataattaaattatatataaaatcataaaagtaaaatgtacattactatgaataatgttcccggaatatattacttagaaagcaaaagttatacttaaaaaaaatcaactatgacatctaaatcatacgactaatatttgatttgtttgtgtatttagattattttgcagttaaagattcattttcactagaattcaattttgaaagaaaagtatgtcactttgggcttatattctatgactttttcatgtcattcaaatcattacaaaattattaaaaatataatgatatagaatttattatcatatatgtaacttcataattaaatagatctataataataaaattaaaatgaacctaactctctatgtattgtttgaaagaatcactcccccattacgacattataataagtcaaaacaacaatactccctccgtccaaaaaaaaacccatcctaatatggaatagggcataatctattacaacaaatccggacaggagtatgaccaaatttgttgtactatattatgtcgcatcccacactagggctgtattcgcaattcctggatgggaactcattccctccgcaaggaaaacggagcggtccattagcgcatgattaattaagtattagctaatttttttttcaaaaatagattaatttgatttttttccagcaactttcacatagaaactttttacaaaaaacacacctttagcagtttgaaaaacgtgcgcgtggaaaacgagtgataggtgttgggaagaagggggtgccgaacacagcctaggttggggtttttttaggatgagggagtagatttgtagtgttcatattttcaatactactatgaatatactacaggaaaaagacgaatcttaatccatcaatactgattttataatattttaagttaataaagtaattgtaaatattataatatatgcacgcgtactctctcccctttgactatttcttccaatagtctcttatttatgttcttcatcttctaatttttaactaattaataacttaatataaaaacgataaacaattataaaactaaatgactataattcttaagttatatctgatttttagtttatttgaaggttgttttatttataattaaataaataattcaagatccatattaccatatttcattttataaatataaaaatacgtcatttgaatatagacacctattgtttgcatggtaatcaaataaaaaaagggaacattataaaaaaatgacaataactattgtatcaccttaaatcattatacatcctctctatcgcacttaagtcgttacatattacatcttaactaaaaatagaaccttagaaattgtaagaaaaataatatcaaatcatcggtttccacttaaaaaggtggatccattatttttaactagtagatatagttttgggaaaatcttaagccaccatgtcttatgacttaaaaattagaaaaaaaataggatattggatattctgaaaaaaattggccgatcggttcacttaaatcacatagaaaaaatagacaaaaaaaatgcgcctccacttcaacctcctgtcactgcacacaacacagaacccgtcatgccctctcttggctcaagctctccaccctccatctatcctcactattttgtatagtgagaaatattcaataatattaaaatattcatattttttaagctacacatctgattcctaatctaactattgatgtattcataatcaaaccaacaatctaaatatccagaacgcttatattttaaactggtataaaagaaaacaagaaatataaaatatcaatagggaagaaaatctgacaagttcgtaaaaaaactggttcttacttttcactaaaattacaacagccatggcatgttccattttcataacaatttttaaatgcttggatgttaatagtcttacatctatcatataccatagcattatgagtttctcctcgtatgattgcatatataagccacactatgctagcggtttatagtttattgaaaaggtatatttgttactactagtttaaatttttggactcagtattttctttttaaaaagatattataggtcacgcatatcacaagaaagcaaggtctattatatatctttattaatttgcatataagtatgtaacaacttgcgtcaatctgaaccaactataaggatgactaacttgatggtatgaataaaatatatttattaacaatgatagttaggtaggatttgttagaaaagaacccactaaactttcaattaaactagacaaaacaccttattttcaatttagacttaatttgttagacacgtttttcaaacaaactaaatctaatataagtacgagatcatagataattatttataggatctataaaatattgtatatttaaaaaactagcaaatagttatttcgaaaagattatctaagcaataccgatgaaaaaaattatggagaaatagcacttttaaatcatggcaggtgtcatccgtaatatttcgccccgcagctgggcgagataggaggatgcagttggatattttttcgacaatatgagtttttcaaatgcaatttacaatacatgcatgcatgcatgcgtgtatgtcaggctaccttcctagtttacttaaaaagctgaagaatatgtgtcctagtttgaactgaaaccgaatttatttagcagcataataagcgactatgaccagaaaaatcaaacaaaaaacaaaatgttacaagttctttttttttaaaaaaactaaaagttactacattgttactaaattattatgtaactataatataataactatactacaacttctaaattacttatgaatgtaaagttatatatgtattttctaatacttatatgcaaattacataagagtagttattataatgtagttgtagcatatatagttagtgtaattatattgcaattatactatagttaaaattgaatgctttcaacttaaaaagtttttacagtaacttttttataataaaaaaaatgactcaagaacgcacaaacgtgagtcgaagaattgtgcacatataattagggatgaaaacggagcagatacggacggataatgctcataccatattcgttttcatatttttggccggatacggaaacgaatacggatagctcgaatacggaaacaaatacggactatctcgaatacaaataagaatcgaatatgatcggacacgaatacggaaacaaatttttctcggaacacgaaaaccaattcaacttctaatagaaacaaatatcaacatatataattagctcattttatataaaatgtagtataatttataaatatttttaaaattttaaataatattaataatctggactagtgttaagagatgaactactattaaaatataaaaaggtatactgaaggtcatagagttataaagaaatggggtatgtcttatggcttctgcggatatccgaataacactgtttaccggatatcgttattattatccgtatccaacggaaaccctgataccatattcatattcgtattcgagagaaaatatccgtatccgaactatccgatccgaaaggtatccgcattcgtttttattcggagcggacggaaactatccgctccgttttcatccctacatataatacgagctagttgtacacgtgttctctacgcattaaattaagacagaatctttatgaacggtctactattcaacgtactattcaacgctacaaaccggacgtcaaaaaacatgccaggaaaaaaattgcaccattcaaacggaaccttgaagtcgtgtcaacttgttggagatgagaaaatccaaccgatgtgtattcttgttttttgttttttattggtgtgtgtatatatatatatatatatatatatggccgggatcagtaacaactgaacttattttaagaaagacagatgtaagcagctgcataaatccggtcatgtcagaaagacagcttggaagagtgcggaaaattaaggctgtgtttagttggatccaaagtttggattttggttggaattgaaaataatgtgactgaaaaattgcgtgtatatgacaggttgatgtgatggaaaaaactgaagttttgatataaactttggatctaaacacagcctaagtgagtcgaagtattgtactgtacatgctactcagtcgaagaattaagtgagcttggactagttgtgcgaccgtgtgttctctacgcatgcgcaccacaacaaattcaaattaaacgtcaaaacacatggttgcacaaaaactgcaacctgtagtttgttcaacggaaaccagtaagtcaatgtcaatgaactgatcattctatcgcgcataagttcaattcagtcagtttatcaacgacagcaaaagaaaagggggaagataaatacttcatttttgaagaccgaatatgcgacgaaacactgatagaaaacaccacaaacataacggttttataggtgttgctatgcataaaaccggcatttacaaggcgttttcgtctaccggacgatttcggtggattaataacaaaacggttaaggattaatgagtttatctaaaatgtgtgcagataattagttttaaaaataaggtatttaggtgttcttggagacccctataaacataatgcaatgcgcgctatagattgcaagcgggccgtaactagtcgcttattttcacatggagctcattaaggcctagtttagttcccaaattttcttccaaaaacgtcacatcgaatctttctacatatagatgtagcattaaatataaataaacacaaaaactaattgcacagtttacatggacatcgtaagaaaaatcttttaagcctaattagtccataattagccataagtgctacagtgacccatatgtgctaatgacagcttaattaggctcaaaagagattcatctcgcagtttctaggcgagtcatgaaattagttttttcattcgtgtccgaaaataccttccgacatccggtcaaacatccgatgtgacacccaaaattttcttttcgcgaactaaacacactctaagatacttgcatgcaaaaatataatttcgtaaacacaccacttaagagcctgcatgcaaaaatgaccatattttcccgtgcggtcctattaagtggccacatgccaaaatagattttcgcatatggacctcttaagtggtccgcatgcaaaaatgcccctcatcttctacatagatattttctctcctcctctttcttttccctctcaacactttaaattttttccacttgacctctcccctcactctcattttctccactccctctgtttctattcctctcctctcctctctctctctctcatcgagcaggagcgggcagcacggccaatgagaaggcgccaggagcgggcggtgccaccgcgcatagctcagtgggcacggactccggcggcagccgcaggcgagggccacagcgagggcaggcgtgggcgacgacggtggcccttcctcgcccagatccagcagcggcggccttccccagctacgatctgtcggcggcggcaattcccatcccaatctgctagcgactgccctcccccgcccgaacccaccagccaccgccctcccccgcccctatgtgctggtgacagccctcccccaccccgatctatcggccaccaccctcccccacccggatccgccggcaagaagagaggaggattacaacgagggtggcgacgatgagaggaggacgacatcgacggcggcagcgataggaggatgaggacaatggcggtggcagctggaggacgatgacaactggaggatgaggacaacgacggcggtgactggaggacgagtacggcggcgggccgatagcggggtattttccgatttttggaatttttatttttcttgcgatttttccttttcgcgtgcggtcgggttaagcgccttgcgctggccttttcttccaagcggcccgcccatccgcat

SEQ ID NO: 26736 - DNA, 28633 bp, Oryza sativa
ataaaagcgagagggagagggattccttaatggataagaataaccgatgacacggcattgtttcgatcgctcccaggtttggttccatgcactggcgcggcatgattgcctagatgatagggttccaggagagggttcattagctggggagggaacaccctaatatccagcggtctcggttatgtgcgacggcatggcgacacgatggtgactcgattggcggcgatgtgcagtggtagcggccttgataggggaggcgcagggctatgccctagggtgacgcgcggtcgtcgtggcgaccgttatccctcaatcccgaaggcgacgcgcgaggggacgggatgacgcgggctctcgtggcggcgcagctttggcgcgggtcttcggcgcctcggtcggcggcgggcccacgcggcgtggcgtgacgcggtgcggcgcacgggcacgaccagtgcggcgcacgagtcggaaaggcagccgcgcggcacggcagtgattggagagggcggcgtcgggtgttcggtcgggttaggcacagatcgaacacctagcgcgtaatgaacagtagcaacccgggaaaaatcacaattagggcttttcctagactttttgtgtgaataagttttagatgttttaatctccttatttcttttagatacttacctatatttcaacacttccaatcttgtgatttattgcaccatatattaataattattttttctaattccaacatatgtttctattttccccatatttaaggttttagtatttgtcttgtcataccaatatatttgtcttctcacattatttaatttaaacaatacattttgcaacagagaaacgaataacaccagcatgatgcaaaagtttttaaaagttcgaaattttagtgatttttattgtcaggaattttcaggatgttacaagaacagagtatgcatcggctgcgaaggcatcggctggagtctgcataggctgagaaggatcggacagaggacagctgacacagctgatagaggtggtgcagccgattgcgatgaagatggtttcagggctgtttcagggattgatcaaagtgcttcacggggattgccacgatggagataaagctctcagataggcaattgtatttattaattaggatatttcatgtaaattccttagagatatgtttgggcaaaagtctgccacgaagacttatggtatcgtagagtttgttagagataagtgtcgtgtccggcaaggacgtatcttgtatctcgggtataaatagagcccgaacccatgtaatcaattaacaacagtttaatacaatctcggcgcatcgccacccttttactttcattttgtttcgacgagttcttgctttcgggttgagctgcatcgattcgatcttcaactagaggtaaaacttgttatggcggcttgcgttctcgggattaatgcttccatctttatgacactttaatactgtttatgtaattcgtcgagttatcatatgcatgttgcaatctctgttagttgcgctatataacttgttatcggctgattcttattgttaggaagtgaccgatagagttatgttttgttattaatttagattgtatcgtgtatctaccatctcttataggttttcatcatcttgcctagatcttatacttgtctttatgcttaatgctgcatcggttgagttcgatctattaagtaatatctataattatgatatctggcttgttttatgatcatcgagagagatagtatcggggtttcagccgatcttacctgatttagctttatatcttatatgcttaattgatatgctagatctgccctttatattaagatcttatcgcaataaagtatattaggcttctgtttgatatattctatctgttttaatatcttaatatagagtggtatcggagtattagccgatacatgctagatctatttgatcggctatgctatatgcgtttataatcttcatgttaatatatactttgatctaagtgatttatattgtctcggcatggcgaccgatctatcccaatcacttgatttaaatatatatcgacagaaagattatatatcgttaatatctatagctgatcgagtagatttagtcttatcttgcttatttataactgccgatcgattcacatatgacatcggctcgaaaataaatgatatgtcatcaacgactggccgatcggctatcgtttatggatttaactgcggtttttctcatctttgtttcttgttgattgcaggatcaaatcaactggcaggctcacgaacctaaaagtaagattttggacccgcactgaagttaagcagatcttccaggctagtgtgtttttcgcatcaatagaactcaaatttgaaaagtttcatctgaagattttatgaaaatttcacctgatatttgaaatctttcaaaagtcaaaatttaaaaactttcaactcgtgtttgaaatctttcaaagtgaatgttagaaactttcaactcaagattttttggaactttcgactgagattttaatattgtcaagtccaaatctaaatactttcaacttgtaaaatataaaactttcaactaacgatttgaaactatgaattccaatttgaaaactttcatagaaatatttttttgaaaatttcaaaacatacaaattgattttgaaaactttcaactcgtatttgaaaacttttaaagttaatatgtgaaacttgaaactcaagattctttttttgaaaagtttgaagttaaatttgaaaagtttcaaaagtcaaaatttgaaaactttcaactcgggtttgaaaactttcaaagtgaatatttgaaactttcaactgaagattttttgaaactttcaactgagatttgaaaattgtcaagtccaattctaaaacactttcaacttgtgaatagaaaactttcaactaatgatttgaaacaataaactaaaatgtgaaaacttttcatcggaacattttttgaaaatttcaactgatatttaaaaactgttaactcaaattagaaaactttcatctcggatttgaaaactttcaaaagtcaatatgtgaaatttgcaactcaagattatttatttcaaaaatttgaacttagatttgaaaactttcaacttgggattgaaatctttcaaatttaatgtttgaaactttcaactcaagattttttgaagtttcaacatatatgtgaaaattgtcaagcccaaatctaaaatactttcaactcggaaaatataaaactttcaactaatgatttgaaactatgaactcaaaaatctttcatctgaagatttttttgaaaatttcaactgatatttgaatactttcaaagttaatatgtgaaacttgaaacttaagatttttttttgaaaaatttgaaatgagatttgaaaactttcgaaagtcaaaatttaaaatttttctacatgggtttgaaatctttcaaagtgaatgtttgaaactttcaactcaagattttttgaaactttgactgagattttaatattgtcaagtccaaatctaaatactttcaacttggaaaatagaaaactttaaactaatgatttgaaactatgaactcaaatttgaaaactttcattgaaagattttttgaaaatttcaattgatattttaaaactttcaactcgaatgtaaaaactttcaagttggatttgaaaactatcaaagtctatatgtgaaacttgcaactcaagattttttttttcaagaatttgaactcagttttgaaaactttcaaatgtaaacaaattaaaaacttttgaatcaagattttttttgaaacttccggcatagattttaaaattgtcaagtccaaatctaaaatactttcgactcgaaaaatagaaaactttcaacaaatgatttaaaacaacgcgcacgagttaagatgttgtgtgaataatgcacacaagatattatctactcaagctgcttccctcggatccaaaaaaatcggtgaaaatagggggtgggtggttggttatggtggtggaggcctggaggtgtgcaattggctccacagatatatttgaagatgatttctcaatgagtaaaacttttactacgcctgttacgcaagaaaaaaagttccgggagggagggggtggggcgggggagggtgtcacaccctgaaaatcgctaaattataaatcgttgtgaaaaaggaatttttagaaattatttaatgattaaagtaagtgtgtgaataaaatctatgaaaaatttgaacataaacttgagctagataaaattttattaaatactttgtgtgcccaagtattttcaggatttttcttggatttatttgagcaatggaagtatttttaataaatgaaacatcatttcagtaattatttaaattaaaaagttaattaaattccctctcttgtcttgggctgaatccgacccactcctttctctcccctctcgaccgaagtctactttagctccctcctctttctttctcactgacgcatggggcccactcggctacagtgccgccatcttcctccggccgcctccatcccgagccgtgcgtgtgcagcgccgctcccgcaccgaatccgccgctgcattgctcccgttccaaaattagttgcgggaacatattcccctcgatctcctctatcttatcacaagaaacccccttgaatcccgttgtaaattgcgtggattcgacgcgctttcgagctccgttttttcgtcgaacccaaactaatccgtcgccgattccatccgtttccgagccgatctctccctcttccagctataaatagcagcccctcggcatcctcttccgttttcccctttttcccgaagttttccctaaccctagccgcctccccgcgagctccccctctctctccacagccgccaccatctccagccgcacctccttgtcgaccccgtggtcgccggacctcgctgcagtctctgccggcatcgcagcaccaagccgaagcccgttcaccccttcgccgccactgcaaatcactagggctacgtgtcgctgtcaacccgaggcaatcttccgtcgctgctgtcgacgggggatacccatagaccggatatagagggtattggggtacgctggtatgaggatctacgtaatacgacatcaagcaaatagaagataaggattatactggttcaggccccttgataggtaatagccctaatccagttggtatgggattatatggtagaaaccacagattacaaagggaatagcagaactcgatgataccgacgagaccgtagtcgagttggttcgactagatcacccggcaacttggctcctgttggcttcgatttcgtaggctgtggtggttgtattggcggtgagattcgatgccttaggccctcccggggggtcccttttataccgcgggtcagttgatctccaagtagaacttggagatatcggaccccacgcgatacagtaacgacccagttctgtccgagtaggactccttccatccgtggactctgtttctgttacgtgatggatttccttaacgtgtacgcaacatccgtatacgcgcaggtataccgtatcaatatacaacatacatccaagggtagagggtatacctctgtaaccctgaaagtagcccccgacttctgcttaaatgaactcatgtgaccgatcgcgacttctgatctcggaatcattatcgctctcaactggtcgatcttggtatgagaaccgtagagacgtagagttatcgataacattgcatgaagttcaacggtcatgagtgaatttaaattgaagtccaaaaactgctgcgggtaacggacccagaaacttctggcggccatctctctcctttccttggaattcgcaccatcggtagtgcgcttatttacgggagttttggggatccattttgaagtccgtttgctgcaaaactttccggccttcaaacgcccctcgtcttctccgcttccgtagaaaagccctagctttcccatcttgtcctgttctccggcgatcttccggcagtgatggacctcgacaaatccacatccaccaatgcgtccctgaagaagctgcaggacgacggtgccctccctggtcgtgggaccatgcagagggaaacaggaggtactgaccccaaacctgtcctaggccacatggttgcggttgaggattacattctttgcggttttcttcctccgccttctgagtttcttcttcttgtcttgaatttctacggcctttccttgcttcatctgaaccccaattctatcgcatttcttagcattttttcctatctttgtgggccctacattggggtagagccatttcttgatctcttttacttctactatgagttgcgctggatggaacctaaaaaggtatctggatgtgtcggtttctaacttcaggatggcctgaagtcgtgatacatccccttccagtgcccttcttctcgtagaaaatggcgagcgatgtggttctatcttcagatagaaaattcggatccagtctttgttgtccatgaggaacaaccagacaagattccggaatggaccgccaaacccgccctaactccctcccttaagtctttcatcgatatcatcgatgacctccgagtacgagagttgtcggggtatgaagttgctgtcaacttcatcggtaggcagatccagccgctccaggctcgagcccacccagcctttgactattctgggccggaggacgcgacccgggtttcttctcggggtatttttcttgtatttcagatttcattttttatgtgcatgttcctgctgacttatcgagttctggttctcgatcctacaggtttgaacagcaaaaccgtggagcgccgcgtcagtcagcggccctacgacggtgagcaacgtccccgttcccctttgcaagaaggggacgaccgagtgcgaagctgcaatcaacatgagtgtactcgatggctcctttacttcttctttccttggatcgcattgtgccttcatgtacgcaagctctccctctgatagacgtcatcgggccgctcgcggatcacaaggcggaggcgtcgttaaaggagggcgttgccaaggaggcgtccgatattgctgttgctgctgccacgatgaatggcaacaacgttccgaagaaagggaggaagttctcctctgtacttggaaactgttggaaagtgcctactccgtcggtaagcctctcttgtttcttaatcatgtagtcagaatactttgacctcatatcgtgctatcttgttcaggcctcggatgcgtctcccccgcctctgcgaaggcaaaggctggtgacgcttggcgagaagtaggtagacgttttagaagtcatcctattcgcaaactcttgcttgcctgtcttcatgaaattgcagaaatccttcgcagggcggcgtgggtgaaggcggcgcaagacgggtccggtgcgacctccagcgtgtctcctgtggcggcctcgacggatgtcgtggtcacaactagggaccgggaggcgacgccgagtggacccgctggcggtcttgtgcccgctcggggcccgcccattgatgccctcacctagggggagctccaagctgagatggagcgcatcctctaggctggtgctcgcggcgtgggctacgagatcgaggaagccagggcggtgacgttgtcggcaacccaacgcgccagcaactggcgcgcgatctgtcggagacccgcgaggacctcctcaagatgagggagttggtggccggcaacgaaaggcagcggcaggggctcgaacaccggatgtcggagctcgagaacaacctgtcagagatccgtggcttgctgcgggtgtcttacaccggcctacaccaactcgccggggagtgcggcgtcacgaccaccatcccggcaacccccaacgagttctcgctgacgtcctcgctcgcggagctcgctgcggcgatggaggagatcccctccaagcatgcggccaggatcggcaaggagacgtcaaataggatttacaccggggcgtgccacgtcctcgcttgcgtgaagctggcataccctgaactcgacctctagaggattctggatcagggggccgccaatgacgcgcgcaagggcgtgatgaaagaagtcggtgacttgggggagtccattctccccctttttgaagagtagggttgtatttcccttgtactccttaatcaattatgcttgtaaaactttcgtcggttcaaactgcctttgtgtatgcagttgtttccttcgttttctttagcatgttgattccgagtactttgctgtcattgtagagatgttgatatcgaggatgtccagcagcgtgggcagcctgagtcgccggtagtcgttccggcacttgcgcttgagccgtacgtgccgcgggacgatgtcgatcaaagcctgtctgtgaaggcggacgtggcgacgacttccttaggttggtactttggttttcatctcctttattcttttgttcggatcgacttaatttgctgtgttctcgaaagaggagaacgacctgacttagtcatttccgtattgagcagacctcgagagtacgttggccgaccgagatcgtcgaatccaatattggaggacgaagttcgaggtggccgaactcgagaggactatggtggaagtgaagaaggaccaagccgtggaagcactccgaggtcgcgaggtgtggttcaactcgtacctcaggagttgttatacagcgatggctggagtctgtagagagctccaagtaccccgcgggaatctcgaggagtcagcggctgggtatatctcgtggttgaacggggcctgcactctgcttgaaggcatcgggaagcgtatcgacgaggccttgaaacaggagtgtcgtcggtcgagccgatatgtcggagggcatgtgctggcctgtatccgagatcaccgcccacagctgcacctcgagttcctccacgaagggtttgcacgttctcggagggctccacgtgtactctcctgattacttcctgatgacggttgaagggtagttaggacatttaccatggccataaccgtcatatggtagctataaaaggaggactccatcacacttcgaaacacacaactttgagctgaattataagaggctctattgtatcttttgtacattagaaaataggtagagagtgaggagaagctctggaggagtgcccggaagtttggcactctctctgacttcttcctcggcgagtgtagctttctaggaggaatttgggaggagtactagagctgccggtacactctgctccgggttcggagaaacttcttctattaagttagcattcgggatactttgttatgttatttaattatttagtataagtaagtgtcacgccctgaagtttagccatgctctaatatgctaacatgatttttagtggaattttcagagccttttaaataatttttaaccaattaaaatcaattatatgcaatataagtccctggaaaatcccccctttttttctttttcccttctttttctttctttttctccctctccctacctcatgggtcgccggcccatctctcctgcaccctcccgaagtcaaccctacctccccctttctctctcgggcgctgacggatggggcccgcctgcagccccttccccttcctccaaccagcggcaaccgccatcccaatcgccgccgcgtgccgcccgcgcccactctgtgcccatgtcaccacccacgcccccggttcccgcccatacacccgcgcccgcaagggcgagtttcgatttgaatccccctctctccccctccccacgtcaccggtgcaattggccgcccaccggccacgtccgtctctcccaagcacctataaagctcccccgtactctcctccactgttttcctttttttcaccgccctctcctgtgcccccaccgctcccacgccgatctcccctagcgccgccgcctaccgcccaactccagccgccgctagggccgccgccgccgttagcttcgcctgttgaatagtccccattggttgtggaagggcaaaggacctaacatataagtgggggagcccctcacctcaatggctagcttttggggtgggaaaggccctttacgatcctaaaattggtatcagagcctggctagtttaacatctctggcccgatggacagtgcgtgaaggcttgatggaccgtgggtgcttgcggggcccatatacctgagggaccatggtgaaatggtgaaggggcggtgaagggctgagggacaccaatatgtgaagtgggagattgttgaatagtcccacattggttgtggaagggcaaaggacctaagatataagtggtggagcccctcacctcaatggctagcttttgggggtgggaaaggccctttacgatcctacatcgctgtcgtgagagctacctcggccgccgcctcccatcgtcgaaatcccaccggaaatcatccttcctcgcacgccggtgagcccctccatttccccccctttggctggcattgccgctcaccgtggacctcctctctccctctaaatcctctcatttgcttccctaggtcacttcggacgtcgtccacctgctcgtctcgccgtccgccgcttgccaccgtcattcgccgtcgcaccttcccgcgccggccagccccacggtgagaactccctctccttcctccttccctctctcccgtatgcgccaccgctttccgcacgcttgccatcaccctcggccgacgccgccgtcctatgcgccgtctgccgctgctggtcgccgccatcggaggccgcgcgcgccgccgcccacgccatagccggccggccgtcttgaaaccgagtcgtccgataggccttggggccgatccgggctgttggtcccgtggaccggtggtggaccacccacatggtcctggtccacggtggaccgactgtcccttgagccgctgacatgtggggcccgcatgccagtccccccttgatgacgtcatcacctgggatatattgcgcaataaataattaaggctttttcttttttatagtaaaaacagagataatcttctaaaaatcataactaattcatccgagctccgtttaagtcaattcaagtctcagtaaatttataaaaatccctagaatccattgaaaatggttttgcttcatgtttcagtagacttatagcatgttttgcttgggtgtttgtttgtcgcgtagttttcggttgtttcgtcactctgtggtgcgtcgaagtcgttgcagagatctcatcagtgcgagagtagggcaagtcattcttgttaattgaccatattgctcccatattgcaaatgctctactttgctctaaatactgcattgttttacaatgtcacggtatgggctttttacctactgttctcagccttattatttgtatgccattttgctttgttaacttgggatgtaacatgcctagatgttggattagaattgctgagccctgcttagttcaactagtacacaaaaggggaaaacacattaaagcctagacattggttattagcatagctttggattggtgccaccgcaatggtgctagttaattaaaatacactaaatggtgggctgtgggtgcatacttttgctagtcgtgccatggcaattaaagaccggttcgcgggaaaccctggaagaacttatcgtacttaccacaagccagcgtgggcaacggctaggcttgtagtatagctttcctctagccgacgtacccaggctagggtgggtgtgatggagttgggtcggtcggggttttcggttgatcggctgccgaattcaccgtggcacgaggggggagggggctacccgttgcctgctggggacggggcgaaacctgaggtgtggttcaattagttagagggggttatgtgaagggtcctgtcacggactctttctgttatgtcatggtggcatgtcgacgcacggaaacgtgttgtcacatcttgattttcgtttcaggatttataaattatttaataaataattattagaatttatattaaatgttcattaatttacaagtgaagttaaatgtgggaaataaaatttcctcaatataaggcatggttggatttaatttttattaaattctccatgattaattatactctctggaattttctcggatttttctgagctcaattactaattttgataatacaaagaacatttcagttattattcacatatttagttaatcattaaatggtctgcttataattttgttaaatacttatagtgttcatgtaatttcatgatttttcttgaaattattagagcattggaagtatttttaacaatttaaatatcatttcagtgattaatttaattggaaaagtaataattcaataataagctaaaattttttttcatcggattatattcatgtgtggtcttgttttaaagatttaattgcaacgaatttagtagtgcaatcggatcgtgaattggataagtaatttgagagaaaatgtagtttaaagtttatttaaaaaacttgacacatgcatggctgcatgttctgtgaatgcatttcatcgattatattcatgtgtggtcttgttttaaagatttaattgcaacgaatttagtggtgcaatcggatcgttaattagataagtaatttgagagaaaaagtagtttaaagtttatttaaaatagtggacacatgcatggctgcatgttctgtgtatgcagtgagtacaaataatatttctgtgcatgcctgtagtagttttgggacctgtgatttttttctcccacatcggatggctcccgatttttttctttcggatcaggccctcccggtttttcgcctccaaatccggcctcctctctcctgtattgcgaaaattagttgagggaaaatattcccattatcctcctctatcttttctcccaaaaatccgactttatccctttcaattcgatgcgaatctggattcgttttcgagtttatctctcctgcaaaccctaggttttcctggcgcaattccttgtgttccaagcccgatctctccctcccgtggctataaatagaaccccaagacctcctcttttctttccaacccctagcacgagctcccgtgccctagccgcctctcccgcgagcgccttctctctccgtcgccgctagccgctccagccgctccagccgctccatccatcgccgctgctgccattgggttcgcaagaaggagaagaccagcctctacttccccgaagcctaaatccaccggagctccatcgtcaccatcaacccgaagttcaccgtcgcgttttgatctccggcgaggccctgctgcacctcccgtcgtcgccttcggtcgccgccacctcctttggattcgcagctgcgaggagaaccccgtccacccctccgttgccgccgaaacccgctggagaaccgccgacaccatcgacccgaatactaccaccacctcgaccttgccgccggccgttttccgtcgtcgtcctccgtagcgtcggccctcggtgagttcgtctcgccatcctcttcacgtagatgccctcggtttgcaccgacgtgccctagatcgccagcggtggtgtggtccagtgctatgctcagtggtgatgtcatcatgacatcattaatcctttatttaaatcgtaattcctttttttataaggctaaaatcagtttaatcttgtaaaattcataactaattcatatgaggccgttaaagtttataaattcatctaaaatcatgatctacatgtttgtttactttttatgtactgtttatttggagtttcttagtctttttccccgttttgtgtgatagcttgtcgtttctgtcgttgcgaaggttcgcgagtgcgtcggaagtggttctgaagactaattaaagaccgattattgcaaggcaagtcacatagatctcagacacaatcctttgaacatgttggtcctatatttaaattctctatttatttcaactgtgcatttattttcgaatgtcatcgagtggtgtgaacctattcctttgttatggccactttgcattgattactctattccttgataccttgggttattataatttgactagttgagatttatatattggttcagctagatgttagacataattgcttagccatgcttagaaacattagcacatgattgggataactaatgttacactaccacgtatgattatatttaatggtagctctcgatggtcaatcgtgatgaggacataactagctcggatataaccatgactaccttatgtattaatcaaataaaggtgcatatgttctacattagatttacttgttatatatttgaacaaacgttgctacacaatgagttttgtgtgttttcgtttgtagaggtacttgcttgggcgaaggaaaagagatcgagcataactaatgcatggatgattaaagaagttgattggggaccaaaccaagaccttctccaagtcttcttttatctcaccacgtcacttttagtccatagaagacaatagataaagttctacacgttttggattcggatttgggcctcctgacaacatcaatttcaaacggacctagctgctgatctagaaggaatttcggggcccataagtacttgttggaaagctcatggagtctattttaagatggttttggtcccacatcaaaattcctaccgagctgccaggaatctgcaaaacaagccacatacctcatctagtccgaatctgatttgagttttgggccttgtaattgtgtcgtaggcttagcccaatggggtgtgggccctagggcaactctaggacgaacctaatcatattaattcagtagctgtcatcatttagagttgcgttttgcttagattattctgtcgagaacagtttcgccgctagatcggtttgtaagaccccaactcgtgagcttaatcattcatctgtaattttggttgttttctatctcgttcttgtttgtgttcttcgattggcaaacagggattagccttctcggcgaggtcatccgtgttttgacacgggtgataatcagaagagacgtggtgctacgattgcggggctcaagagtgtgcgcgttcaagaagccggatctatttgtgtcgtgactccacccaaatcgttgtttatcagaaccttttggaagatcgggaactctagtgcgcatcaaatcatgattgattaattaattacttgccaactaaaacttgataatggtgggttgtgagcacatggttttgaaggtcgtgcttatgtcaattaatgaccggttcacgagctactgttgtgagacatttaccgtactaacaacaagccagaatgggcaacggctggacacatggtatagcaaggcttgttgtggtgcgccagactgagaagcagcgagaagtccgtgggggtcgctggggagtccatgcctctggttttttttgagggggtgattattatccaggaaaggtgcgctgctttgagttgagctatgcgaggggtcttgtcataactacacaaatggtgacatgttcagcatgggcacatggtaatatggtgacatattgtggagttgagtcttatgggtaaatttgtacacctcttgtcgcgcccggaaaaataccttttccagaatgctagtgtattaatcctcatcccaggaaaagccggggtacaccacacaaacatgatataaaagacacatctttattatatcgataatatttacattattacaaaggcacttcaggcctgacaatcaacaataaacagcagtggactagcggttctacggttccatcttcacaagtgctcaactggggtataagccaggactccacctaggacttcttctccaaatcttctcttactgaagggggggaaagatagagcaagaatgagtacaaccaccgtactcagcaagccacaccgggagatgcatgattaatgcaagggggtacaaggggtaataataggggttatgttttgcagtaaacagcatttaaaagacacttagttgctcaaagctattttgtaaacacgatcctagagctacacaatattattaatcaaggctgtgaacccacacgaacctgccttaaccaaaggcctacgatgattcagaccaaactagtaacccgacctgggtcccagctcgtcccatgtcaacccaagccaaccattccacattttagttgttaagcaagttttaagaattaaaccactaacttgggaacattgctaggcttgcccataaccgagagcgcggctattcgaatagatttactctgatcagaggtgtgcatctttacccaaagacacatctttactccgcattccatggccttggaacctgtcgtaaacatgtgacataacccttcacccatcctagccgtgaacaaaagtaccgacccaaccctgcctacggccagtatcccggacaggcagggccaggattgagcccctagcaacaggacctagaccgggtgcgccacacacataggggtgagaccacccgcgtactaatccagtgccatgacatctcgactaacggacatagagctgaaggttgaaccgagctttagattccaactgtttaggttaacttcttgacttccttgtcctcatagaagtacttctacctgtggtcatcttgcttactcgcaaattcttctaccttaatgacagggtgactgttgtagggtcgattgctatcgggagtcttcctcgagtgacacaaatcatgtttctcgttatcctttatcaatcacctttcgacctacttcttttcccagtaaccaaacatattttccgatctcttccatcaatcaccttttgacctttctcaaccaggtactcttcgctccgggtgttgtgggtgcttctggggcaatgaggtccttgggccctgctgcctttcggagaaaccttgaagtagttcgtcaaaagctatactgactgtcgttgcctttgatcagaaaaagacacatatgaaactcttagtccaaacaaatatctctttggttgatcacttgattttcttttctatctacaactaggttatttgattcataatagagtaggagctcacggaaatgagaccctaggtctccttaatcatcaacaaaacgtacataactcacagcacttgcaatcttaacatggatccttcataaacatgccaaactcattcattatttcatgtttctctcttattacatggttgacggggaatagctataaaacaaaagttcttgaacaccgatacaagagtattatggttgctactgactagcactaggcttaacaggtactgcatttgctccagtgaccctgatattgtggtcatgtcttcttcgtgcataacgaccggaatgatggcgcgggttacgctttggttgtggacaatttctggagtaatgtctttcttcactgcagttgtaacaaacaataactttcttacgcccaagttcttcatcaagtacttaatttctcggctgctgtactggaacatccaaaggtacaacgcagatattggcctctgtcttgtcaactggtggctggggctgaaattaagcattgacacctttgtggtagtgcactcagttgttgcaactcaggctatacgactgcttcgggatgcatggatgacaattcgctaaggaacaagcttctgattgtggggagttgcatggactgacatgctggcagctatgtttctcagtttcgggcacctggcggcgaaatgacccaatttcttgacaatttaagcaactgatatcttgccgaactcgggatttgcttttcccattttgattcctctgtcctactctggagttaggctgaaaactgtattcttgtcgaggatttacgtggtcttgatgcttctctttgttggaactggcggggtggttggccatcttcttcgtcagcagaaaactgaattgacaatcttttggtacatgatcagttccttcacacaagaaacaagtgatcctgctcattggacactcgccgggtggatggtctttctcacaatgaaggcaggtagtgacacatgagctagcaacatgaccgatttctccacaacgagagcatgccttatgttccattttattctgcttgaaaccttagggagacttctcatcttcatcccctgaggagacttgatctgaatcttcactatcagacactctacctccattagctaaaagatgttgggtcaactgtggtgcaccacgaaagaaatttcctatctgacgttttgtcattcctggtggaggccattctgtgccggtaatggtcatcttacggacttcatcatcggttcgcattggtgcttttcttttctgctgaggacagttccttgcatagtgcccttgttcatcgtagataagacaaatgattatagcttcttttgagtccacatgtggcatggcacaatgggcctgttgggatgctagtggcacgttgtctggcgatgtgggtgcttgatctgcctcaaattgcacttgaggttgcatctgactcgggttcagaattggcgtctgatgatgttgtaatagatctatgagcaatttgttctggttaattaggtgttggaccactaccacacaactggtgtctggtgctttattcacttgggagcatgaggcacccttgtcctgatttctgaccttactgcctttttcattgtcagccatctgttaccaggtttggagagggagagagggaaaacaaaaggggagggacagatcagaaactaaggatagcaccttaacagatctaatctttttctgttatgatgtatgttaggtttattctacaagttgattaagcaaacaacctagcatggttacatcacaccccactgatgcaaaccacgcgctacgcacacaagcaaggaagcacacgactatgactctaccctagagggtggcttaggttctgtgacgggttctccaagatcttcactcctgcttcacagctggcttcacagcttcctttgcttcgctagcggacccaacagtcttccggagctttggcagacaattgacggcatcttcttcttcgcaaagatgaccatctagtactagttgaaattcgaagaaggaagaagggagtaaaccttttgcaaatagcattagggaatggagaaaaaaggaactttcacaaatagtttcatgtataaaatatgtccttaggttttatccacttggcttaacctacagtcgagatggctctgataccagcttgtcgcgcctggaaaaataccttttccagaacgctagtgtattaatccccgtcccaggaaaagccggggtacagcacacaaacatgatataaaagacacatctttattatatcgataatatttacattattacaaaggcacttcagacctgacaataaaaaataaacagcagcggactagcagggactagcgggcctatggttccatcttcacaggcgctcaactgggatataagccaggactccacctaggacttcttctccaaagcttctcttactgaaggggggaaagatagagcaagaatgagtacaaccaccgtactcagcaagccacaccgggagatgcatgattaatgcaagggggtacaaggggtaataataggggttaagttttgcaataaacaacatttaaaagacacttagttgctcaaagctattttgtaaacacgatcctagagctacacaatattattaatcaaggccgtgaacccacacgaacctgccttaaccaaaggcctacgatgattcagaccaaactggtaacccgacctgggtcccagctcgtcccaagccaaccaaggccaaccattccacattttagttgttaagcaagttttaagaattaaacgactaacttgggtacattgctaggcttacccataaccgagggcgcggctattcgaatagatttactctgatcagaggtgtacatcattacccacaagacacatctttactccgcattccatggccttggaacccgtcgtaaacatgtgacataacccttcacctgtcacaccctgaagtttcccctttttcttgctttaaaaattggttaaataaattgcccgaagaaattatcttaattaacctagagctaaatccctagttaataaatgcaattaataatcggaaatagcgtggtggaatttttcttgagttccccatgctccaatgcattaacaagatttttagtggaattttcagagccttggaaataattttaaccaattaaaaatcaccaaaatgcaattttaaatcccaggaaaaatcctttcttctttttctttttcttttccttcttttttctctattgggccgttggcccactctctccacgcgctcggcctccttcctttgggccggcccgttcccctttcccctctctccgggacgctgacaggtggggcccacctgtcaggtcgtccccttcctccagccgcccgccccacgacggcaaccgccgccaaaaccgtccgcgccgctgccttctccgctccacgccgcgcccccactccgcgtccccacgtcgccgccctccccgccattcccgcccgcacgcgcgcccgcaaatgggcgggattcgatttgaatcccccccactttctctctcttcccccacgtcgccggccaaatcggggcgtttcccggccatgtccgcccctctcaagcccctataaagcttccccgcatctcgctctcccttttccccttttcgccgcgctctcccgtgcctcctaccggtcgcgcgccgctcgccactagcgccgttgcttgccgccacctccggtcacgcgccgcagccgctagagccgccgccgcgccaagccgccgccgccattagcattgccgccgcgtgagccaggccgccgctcggtttccgctaaaccccaccggagcccggttctcctcgcacgccggtgagctatccattctccttcgtctccggccaacaatggtggccaccgtggtcactctctctactcctaatccttctcaactccctcctccgtaggtgccgccgccacccgtccgcccctcctcatcgccaggtcatcgccgccaccttcatcctccgctccggccgccatactcgccggtgaggatcctcccctcctccctcttcccctctctctcgtttgcgccgcctctctccacgcgctcgccgtcgccttcggtcgacgccgccgtcctgtaccccgtccgctgtcgcttcccacgccgccgattgctgtcgccggcgaccgtgcgcgtcgccgccggttgccatggccggccggtcggttttgaagccgagccgagccgtgcctagccgccgccgtgccgtccgatcggcctcccggccgatctggaccgtcggtcccgtggaccggcggtggaccacccgcgtggtcccggtccacggtagaccggccaccttgagccactgcccatgggccccacctgtcggcgccccccttggatgacgtcagcctaggtattattgcgcaataattaattaaggactttttctttattaaagaattcataagtaattcatccgagctccgtttaagtccattcaagtctcagtaaatcaagaaaaatgcaaagaatccattaaaaatggttttgtttcctgtttcagtagtcttatagcatgttttccttgtgtgctttgtttgtcgcgtaggtttcggccgtttcgtcgatccgcggtttctcgaagacgttgctgaggtctcatcggttcgagagcaaggcaagtcatccaatatgtttgatcatattgtacccaatttataaatatcccgcatttctattaaatgttgcattcttttacaatgtcatgtgggatgggtcctactactcagccatatattgatttccttatgccattgacaacttcggtattaaaatgactagatgttggtttaggaagtgcttagccatgcttagttcaactagtacacaaatgggggtcacattattacatagactttgactatgagcatagctttggattggtgccaccgcgatggtgttagttaattaaaatacactgaatggcgggctgtgagtgcatggttttgctggtcgcacccatggcagttaaggaccggttcacgggaaaccctgggagacttaccgtgcttaccacaagcgggagtgggtaactgcttgatctgaagtatagctcgaccctttcctaggcaccggtggcgagggtgggcgtgatggagttgggtcagccggggtgtccggttgtctagctgccggattcaccgcggcgcaagaggggactgcccactgccttttgaggggtgggggtgaaaccttagcgtggtgtggatggttaggggagggttatgcggagggtcttgtcacgattttcccctttgcagtatcatggtgatacttcggggcatggcgacatgtgtggaatcgtgtcttgtgggtacagttgtacacctctggccagagtaaaactattcgaatagccgtgctcgcggttatgggcgatcaaccagattcaccgtgattagtctcacccctagtttagcttaatgaactgctgtagttcaggtggatggttgggcctgttgcaacgtggtgtagcgttggacagtgattggttaatattgattaattactacagctgttttactgctttcaactactgctttgaaatgcctactttatgcagaagaacccctagcttcctttggttatatcctgcatcatacctcctcttccggtatgacttgctgagtacagtgggtagtactcagtcttgctctcttttcccccacaccagagttgaagttcttctcagttggagccgtctcagaaaggttggtttcgtcgctgccgtcaaggtttgcctgtggagtggagtggcccgctgctgaagtcaagcttcccggtttagctcgctttaatctttcccgctgcatttgtaatcttttatattttttgtaagacgtgggtctgtatgtcaacaattgtcgtttgtgtaccctggcttgtcctggacagggatttaatgcacattcagcttagaaattctggttcgagaatttctgagtgtgacatcacccatcctagccgtgaacaaaagtaccgacccaaccttgcctacggtaggtatcccgaacaggcaggctaggattgagcccctagcaacaggatcttgaccgggtgcgctacacacataggggtgagaccacccgcgtactagtccagtgccatgacatctcgactaacggacaccggcccgtgcagccttcatttgcctagacatctcgattaccgagccgcagctcacgtagccttcatttgcctcagagatatccatcgtcgcaacgaattcatccatctctatccgtgtccttttgttcaggactagaccgagcaccgagttaagccttaccaattagtcatgtggttagtacggtagtgctttgcaacagaggcctgagcttaatccttggccggggttctacttcccacaactggcatgcacccaaaccccaccggaaaacaggttttaggggttttgaaagaggaagagtggggcatgtccaattccaccataagccaaccattccatagtgtccaagtgatatgagaattcccaaagtctaaagttataaaaccacctagtgttgcctaattaatcagcgaagcatctacctaaattcatacaaatggaaccatgaatggagtacccactagttggggttttattttccttgggtgaacaaggtaataataaacaataacaatgataaggctataacaaggattaataggaagtgctaaataaaatagtgataatgcgggaatttaaataaagcggtaatgcaataatttaaatcaaaatagttttatatactaggattcaatatgctcaagggtgatgcgacttgccttgctcagagagaacggccttccgaaccatcggcgacgacagcgaaccacgcttcgggaacctccggaatgacataagctacgcgaagcacacaagcaaagctacaagcctataaagaagcaataacaatacataaaaagaaagcacatggttctttgggttataacaaacattaggagacttgaacgggtcgattcggggttcgtatgaccaagacatggtcatccaaagtttactgctgttacatgaagatttgcggattattataattaggctttgcaactataaaacatgtgtaagcgctagcctggaaaagacaggaaggctgcgcttgtcgacatgcagaccccacatgtcaacccaaaggcccacggtagaccgagtacacagagacggtccacgggtcgacggaagcggaccctgtttgtcaaccaaggtgagtggccgacaaacggactccactagacaccatgcgggctgcacacgtggaaaccacgcgactaccgagcgggcacactaacacggtcaccacatgcacacatgaacgactactgacaccggtacacgggtacctgggtcgacaaccgcacgacgggcacggggcgacaccaaaaggacgagaacggggtagcgagaagagggatccttaccaccacaagacgaggcgcggaacgacgatgacgaacgggcgcggcggagacggctcggggacaacggaggcgaacggtgatggaatgacttcggtggtgatccttggacgaaggcgagacgaggcctgcacaaggcttgacgacacggagccgaggacgaagacgacgaagaggctgcagcacacttgacgaaacgcgatcggcttgacggagggacgaacgccatgacgaccgggaatgacgagagggcgatgatgaccgggccggtggggaggcgacgagggcagccggcagcagctgcacggatgcgaggacggcatggaacacgccgctgcaatgccgacgacggtggcggcgcagcaagatgacgtgccggcgaggaggatcggccgaccggaggaggggatggcgacgtcggatggagacgacgatgacaaacaccggcggggtacgggtggaggggaggcgaggccgagggcgacgttgccgctgcgatgccggaggagacgacgacgtcggccggcacacgggcacggaggaaggagtggccgaaggaaacgtcggtgaggtggaaggagaggctagggtggaggtcgatgccgcggtaccgaaggaggagatggcgacgtcggcaactggaggtggtgcagtggcggcaacaccactggacgtcgacgaggacgcgcctccggcggtcaccgcgcgaaatggagggcaggccgggggagaggaggcggctgcgacgccgagaatggtgacagcacggcctaccggtgcatgggcgaggcggcaaaggcggctggaggtggccggcgacacgggagagagagaggagggctgcggggagaggcggtgcggccacggggtggcacgggaggaggctaaaatgagagaacagaggaagaggatcccattttatagcggaggggagctagccgggcacgggagagggcggaacggcgccgagaatggctgccggcggccatggaaggtggccggggatggcgcggccgttccgggcgattgagggtgccattcaaggtggaaattaggggggattgaagaggaaggaaatgggattaattccccctaatcaatttggaaagaagggaattgattcgcgcagatttgagggaggaaattgatagggtttcatgggagaaggaggagccgggcgggaggaggacgacgaccgggtgggtgggacccaccagtccgcgcggtcagcgcgcgtgcggcgcgcgtgcgcgggagggctgcggctcggcttgggccggggcaggcctaggcgggaggaggagaggagggagtgggacgggaaggagaggagagaagtgcggcccgggagaaagaagggagggggagggagatgggccggggggggggagaggaggcccgagagaggagggaaaatggagggaggagagaaagactttgggatgaactcggcccaaaggcggaaggaggattatttttagttttctttttaataaactttgataaaggttgttgttgcttatagttatttccggtgttctgaaaattcaagtaaaatttgagggctcctttttgaccaaggagaatttaacaaaaattctccgggccacattcgaatttttcttgtttgctttttaaggttgccaatttcttttcgagttttaattaattctattattccttttagagaatgatttttatttcgagatgaatttatcaggacgtgacacctctggccatagtaaaactattcgaatagccgtgcccgcggtaaatggcgggttgagcaatatttttcgtgattagtctcacacctctcacaataattattgatgctataactggtaataatttgcttagctcctggtttggagttagatctgtacagccgggtatgtttgttcaggatggttgggcctaagcagcatgggtgtgctgttcagtgttgattaatattgatgattaattactctactgttttactactcttaaatgtttgcttaatgctagttttccaaatgagcctatattatgccatccttcggtatccttgtgcacttgcatatttgctgtgtggcttgcggagtattccatgtactcaccttgcaataatcaatcaaacctcagttgaagagaagtcgcaaagaagaggacgtttggcttatacccaagttgagcttcctgtgggagtggagccggagcttcgctagaccattaatccactgctgtttttcttttcttttgtaagtatgcaatgttattattttgatggacttgtatattaaattgtcagtttgtgtacctcggctgattcctggacgaggattttatgcacaaataacttcagaaattactagtgaatttctgggcatgacacgacgtgtcgtggggttgtgtcttgtgggtacagttgtacacctctgatcagagtaaaaactatttgaatagttgtggccgcggttatgtgcggtcgaccaaattcaccgtgattagaatcacccctagattagcttaatggaactggttagttcaggtggtggattgggcctatctcaacgtggtgtagcgttgagcagggattggttagtattgattaattattacaattgttttactactttcaactactgcttttaaatgctagctttatgcaaatgacccctagcctcctttggatatattttgcatcataccttcccttcctgtatgacttgctgagtaaagtggatagtactcagtcttgctctctcttccccacaccagagctgaaaatcttcccagttggagctctcccggagaagttgggttcgtcgttgccgtcaaggatgcctgtggagtggagtcgccccactgcaggagtcaggctttcaagattagctcgcctttctcttttccgctgcatttgtaatcttttaatgtttctgtaagacatggatctgtatgtcaacaattatcgtttgtataccctggctggtcctggacaggggttttaatgcacattcagcttagagattctggttcatgaatttctgggtgtgacaagttggtatcaaagccgaccttgattgtaggacaagctaactggaaaccctaagagcccttcgaatccttttcatttgcatatgctctttgcaattggatttgtttcgggaaaatgagggtttgttcttgtggttgatgggaaaaatcttgatcgcttgttcaattgaaatttatgaaaatgagatcagtctagggttttagtaaaattctagtttgaatttatttgacagtcaatcgggatttatcggggtatatgcgttaattcgtgtctagacttgatggggcgcaatctttatgcgcatcattactactatgtagtatctattttgggcattaatttattgcttagttagtgtcatttcatgtacaatgctctatgcataaaaaaaatagtgcttggctagatacttgagttatttgttgttttgtttaatttggatttgagcgtgcattagttcctaccccttgtcttccttagatgtcagacctgttccttgatcacaagtgtcgctccaagcttcagagacaccgcctttagctttattgtcttcttagttgtatgcttggtttctgtgtttaggtttgttgcttgtgggttagtcggcggtcgatatcatgtgtcagtggtatggttgcctgaattaggagttgcttgcctcctttgtagtgttttaattcaagtcagatcaattgcagttaaatttataataaagattagtttctaagccatctgttttcttccttttctcttatttctatctatcccctcaagatgaagtcaaggaatggtcgcagtgtctccaatgacgccagtggcagctgaagagcagatcaatggagcacacgccaacggtgcatctggcagcagttcatcgccaccgttcgagaaccgaacgatcactcaggtgctg

SEQ ID NO: 26737 - DNA, 6673 bp, Oryza sativa
agaagcatgagaagttcatgtcaggtcttgatgatgaattgaccaattagatgatctccagagactctgaggactttgagaagcttgcggacaaggctatccgtcaggaggagcagcacaacaaaatggaccgaataaggaagactagtcagttcagggtttccccggggaacaatcagaagcctcgcttcatgactggacagcaggttcgatcttccaccatgattatctgtcagcaccatccctacatcagcgtcaaccacaacagtagtgggcagcaccaccaccaccaaactcctcacccactaatggctccaattcagtcaggtctgccagctatgtcagctaagttagaacagcctgttgacggtcgttaccgataaatttcgacagtcactataactaaaataatggagaactagctatgcatacaatgtatgtttatttgccaaataatatatttccacttgtacttggagaataacatgtagcaggaatttatgcaaataaaataaagagaaaatggagaaaacctcactcctaagcgagcaaatggataagatgggcccacatgtaatacgagtaactgggaagatggcaagacagaatctgtctcgcaacttttcccaactaccgtttacacatccaacggtagaggtgtaccattgcttcgctctctcttgaagggtgaacggaaataatttccaccatacaatttcttgtctcatgccacgaatcttaaggcatgagtagacttgttcaaagtcccgtagatgatggtggagattttctagatctaagccagaaaaagggtttttccttaaccatgctgatgagttcggcgcgaatttcatagctagttgtataaatcggctccgatgaaggaggtggctcatagaattcgcccctaggagcagacacctcgaagagaggttgctccatagttgagaagagtttaaaaggaatgcttctctgggtagcaggggtggaggaagaataaaaaacaaaaaagagatacgaggatgaactgggttcggaaatgattagcaaccgttccccagcaacgacgcaagatatgcttgttggtaattcttatggtcatggataaaatccgcaagcgcacggatataccgatgtctaagggaacgtgtacggtcagatcttcttccggttcatccaaggacacctagcaaaggataggctaggatagagaggatttactagtgagaaacagtgtcaagggaaagcttatgtttaatcctaacacaatacttcaggcgctggcaacctgctgttcctagatgtcgctctactacgtacccggatagggaggacttaagtgctattgagggctctcaccacctctacacccacctcaaacgtactgtgggatacgcagcaaccactggagattaattacccagacaccacgtctacgcaattaataactactctagtgccgatcaaacactaaagcaatcactataaataaatggactacagtgaacaatgatcccgtatgctaattaggaactaaccaaaatgtaattctcactaagtaaatcttaaatactcataatgatatttctattaaagcagagtaattaagaagatacaaaagtagaaagagattaccgacaactccgggattcctccgattccttctaccttactctctcgctattctaatatgcaataaagtacactagagcctcttgtaatttagctcatgctttggtgtgtgtgaatgagggagaggagaggggtatttattggtggagagttgccttgggagagtggagatgctctaagcatcctatgagcatattccctctagctttatctcctcttgacaagtgtcctctctatgacggtttccactggtagaaatggccacaaccatcattgggatgagtagtacaaccgtcatactgaatatgggctggactgggccagctaggggttcggccgaaccaccctggttggctcccctggcccacatctttcttcaggatgctgacatgtgggccccacttcttgatgctccattttttggctcaaaatgattgcacattttatatattgtagctcaaaaccatgtgagtttatcagagcaaaatatatttccattctttatgctcattctttcccaacttaggtggttgatcacctgcatataaatatacaccaacactcatggaaattgttagaaataaatcctacaactatgttagaagtttcacatttatggttttatgcaggttttgacggctttattttggcacttaactgccgtcaacaaaaccccccacactttgctctttactcgtcccgagtgaaggttaaggattaatgtggaataaaatttcccaagatataatacaagtacacaaattattctaagccatacctgtacctgtgaactattgaagtgtctaacttaccatcttgggcaattgatgaatggaacgatcgtgactcaagtcctccttaatcctcctatcaatctcttgggatttttatatattttcgcaaagtagctatactcttcgaataaatctctcaaatcactcacgtggtttgatttgcggatcctcaccaaggcatggttgccgatttgtccctattctaaaaggctatataggtggagctcggtagggatcaatcggggcatacctgcatcaggtatattgcaaagccaaaataccagacccaaggagatagcaagtcatactttctgatcaagaatgtgcatgtgtgtgatatgtgtatgtgtataaaaaaaatgtgtggatggaaaaggaaaataaaagataacaactcctttggtatacctcctcctccaattctttctcttggaaatttaagagagtgcatggctatttcttttcctctttttatttcatcatgccccatacttcgtatgagcaagattctctttattattattattatttttttcatcaatgctccattcttgtatgagaaagactttatttttttccttctttttcatagccacgcctttctctctgtttctttttttctttgaaagaattttgaaagaagaggcataaatgacatggagtatttattttgtggataatggataaaataaatgatggatgagggatgctagcttccagtgtagaagtttagcatagtgtgtgtatgtggagtgtggtgtgatcttgatcatgaaagtatgaaagcatctcacatgggtgacaataatttgacaaagctgaatgtaatgccaagcagcctaaacatatatcagaattttgcaatgagaattatatatggccttagtaggtaataatatagttactaaggagtattgctcgaaaaagtttttattttcgcaaaataaaatcccaagtatcatgacagttgtataggaatttcttttgtcataaccatatcacataacttagattagcaaggttccctatgatagatgttagttcacaagtgacaagtgttagcaaagaataaaaagtatacatgattaatcataggagaactttatttgttgagagttaaggttttcaattttcatttggagtcaaactaaatttgtattcaatttttccgcaaaagtttaactcacaaactagggaggataaggaaggagacatgcaaacctgaccacacggtagaagggtgacagagctggtccaagcaagggtcgggcgaacacttggttcggccgacctaccaggacatggttctgattgccgaattttgtgcgcggccgtcagctggtgttcatcaggttgtcatgttgagttgatgctattgcgcgtacgggagttccgaaaagactcccccacacttgttttgtaccttgtctttattcaacaaaaaccataaaaagcaaaatgggcttccaccgggttgaaataccggtgagccaaattttattcaaataactctaggcgcatgaagtgcctattttattatttcattttcatttttttatttttttatggcaacaatgagaatggtggttatcctagcagggcggatatatgacgtcatgattcacagggtgtttgagattcttaccagattgtacttaccaagctttgaaccaaatcgatggtaacaaagtgttgcatttgctttgcttggttaccctgtgcatctctctcataagccaaggatcttggtatggatgttggagttattgtacactgctccttagttgtcttttttatttcctgcaaaatgttagtggacaacaaatacccgagggactacaaagatttgaaaagattttatcatagcctcaagattagttgttcacatccatactaaaaaggaattggattctaaacttaaagcgcgtggatcccaccaatttgccataattttattttgtcatttttatttctttttactcgagagtcatttcttttattattaaaaacatttttttcaaaaaaaaatttttgttcaccaaacttttattcaagcaaaactcatacagggctgagataaacttatataacatagaaaaggagcatttggaaatatacgtaccgtgtaccttgagaggtgatatgtttctcctttgtatgttttggcaattgatttgttcctggcccttgacttacctccagtgtgactcgtgcttgagaactcacccatcagattgaataatttcctgtaggggttagtccacgaagggtatacatccaaagtccatgaaagtactggctctacggttcatttaaacaaacttgacaccatgtcaactttgattaaagcaagctatttatcctaagcatcatgcttaatttgagaagcctatgaatgtcgacgaccacccaaaccataacatatgaaaatagaccgaggacgcataaccatgcatgatcaagccagactcaactagagataagtatgagtaatagtaatggtgaatcttttgttgtatacctgagtatatttacagccagcatgatgtatatgttgaaatctttggagcggtggcacggtcaaatgtgattgttgttctttcctccatctggatgcaggttgtggcggaggaaggcactttgaccatgccaactcaggcgagtggttcggttatgcacacatcttgggtgcaagaaccttatgccttgaaggcatgttccgtcggcataatgctaaagagacataggatgcatctcttttcgggcaagtatgcaagtgctaactagagtggagcagcaaacagctcgaaaagaagagggcatttcctcttggttgtatgtatgtaggtgttgcgggagcgagaagttgtgcacagctaggattggatgaaggctaagccaagtcgacacatgagctcaagagaggggctgggtatagcctggcagcatggttactactagcaaggtgtatagccatattttaaagactcgcacataatgcggtctttgatctaaatgtagtccgtttgctctcttgctgtcctcttctcccatctcttttttttatatcttccgtctctcttttcttttcattttttttcttgttcttttttttcagcaaggtaaaactaacaccaactgcaaaccaagatggccttggttgatggaactcatcatacaagctcgtcaacctcccccacacttggactttgatgtcataagacatcaaaaaccatgtgtgttatgttggagtcttcataaagtgtgtttcaacaccaaggatcaccaaaatgtacatttgatgtagctcccgagttcttaggcatcgtacatccctcgttcttaatctcaacctgaaatggttagtgaccaagaatacccgaaggtgcataatatcctaaaaattggttttttcttttattggaaagacaacttaccaagataatccggggtatctcccggcagtgctttctttatggtcacaagctcgaccatggagacatctcgttacaagattagtgccacaaacacatacgagatttgcaatatttatgataaacaaaagcatccacaaccaaccttctaaacatgttagagataaggcccgaaaggtggttatggttctcacacaaggaagtgatactaatcggatagaactctaaggattctttatgtaagcatgaatcctagggtattttgaaagagaagttttcatgctcatttgtggagttctcatcctccagagttgatgtctctaacttgtccatggcttgcagtttctccttctcaagagatgcatcgtgcaagaacaaggttgtttcttgacaaatgtcgagaacaacattttgatggccagagggacaaggttcaggctcgataggaggttgtgatggtggttctttggactgcaattcaacggtcttgccagaatctttttgaatgaaatgaagatcatcctgttctataatagactcaggggactcatgaagcagaactgccattgcttcctctatcggtgcatcatcagggggtatgtctgtcaacgagttctcatgatcgttatggagatcacccctgaagtctagagcgcatcccgaagtttgaaattcttcgttcttcggtgctgatggctcgagagaggataccttagctgaaactgatggtgtggaaggatttgattcagatttggctattgaaggttcctcttgttttgacaccgataccttctggaggggttcagaatgttg

SEQ ID NO: 26738 - DNA, 504 bp, Oryza sativa
gcgactatttcaaagtacaccggagcgtcggaggaaccggaatctagcgacatacaaagcaaacaatgcaaacaggctataagactactgaaacagggaacaaaagtatttttaatggattctactcatttttcttgatttactgagacttgaatgggcttaaacggagctcggatgaattagttatgaattttagaagattcactgtgtttattactataaagaaaaaccttaaatcatttattgcgcaataaatcccagggctgacgtcatcaaggcggggcgtggcgccagcaagcggggcccaccggtcagcggcttgggagagggaggaaggggcggttcaccgtggaccgggaccacgcgggtggtccaccgccggtccacgggaccgacggtcccagatcgccctcggggccgatcggacgggcggtggcgacccggttcggctcaagaccggccaagcagctcacggccatggcgacggcgcgcgcacacgcgttg

SEQ ID NO: 26739 - DNA, 2514 bp, Oryza sativa
ctcaaaactgagcctccaacctttgccattgccatcgatcctatggaagccagtgattggttgcgcacagtcgagaagaagctagggttgattcagtgcaccgaccaggagcgggttggcttcgcaactcatcagttggttggaccggcttcagagtggtggaatagctacgaagcatcacggccagaaggacataccatcacctggaacgagcttttcagtcctgctactttcatggtagtatccatcatggtgtcccgtcaggtaatgtattacactaagaaaacgagagtttcgctacctgaagcaaggagatttgaccgtcacagagtacctgcacgagttctatcgtttggctcactatgcaccagaagatgtggaaacggatgaagacaaacaagagaagtttctccaggggttaaaagatgagccgcagtgcaactccttctagaggattatgaagattttgagaaacttgtggacaaagccatgcaactcgaaagtgagcataatcggatgacgaactgcaagaggaggattgtcaacatcccagtatttccatgtggtaaccaaagacagcgcactgagccacttcagatcaccggatcttctgttgtgcatcaagagtttccgcgccaagaagatggacacaatgcagacaacaacattagcaatactaatgatgatgatgttaccaccaacaaccatgcttcttgccccaatagtgaccactcgaatcaagcgtgcaatgtcaacatcattcaccaagatgtcgacgatagtatcaatgatggcacccaaaatgacaaccctagcaattgggactctgagaaagactccgatggtgatagcaactatggtaccactgatgccaatgttagcaaggatttccagccaccaattccaactccaagtcagaatgaccgtccccagacggatagctcagcaaagaagacgttgatttgctacaattgcaaagaaccagggcattactcgagggactgcctgcaaccaaggcaaagtcgacctccacattaccgccaatttacacgaagcagacatcccaatcgtattgtggtcactggagcaaacgctgtacccgtgaggcctcgtgttaatcagaacccatagcagaaacaatgtaccgatgctaagcacctttccttttaggcagtgcttagtattcatgtaataagggagaaatgtgtaatacagacaagttctactaggattcttttggaagatgcggatatgtgattatgtgtataattgcttactgataaaggagacctagggtctcatttcagaggaatcatatactaatctcgagttaataaccaacctgttgatggaaaagaaaaccaattaaactgtgttggattaaaaagccaaagagacttttgtttggactgagagtttcagatgtgtcctctttggaacaaaggcaacaaccgccagtctagcttttgacaaaccacttgaaggtttctctgaaaggcagcaggctcaagtaccacatcgtcaccagaagcatccacaactctcggagtgaagagtacttagttgacaaaggtcaaaagatgattgatagaagatatcgaaaaagatgttttttaccaggcaaagaagtaggtcgaaaggtgattgataagagaaatcgggaaagaacacatcaaggtcaaaggtgtaaaggaatacgttgaatgctaactgaggacaacatgaagagaatagtgggaagtgaaccaaatgtaaagaaagtgaatccgagttgcttgttcgtgagagctattcccagttatgaaccaagtgatatgttcgaagatagtctacagaggtcagacaacgaagcttcagatttggcaggatacgattaaacaataagaagtccagcagtaaagccatttgggaagacgtcaaagcatgtcaaatgggagaagttggttcagttgagaaacataattcaaaggcaaagttatcgacccttgcatcgaatagcagaagtagctagcacccggagagcaggaaagttaatatgaggcagttggtggcaagttagaagtaagtgacaagcatggtattctcatgacgacaagcatggtattctcatgatgacaagcatagtatcttagtaatgacaagctagtgttgacgcatgacatgaagtggtaacttctatgaggttgacgccaaagatatgaactatgcgaagttctggaactgaagccccatcttcaggtgccgcaacccagtcgaagtcagctaaaggttcaaccagggacaagtcgggtgaagagaagatcccatctgcaacaggagatcgagccaagcagtccagagtggagaagttttgctaggcaagtttgttatagaagacgcgacgaaagaagtccaccaagaagagaagaccgcccaacctatcttcttgctagcctcctcgaatctcggggacgagattcttgtaaggggggtggatttgtcacgtcctgataaattcatcccaaaattaaaaat

SEQ ID NO: 26740 - DNA, 4142 bp, Oryza sativa
agtcgatggttatacagctttttgccaattatggataaagactcacaaatagacttcaataatatgttctccatatgttttgttggttatttttatcttgatacgctagttgctattatttttggactacacttgttttgagtgctagattgtaataatgggctgtagctcttttgagcaaagaccgggatattatattccattatctaaaaaaaatgcgagcattatttaagcgttttgattctacctcttacaaacggatgatagttggtgcctcatggtatatggtactagatatcttttcaagaatggtaaaaactctttttaagtttaagttgatatgaaaagccgcccaactgcaatagtaaaaaaaaggttgtcaggacgacatggaataggcctgatcggctgacgatcgacacaggtagttaggtcgttgatttgggcgatcgtgcaacgggcatactcccaccaattaacgaatccatgcacgctcacgcacacgcttttcgatcggccacccccactatacacatatgcgtcgtcgtctgtctgtgcactttatacgcactacggtgcgttgcgattggacgcgccactgatgcacttccactgcagctaccgctctacacacgtactagcaactagggcataggcaacttttgctcttttgttcttttaggtgttggccggccaccatcactattcagctcagcatcttaattggcacgtaggagatgagctagctaagccccctcgctagctttttggggatataaaacaggatggcgacgcttctgtgaagaaaagagcccgagagagaagagagaatcatgcttgcacggtgagaggtgagtcatcattcttcatcggaaggtacgtggaaactagacattgcaatttgcagctttagaccttttcttactcttgtatgcagagctagctgcaaataacacaatgaacatgttgcctcagctggtcggctatctcgtctaatggattagacttttctggctcatgcttttccattgctgtgtctttgcatcactttgagcttgatggaaaggcgatacaaaggataaatcatggcaaagaatacacacaagggtattcagtgttatgaaacatatcttattatggacgaattaaattataagtgggaagcttactgtagaagaaagcttacaccagaagtcagcttacagaggaaggcagcttatggcgcaagccagcttacagaggaagcaagcttataagagaagccagcttacgacgcaagccagaaggtccaaggcatacgacgtaagcctccaccctcctccgcctataaatagggcccagaaggtccaaggcgagaacaacggatctccggtctcctgcttctcctcttgtagcatgtacttaaatccagaagaaataaagcttccactcgttcatactttctgtgttccacaactctgtgtttggtttgcttgtgtgctgatcaatagaatagactggtttctcaacacgttatcagcacgagactctatcgagctaaaaaggtaaacatgtgagaaatcagtttctactgatcatcttgatctttatatgcaaatcattcttctgctatagttgaaataagcataagaacatggtacctaaagtaccatcccccgatatcctctcagcaatacacgataacatgatggcggctctgccgctattatcgttcaattgctagagttgatacatcctctcagcaacgcccggtaacatgatggcggctctgccgccgttaccgtccaaaggcttgagatggtacatccccttagcactatttgataacacaatggcggctctgccgccgttatcatctaaatgctagaggcgatgtaggtgcctgaagcaccggcatggcaacttaatggacggccctgaagtgtcgttatggatgtcctttgttttatggacatcacccatatgggcccttgatgccgctaaggtcggctctgtcgccatgaagcgtgggctcttagtggggaagtactatatggtttatcttacttttatacagtctgcacaatatgcatgaagtgcccatgtatgctcttcattttttttacatgcttactttgctatttgcatgactttcataacattaattttattgttatgaaattgatttcctagcatgattgataatagttaatcaagcaatctgtaatcctgaagattacttaagttaatttgctaggaaagattctatgggaaactgtgtgataatcctgaagattacgcatgaccaattcatgtcgaccctgcacatcgtatttacctgtcgtaaatactaaatgatgttgcagaacatgtcggacatagcaaagaaggaattcgccgagcttgccttggatggtagtaactacctcacttgggcattggacgttgagattaaactcgactccatgggtctcggtcatactattgtgctgcccgaagttggcactgtggagtctacgaaggccgagaaagcaaaggcattgcatttcttgcgccaccatctccacccagacctgaagtttgagtatatgaccgagaaagatccactggtattttggcaattcctgaaggatcgctttgaccagcaagggtcaattgtgctcccaaaggcacaacatgactggatcaccctacgcttccaagactacatgtctgtggcggcgtataattctgccctccataggatcatttctcagttgcgtttatgtggcctgaagatccctgacgctgagatgatcgagaaaaccttatctacctttcatcacaacaatatagtgctacaacagcaatacaggaactcaaagtacccgaagtactctgatcttatcttagtcctgttagttgcagaaaggcagaatgaggttcttctaaagaatcattctgctagacccactgggtctatggcagtgcctgaagcacacgccaatgttgttggaaactcgcgtggccataaaagaggccatggtgagaagaaagggaaacgtaagggaagtatcatattcaagggcaagagtaagggtaaacccagaggtaaaggcgaactcaagaaggttacaggtgaatcatctggggaaaagcaggataactgctatagatgtggaggcagagggcattggtcccgtaactgccatgtccccaagcacctggttgagctctaccaacaaagcatgaatgagaaaaagagccaacatgagtcccacttcaccattgagcctgaagctcagattgaaaagcatgatgacatgcttatcaatgttaaggatggtggggacgtccgtatggacgatgattgggacaaccttcttgaaaaagatgatgacatatttggaggcttgaagtaatctcctatatgtcagtcatatgcagtagaactttggtcatgaataatgctcctgaagagcacgcttagtcttttactgggcctgaagtccttgtaatgtttcccttaatagaatcaacttactccatgtttaatttcatttatgtttatgttccataaacagacttgggtgggaatcccatggcagaagaggatatatgtctagtagacagtgccaccactaatacaatcttaagggaaactagatattccacaccttaactaagaaaactggaaatattattaccattgccggaagtaatactcatatagtaggcaccagaagtgctactctagttctccctatgggtacctatatctttgtaaaggatgctctattgtatcctgattcaaagcgtaccctcttaagctttaaagatatccgtgcaaacggtttccatatagaaaccgagattgagcaagatgctgaatatctgctcataacaaaaatagatggatatcaaaagcatgtggtggaaaggctcctttcatcgccatcgggtttgtactacacgtacataaaacccactgaggaatatgttccgatgaagaccatatttagaaacccagagtcatttatagtttggcatgacaggctgggtcatcctgggttgggtataatgaggagaatcatcaacaattctcctggccacaatgttgaaactaaaaacttccctaatcctgaagattttatttgccctgcttgttcaattgggaagttgat

SEQ ID NO: 26741 - DNA, 3040 bp, Oryza sativa
cccgtttaggtatttcatggtactgattgatgcttctaccaggtggagccatgtggacctattatccacaaggaaccatgcttttccaaagctaattgcccaaatcatcaggctaaaagctagcctccctgatagctgcgtacaattcattcgaatggataatgctggtgagttcaggtcgaaggcttttgataattattatttagccatgggcattaaggtagaatattcagtaccacatgtccgtactcaaaatggcctagctgagtccttgatcaagaggatcaagttgattgcacggccactgttgtaggattgtaggctaccaaccagttgttggggccatgctgtgttgcatgcagcaacactaatctcaactcaggccaactgcatatcatagtatatcccctcttcagctagtgcgtggaaaaaaaccaagtatttcccatctgcgcaatcccaccaccacagcgtacttctatgggacccaccggaagttggggatatacgttggttatgagactttgtccataatcaagtatcttgagcctatgactagggatcttcatacggctcggtacgctgattgtatctttgatgaggactatttcccagcattagggggagaaaagcatccagaaaaatgccaagatataatatggaatgcaactgggatgcagtccttagatccacgcactagtgaagctgaactggaagttcagagaatcataaatttgcaaaatattacaaataagttgccagatgccttcactgattacaagggagtgacaaggtcgcatatacctgcagtaaatgtgccggaaagagtagaggtaacccagaaggatactgactctgctcttacccccccatcctaggaagagggggagacctccgggtgctcgggacaaggttccgcggagacgtcatgtatcggcaagtatcagccgatcatgcattaacccaaacacttgggtaatatttcttcaagtacttgtcatttagtgctcgtccataaacttctccatcgagtccttgcaacatgtaagctcccttggacacaactcgatagatttggaacggtccttcccaattcggcgaccacttgctgaatttgctatcccgaatttacttaacaaactcatcggacacgaaaattgaaccctgatcagttgtaatggtttgaggaataccaaatcgataaattatatgctcttgaacaaattgtatagcatccccagaatcaaccttcttcaaaggaattgcctctacccacttggtaaaataatcggtcgccaccaatacctttactcgatggtggattaatcatgccgatcatatcaatttcccaacctctaaatggcgatggcttaatgataggattcatagccgacgccggtgctctctgaattgctccaaacttcggacaatcctgacatcctttgtaatacttgaaacaatcctctagcattgttggccaaaaataccatgcacgtcgaagtaaccacttcatcttatgagccgattgatgagtaccacaaattccttcatgaacttcgccgccgatagcaccttagcctgatcggcactcaaacacttaagcaacaccccatcaatcgtccgataataaagttcatcatctaataaggtatacttcaacgctttatatcttaatttccgagaagtcgattgggatggattctgtaaatatcgatgcagatcatatctctaatcatcggctgttactgcagctacttcaaccttaacatctttgatcatcggcttataccccgatgccccttgggccaaatcattagcttcaatgttttgttctcgagatagatgcttcaaagtaaccagccgaaatttcttcattagttcttggcacttctcattataaaccattaatgtatcattcttgcattcatattctcctaccaattgactggttaccagcaaagaatcctccatgatttcaatcgcatcggcttcaacttccttaagtaattgtaatcctttaagcactgcctcatactcagcttgattgttagttggataaggtttgatagtataagcaaactggaaacatgcccccctaggggaaattataactaagccgataccacaaccattagtacatactgatccatcaaagaacaaagtccacggcactatctcaactgagccgatcgaatcatcacgatgttctataataaaatcggctatagcttgccctttgactgccttcggtgactcataacgaagatcaaactcagttaaggaaaatatccactttccaacctttcctttcaaaattggagccgataacatgtacgtgaccacatcggccttgcatatgacactgtactcattggacaatagataatgccttaaccttgtatatgaaaaatataagcacaagcacaacttctccacaggagaatatctagtttctgcatccaagagccgacgacttaaatagaatacaactctctctttccattcaagctcctgaatcaagactgagccgattgacttctcactggccgacagatataatataaaaggtattcctttctgtggaggaatcaaaactggaggagaactaagatattccttaatactatccaaagccttatgttgctctgccccccaagtaaactgttgatcggctttcaatcttaacaatggtgtaaaaggctctaacctgccagacaaattagaaataaaccttctatcaaaatttatcttgccgatcatttcttgcaattctgtcttgttcttcggaggctgaatcttctttattgcattaacactcctttgagtcacctcaatccccctctcatgaacaagaaatcccaaaaactggcaaaccgatacaccaaaagcacactttgttgggttcatattcaggccatatttcctggttctctcaaaaaccttcctcaaatcggctatgtggtcttctatctctttagacttaacaaccacatcatcaatgtaaacctcaccaaccagccgattagatcatgatatatat

SEQ ID NO: 26742 - DNA, 1705 bp, Oryza sativa
caagcaacaagctgtaggaacccttcccattgatgacaaagaacgttgtagggatggttttgttgccgactgtcagctccacattcaaaactcctttggtctctgatggattgccaccaaaatccttaagcaccatatttgtcttgatgagatcctgagcgtttctgcccaactttctgaatatagcataaggcatcaaattcactgtagccccaccatcgaccattattttggacatcaacttcccattgacataaccatttatatacaatggcttgagatgccgattctctgtaccctctggcttctcgaagactgcttgttctggtgacaaaatcaatttagccgattcttcttcaacatcatcgacatcggcttgcttgaccccaaactcggtaggcaacatgaaaaccatgttaaccgatgcagttacaacactttttcctttggccaatctctttgcttcatcggtcgtggcttcatcggctgcaggaacctgatttttaacacgccactcctgccttggctttgttttctttaaccgatgactgatttcctgttcaacctcctgaaaacgttcccggttccttaatctctgaacccttctcttctgattttttgtaaaaaataccagaaggacactgtcatgcccagaaattcccgaatagaattccaagcagaatgtgcattaaaatccccatccaggaccggccggggtacacaaacgacaatgttgacattcagatccacgtcttacaaacatcataaaagtcttacataaatgcagcgggaaaacggaagacaacaggagctaagccttgactagaactgcagcgggaacaccactccacaggcatcctcgactacacggacgaagcctactcctcggagaaaccttcatctgacacatactcgtgctctggggttgggaaaaatagagcaagactgagtactacccactgtactcagcaagtcataccggaataggggtatgatgcagggaattatcaaagaagagctagagtggttcatttgcataaagcgagcatttataaacagaagttgaaagatttaaacagttataataattaattaatattaatcatccactgtccaacgctataccacgttgcgacaggcccaaccatccacctaaactatccaaattcaaaagattacactagggtgagactaatcacggtgaatctggttgaccgcccataaccgcgggctcggctattcgaatagttttactctgatcagaggtgtacaactgtacccacaagacacagccccacgacacgtttccgtgcgccgacatgccaccacgacataccggaaagaggccgtgacaggacccttcgtataaccccctctaaccaagcacaccacacctcaggtttcacccccactcctcgcaaggtagcgggcagtcccctctcatgcctaggtgaatccagaagccgcataggccgtcgcagggcccatccaaactccatcacgcccacccttgcctggatgcgtcggctagaggaaagctacactacaagcccagccgttgcccacgctggcttgtggtaagtacgataagttcttccagggcatcccgcgaaccggtccttaactgccatgggtgcgaccagcaaaaccatgcacccacagcccaccatgtgatttattttaattaaccaacaccaaagcggtg

SEQ ID NO: 26743 - DNA, 14798 bp, Oryza sativa
tcggtacaaatttctagcatctttcggcctaagcccaaactgctccttcatcatatcggcccatggtcgttgctgaggtgctccttgaggttgttgtgacatgggctcgaattgattgtattgaggaacaaactggggttgagccgatcctccctgctgatattgaacttgcggtgatggaggctaatactgataattcaaattgcccccctggtaattttgaaaatctggctggatattacgcaccaaatgttcaggaacaacttgagggatcaccgtttgatctggctgtacatgatgaaccaagtgctctgggacaacttaattcgcagcatgctgccctggctgactgccaggtgttgcaaacccagccgatgcattcatcaagccttgctgttgaatcggttgaatgacctgttgccttgatggcgtttgctgaactggttgcaaaatctgccgtcttggtggcgtctgctgaattggttgcacaacttgttggactgcgggtgtttgttgaatcgactgcgcaacctgctgccttggtggtgtttgctgaatcggctgctgctgggttggatcaacagtaggttgaggaggtaagaacttagccgcaacctgatcttgcgttagccgatttacattttgtccactatgctgtggttgttctctcaccagcaaccggggattaactaattggcccggtgccgatgatggtgcagcaggtgaaggagccgataatggtgccgtcggctgagctgatggtgcattcagagaaattggttgaacagctggctgattatcagtgactaacggccgataattggggaacacccctcctggtagataaaccagtcctatagcctgatattcagccattgaaccatcaaccattgtcttcaccatgtttgacaaagtattgaccaatattccagattgattgatcaaagcatggtgcacggcatagtcaacctgatcctgaaagttgttaaactgtaactgcgccatattgccatcctgattagagccaacaccttgatttccttgagaaccatctgcagcacccttatcactcggttgagccacatcacttggagcttgtttcacttctctatccttagaagaaccggtcccagggacatcagcaactacctttacttcatatttctgcacaactgtccccttgcgggtttgcatgaatgagttcaagaataggttacgtgcttgttgcatcattgcttcaagatccttctgctgatcaggtgtcaacttgtccggagtgatattcacgatgttgccttcttcgacttcagatagacctagcttctggatcttagctttaacagagccgggttcaccagccgaagacaacgatgctggcggcttctcatccatgaggaaaactctgacttctaatcagtcccaccgggcatgccaaaagcgtgttgacgtaaaacacgaggcctgggagatctgcttaactccagtgcaggtccaaaactcgccttcgggtatgcaagcgtgccagttgatttgatcctgcaatcaacaagaacaaagacaaagaaaccgcggttaaattcataaatgacagccgatcgacccttggccgatgacatatcatttatttttgagccgatgtcatatatgtatcgatcgacagtcatgagtaaacaagaaggaaccaaatctactcgattggctgtagatattaacaatatatactccttatatcgatatatacttaaatcaagtgattgggatagatcggtcgccatgccgagacagtataaatcacttagatcgaaatatatattaataatgggactatataggttcatagcatagccaatcaggtagatttagcatgtatcggctaatactccgataccactctatattaagatattaaagcaagcagaatatatcaaacgaaagcctaatatatttaaatgctataagatcttagcataaagggcagatttaacatatcaacgaagcatataaaacaagtattgtagttcaatcaggtaagatcggctgaaaccctgatactaccctaatcggctaccaagaagcaggctagagattgagattctaatcatgactcataagatcaaactcaactgatacagctataagtatgaaaagaaggacaatattgtcacatcctgattttcgtttcaggatttataaattatttaataaattattattagaatttatattaaatgtttattaatttacaagtgaagttaaatgtgggaaataaaatttcctaaatataaagaatggatggatttaatttttattaaattctccatggttaattatactctctggaattttctcggatttttcggagctcaactcttaattttaatcatacaaagagcagttcagcaattatttaaatattaaattaatcatttaatgatctgattttaattttgttaaatactttgagtgtccaagtattttcaggatttttcttgaaattatttgagcattggaagtatttttaacaattcaaagctcatctcattgattaatttattaaattggaagtcctttgttgctcccttccggcccagcccaaaaagtctagttggcctccctactgctacagtgtcgtcttccagctccagacagagccgagccaacctgtgcagtcgcctcctcctccatcaaatccggtgcatccgttgcttcccttccaaaattgattgcaaaaacggattcctctctatctcctccacctaatcccgaagaaacccccatcaaattcgttatctatctcacgaattttggccgtttttattcgggtgaactcgggataagcccgactcttctttcaccaaatccatccgttcctgagccgatctcctccacccatgccgatataaagcatcccctagtcgtcctcttccgtttaccccaagtcccaagccgagccgtcgcccgtagagttgccgccgcgttgttttagccgccgccgtcgccggcgatcctccggtcgcgtcgcgctgccgctagtatcgtcgccgctgccgtccgtcgtcacagtcgggttcgtgaggaggagaggaatcccgtccgccccttcgcagccgccgaagaccgccggagcgtcgccgtcggggacccgagtcgagccgccgttgaacctcgtcgccggccgtcgttcgtcgtcgtccttcgttgttctttgcaccggtgagttcgcgtcgtcgtcctctacgcgtaggtgtcctcggatagcccaaccgagccctcttttgccggtggtcgtgtcaaccgtgccatggccggcgatgatgatgtcagcgatgacgtcataaatccctttttctaggttttctttattagatgaaaatcgattaaacttcggaacttcataactaaatcgtcgtaactcggattcgactggttctagttgctaaatttttctaaaatcaagatctacatgttaaaaatatccacatatactgtttatgcttgtttttgtactgtttatttggtttttattagtctttttcttcgttttgcgtgctagctttgtcgtttccgtcgttgcgaaggttcgtgagtgcgtcggaagtgttcaagaagattaattgaagatcgattattgcaaggcaagtcacacagatcctaaacacaatcctttgagcatgttgatcctatatttaaattctctatttatttcaactgtacatttattttcgaatgtcaccgggtggtgtgaacctattcctttgttatggccaatttgcattgaatgccctattccttgataccttgggtaataaattgattagcttgaaccttatgtattggtttggttcagctaaatgttatatatataattgcttagccatgcttagaaacattagctcactaatgggatgaatcatatatactacattattatttatggttatatttaatggtagctcacgatggttaatcgtgttatgataattaattggtaattaaaatataattaatggtgggttgtcagcacatggttttgaaggtcgtgcttatggcaattaaggaccggttcgcgagctactgttgtgagacattaaccgtgccaaccacaagccagcgtgggcaacggctttaccttttgtatagcatgattcattacggggcaccagactgagaagcggtgagaagtccgtggggatcgctagggagtccatgcctctggttatatttatagaggggttgattatgattcaagaatggtgcactgtggtgagttgtgttgtgcgaagggtattgtcatgatttccccctttgcagtgccgtggtggtacttcgaggcatggcaacatgtgtggaatcgtgtcttgtgggtatagtggtatacctctggccagagtaaaactattcgaatagccgtgcccgcggtcatgggcgggttgagcaatgtttttcgtgattagtcccacactactcattaatgataataatgtgataataaatttgactcctggtttggaatggtaaattcctggtttggaggtttgatctgtacgaccggggttggttgttcaggtttggttgggcctgagcagcatgggtgtgctgttcagtgttgattaaaatttctgattaattactctactgtttcactactcttaaatctttactaaatgctgctttcgcaaatgagactatattatgccatcctttggtatccttgtgcacttgcatatttgctgtgtggcttgttgagtatgtcatatgctcattcttgcaataatcaatcaacctcagttgaagaaaaaggatccagaaggagaagacgtttggcttataccccagttgagctgcttgtgggagtggagctgaagccatcgctagaccgttattccgctgctgttttcttttcttttgtatgtatgtaacgttattattatgatggatttgtatattaaattatcagtttgtgtacctcggctgattcctagacgaggattttatgcacaaataagtttgaaattactagtgaatttccgggcgtgacaaatatctagacaatcaagccattagaagtttcatagagtggtagatatcctatataatccaagccaacgtcactatttaacctaatcggctgccttctaccgatagatgttagccgattgtaggccagataacgatattgccagagattatgcaggatatatgataactcgatgaattacataaacaagattagagtgtcgtaaagatggaagcactaatcccgagaacgcaagccgtcataacaagttttacctcttgttaaagatcgaaaccgatacagctcaacccgaaagcaagaactcgtcgaaacaaaacgaaagtaaaaagggtggcgatgcgccgagattgtattgaacatgtgtgttcattgattacatggggttcagggtctatttatacccgagaattacaaactatgtccttatcggatacgactcttatctctaacaaactctaagataccataagtctttgcggcagacttttgcccaaatatatctctaaggaaattacataaaatatcctaattgatagatacaattgccttctcaggactctatctgtggagattatggataccccatacctacacggcatgtatatccgactgggtatggggtgccatgtatagatagaatatctttaaagggactcgggttaaattccaaacttttatgtcaaggaaatacccgggatcctagtcggttacgattgtatcttatctgtaactacctattccgttaggagtatgggctgtactttgtaatacggaccccttctcctatataaggaggggtccgggtgtctcttggggcacgatttttctcctagatcactcgacggatcaatccctggacaggagtagggtattacttcttattaagaaggcctgaacctgtataaaattttttgtctttaaacccatccacttttccagcttgatagccacccccttttagtattgccgaaatcttgtttcgacagttggcgcgccaggtagggtagtgtcaagttcttcgccgactagtgcgatgggtttcgtctccggcatcgacgacttcgtcttccctcccgggcaggcgttccggtttggcagcctcgacttcatcaccaacgacttcggcaagatttctctcctcgactcggatccgaaccagtcggggggaggccaggtctccgccccgttcggtatcccgaactcggccgagatctactccaagatcatctcaaccgagtcggcttcaaaccagtcggacgagatccaatctacttcaacacgacctgatcaagacaatggggcctatccctcaatcctgatgagtctccccgacgacttggccacagtcttcaccacaagggcgtcttcttcccgtaggcctaggccagatccagcctcggcttcgatccagcctagctccagggaagtcggcgtcatactccaacgtctcgggacggtttcgacggaagaattgtatggcttcctcagctcccccggtgtcgattctcgaccaacggagattgtagagtacgactacttcgactaccactacgactaccgcaacctcgacaacttcgacgaaggccacgaagataactacgcgcctctcttcttcggcgttttcatggccgacaatgacacggaagaacagcgtcaagcccgagaagcagaagaacagcatgtgcgacaagaagccgaacgtcgccgactggaggaggagcgtcaagcacaagagcgagaacggctacagcgtgagcaacaagagcacgaacgggctacgaaggaggctgaggaccggcgacagcgcgccttggaggccgggcgacgagcacgagaacttattgggcaacaagacgtcgaagggacggcggtttttcgcaccccccagcagaacgcggttgcagcgatcacccttctcgacactctccttaaggaagatgcactcaatcaggccaatcacgtcgtcaacatcttaaatcagatcaagaccatgatcgtcgcttcagtcccggtgaactctgcaagtgtccgtacgccgactggcagccgagttccgcctcttcgatctcaagactatcaccaaccaagcctcagcgtcgtcggcgccggatctagccgcaggagtagggatcatggcgaacgatatgtccactcgcctcctgaccgacacagggagcgtcgagccgaacagcctcgctccccacgtcgcagtcgtcccgtcgatctttgcgaaactatcaaccagcgccgcacggcaagaggctacatcccccaccattcactggatcattacgatgacgatgtggatggagatgctgccttcacaagtgacctgcgtcgagtggattggccgaccggcttcaaaccgactggaatcgagaagtatgatggcacgacaaatcctgagtcttagctcactgtctataggctcgcgatccgcacaacaggaggagacagcaaagccatggcaaattatctgcctgtggccctagcagactctgctcggtcctggcttcatgggctatcccgtggcacaatcggatcttgggcggagcttcgcgaccacttcatcgccaacttccagggcacttttgaacgccctggtactcagttaaatctttacaacgttgtccagaagtctggagaatccctctgagattacatccgacgtttttccgagcaacataacaagatctctgatatcaccgacgacgtcatcattgccgccttcaccaagggcattcgtcatgaactcttagtcggcaagcctcccaggactgtcaagcagatgtttgaaaaggccaatgagtacgcaaaagctgaagacgtcgtcaccgcatccaagcagtcaggcaccacctggaagccaaagaaagatacgccgacgacaagggggagtggaagtaccaattacaaagatcgcaagcgtaagcccgaagaacttgtggcaactactacaccatcctcccgacagcgttcgcgcgtcaacactttcgacaagatcatgcactcccaatgcccacatcatccgaattcaaatcacgcggccaaggattgcttcgtctacaaatagttcgcagagcaatacgccaagaactcaagcaaaccgactgacggagttcaaagcacgtcgaagaagaaggatgatgaagatgatgcccctactggtttccaagactcacgcaaggaactcaaccatatctttggcggacccctggcttatgaatgtaagcgaaagcaaaagctaaccgagcgggagatcaacgccgttcagcccgatacgccacaatatcttcggtggtcagagacagctatcaagtttgaccgcttagatcatcctgactgagtggtccacccggggcggtaccccatggtactagacctagtggttcgtaacgtcaagctccgacgatccctcatcgatggtggcagcgcactcaatatcctttttgccaagactctggacgacatgcagatccctcgcacagaactgaagccgagtaatgcgccctttcacggagtcatccccgggctatcttctactccacttgaccagatcactttgccggttactttcggcacttgggagaactttcgcacaaagaacatttgcttcgaagttgttgattttgagacagcgtaccatgctatactcgaacgcccggtgttagccaagttcttggccgtcccgcactatacctacatgatgatgaagatgccaggacttgccacaaggaaagctgcgagatggcccagacccgcgagattacgctcgctcgagaggaaatccgactggctgcatccacagcaaccgaaggagaagtgcctgcaaccaagatgccaaagaacggagagggcgatgccaagactaagaaaattcctctagatccctctgatcccactaaaactgttgtaataggcgccgagttagattgtaaataggaaagcgcgctcatcacctttcttcaaaataataaagatatctttccgtggaaaccatctgatatgcctggtattcctagagaggtgattgagcactctttacatgttaaggaagacgctaaacccataaagcaacgactccgctgcttcgcacaggataggaaggatgcgatcaaggaggaactgaccaagctgttagcaacaggcttcatcaaagaagtcctacatcccgactggctggccaatctggtcctggttctgaagaagacgggacaatggcgtatgtgtgttgattacaccgacctcaacaaatcttgtcccaaagatcccttcgggttacctcgcattgaccaggtagttgactcaacggccggctgcgagctactcagctttttggattgctactcaggatatcatcagatccatttaaaggagtccaactacttgaagacttcattcatcacgcccttcggggcctactgctacatcaccatgccttttggattaaagaacgcaggagcaacttatcaacgcatgatccagagatgcttttcaactcagattggtcgtaacgttgaagcttatgttgatgatgtagtcgtcaagaccaagcagagggatgatttgatcgcggatctagaagaaacctttgcgagcatctgcttcttcaagatgaaattaaaccctaaaaagtgcatcttcggagtaacgtcagggaagttgcttggctttatggcgtcccataggggcatacaggccaactcggagaaaatcaacgccatcctcaacatgaaaccgccgagttcccagaatgacgttcaaaagttaactggatgcatggtggcactcagctggttcgtttcacgactcggagagtgggggatgctctttttcaagttgccaaagaaagctgacaatttccagtggggacccgaatcacaaaaagcctttgaagacttcaagaaacttctcactactccaccagtcttatcttcaccgcatccacaagagccgctgttgttatatgtgtcgacaacatctcaggttgtgagcatggtcctggttgtcgagcgtgaagatgatggccatgtttaaaaagtccaacaaccaatttacttcgtcagcgaggttttggtcgactccaagacaagatatcctcaggtgcaaaaattgttatgtggtgttttaattaccgttaggaaattatctcactattttcaaggtcactcggtcacggtggtcacgtcgttttccactcggggacatacttcataatcgagaggcaaatggacggattgcaaagtgggccttagagttgatgtctttggatctatctttcaaaccacgaactttgatcaagttccaaaccttagcagacttcgtcgccgagtggaccgagttccaagaagacatgccgatagaaaagatggagtattggaccatgcattttgacgagtcaaagaggcttttaggcaccggagcaggtgttgtcctgatttccccgactggagaaaggctgagttacgtattgtggatatatttttctgcgtcccataacatggcggaatatgaggtgcttcatcacggattaaggatcgcgatatctttgggaattcagcatctaatagttcgtggagattctcagttggttgttaatcaagtcatgaaagagtggtcctgccttgactgcttatcggcaggaggtacgcaagttagaagataagttcgatggccttgagctaacccatgtttttcgacataacaataaggcagctgacagattggccaatttcagttcaaaacgagaagcacctccttccgatgtgtttgttgaacatctttatgaaccaaccgtaccaagcaaagaaacaaccgaggctacggacactcaagaagtaatcatgatcgaatccgactggagagagcccctcatcaaatttttgaccaagcaagagctccctcaagataaagacaaagccgagcggatctccaggtgcagcaaactttacgtcatacatgagatcgagctgtacaagaaaagtccatcagggattttgcaacgctgtgtgtctttggaggaaggaaggcaattgttaagagatatacattcaggcatctgcggcaatcatgctgccgcacggactattgttggtaaggcctaacgacagggtttttctggcctaccgctgtatccgatgctgacaaaattgttcgaacgtgtgagggttgttagttttttgcccgacagactcatttaccagctcaggagttgcaaaccatcccgttatcttggccgttcgcggtttgggggctcgacattgttggcccattcaaaaaggctaccggtggttacagtcatctctttgtagcttttgacaaattctccaagtggattgaagccaaaccagtcatcacaattacaacagacaagtctagagattttttcatcaacatcgtgcatcggtttggagtacctaatcggatcatcactgataatggcactcagttcactggcggagtatttaaagatttctgtgaagacttcggcatcaaaatttgttatgcctccgtagcgcatcccatgagcaatggacaagtcgaacgtgccaatggtatggtacttcaaggaattaaagcacgagttttcgaccaactgcatccgtacgctggcaaatgggtagatcagctgccgtctgtactttggtctctgtgcactacacccagtcgggctacgggccagtcaccgttctttctagtctatggtacggaagcaatgttgccaagtgaggtagaattcgaatctttacgatttcgtaacttcaaagaggagcgctagggagaagaccgagtggatgatctcaaccgactggaggaagcccgtgaagcagccttaattcagtcggctcggtatttacaagggatgcgatgttatcacaccgcaatgttcgatcgcgggctttctcagttgaagacctggttttaaggaaaattcaaactacacgagatcggcacaagttatctcccttatgggaaggaccgttcataatttttgaagttactcggccaggttcttacagactcaagcgtgaagacgatactcatgttgacaactcttggaatattgagtatcttcgtcgtttttatgcttaggcattacttttgtatcttcctctttgactgctaacatcaagttgttccttgagttaccagtcgggggctactataataataatggagtgtgattattatcaattcaattttcttacttgatttatcattgccttgtttgatcttttggcttagtcaatgaggactgaaagtttttaacaacttttgcgagttctaggctcaataaggtttgacgaaaacttttaagaaatcaggagctgagtttaaattatcaagcacagcataaattcatcagtattgtacaaattgtgcctccatcatcataagttaatactatacaatgtaaatcagactcagttttttcatcatcagaattaccagacccagtcggcccgagattgttgtcctgaaacctctcaactacatcagcagtaatcttgtctgcagccttttgtgcatcattgatgagatcaagggcatgttcttcacttgtcccatctgcaaagtcgtcgacagcatcaatatcgatcttcgggtacaaggacttggtcattgccaatgccaggctagcccccatgcatcccgcttccttgatgttcttaaaatatgtatctggagcagctcttagcttgtcgaagatttcaacagcatcaaaagaactcggaccattattattgaaaaacatggcttggatgagtggtgtggcggcgttggcaacttcatctccggctccttcaagcttcttaattttgttgaccaagacgtcgaattgagcttgagatttgattttgcgatctgcgcaaatggttcacatcaacgactatgcaagaagacaagaatggtttgaagtttcagcaacaagtacattcgacatctttcagagccgagtccctttgtttggtcaattcgcccttgtctttttctagagctttgattcgcttttctagctcggatatcttggtagcttgcactgtattattttccattgatcaattacatatggatagcggctttgagtaagataggcaggactgaaggttggcgttggtacctttttagggagggctgcttgcttgagcctctgcttccgggatgtcttcatttcgttctgtacccgactgatttctagtcgggggctcctgatcagtactgacttcagcttcggccgactggtttccagtcgaggttcattgctggcctgtacattgtcggttgctggttgattactactcaggcgatctttggcagtcggcccggtttctgtcgtaggactagtctccgcgccagttggttcagagtcttttccagaaggatcgatgtcataaggcttcctgcaaatttgagatatgctattaacaatacttcaatagtgaatgattagcgatacaagagaaaatgctaagtgacatgtacctggatgacttcctgattttcggtatgggacgactggatgttttcttcttcgggttagcttgtcttggctgttttccagtcacccctttgctgccagccttttcaacatcgtcaccctcatcgtcactcagaactaatttcctcttacgagagtctgactggttagtcggcttcgaggtgtttggttgagcatcggaccggatttttggccttccactagcctgaccagcctgccgacagggtgagcggtgttgagcgatcggaggatcagacttcatcaaggaaaattcctatgcatgatattccaagttttcaatcaaccttgcagaagacaaaaggatgtttttcagagaggccgagatgttagatacaaaccggtggaggagtgcttgggcagcctcatctccaattggaagcaagttccaggtgtcttgatatactggaggaagacaggtgtactcaggaagcgctggttcaggattctgcacataaaaccaatttgcatgccaacccttgttcgaggttttagagggcatggagaaatatttctggctcaaggttccccttagttgaaaaccggctcccccaacaatgcatggcttgctcttgtttggctggggcttgaggaagaagatgtggcggaatagggcaaaatgcggtctaatacctaggaaagcctcgcaagcatggatgaaattggcaatatggactatggaattggggtttaggtgatgcaaactaatcccgtaaaactccagaatcccccggaagaatcttgaggttggaagagaaaagcccccatagaagaaatgagagaacaccacgacctcatgtgtgtcaggggtcggaaatgcttcgccgcatgccggacgccacccgatgatctccttcgccggaagaacaccatgcgccaccatctccttcaaatcttcctccgtaacatcggagggcgcccactgactttcgaagctctctctctcctctgccatggatgcaagtgggatgatgcgatttgatttggaagtggcgaggaatggatgggaggttgatgcggtggttgcacggaagattttgtggaagctgtgaagttctagagagatggattggagtggatttgtgagccctagctttcgctggtgtggttttgcattgtagctgagggtggggaaagtggcgaaggttttggcggggaagacaaatcaactcgacatgatgtcgtacaccaagtcgtattgtcggaatcggctgtatcacctaacccagtctgactcggact

SEQ ID NO: 26744 - DNA, 12585 bp, Oryza sativa
cctcgtcttagattccgtttcgatctaatcttcttttccaatgctgatattaccaaatttggttgttaacaaaaggcgagcaagtgccaccctcactgatcaatctagctcgcccaagaatccaccaaagtattcaacgagatcatcccaccggcaacattttaggagacatcaacaagggagtatccactcattctcgtattgcaaatttttgtgagcattactcgtttgtgtcttctcttgaacctttaagggtggaagaatcttttaatgatccggattgggtgatggcgatgcaagaggagctgaacaatttcacccggaatgaagtgtggactttggtggagcgacctcggcaaaacgtgattggcatgaagtggatcttccgcaacaagcaagacgaggccggggtcgtaataaggaacaaggcaaggttagtggcgcaagggttcacccaaatcgaaggattagatttcggtgaaacttttgcaccggtagctagacttgagttgattcgcatattgcttgcttttgctagtaacctcaattttaagctatatcaaatggatgtcaaaagcgccttcctcaacgggcctatcaacgagttggtatacgtggagcaaccaccgggcttcgaggatccgaactatcccaaccacgtgtacaagctccacaaggcactctacgggcttaagcaagcccctagagcttggtatgagtgtcttcacaattttcttgtgaaaaacggctttgagatcgggaaagccgattcaactctttttactaaaagagacatgataatgatacttttgtctaccaaacatatgtcgataacattatatttggttctactaacaagtcttttagtgaagagtttagtaggatgatgaccaaacgatttgagatgtccatgatgggtgaattgaagttcttcctcgaccttcaaatcaagcaactcaaggaaggaaccttcatttgccaaacaaagtatttgaaggacatgctcaagaagtttgggatggaaaatgccaagccaatccacactcccatgccatcaaatggccacctcgacctcaacgagcaaggtaaagacgtcgaccaaaaggtataccgttccatcattggctcacttctttacctttgtgcatctaggcccgatattatgcttagtgtgtgcatgtgtgcaagatttcaagccgctccgaaggagtgtcaccttgtggccgtgaagagaattcttagatatttagtgcacacacctaaccatggtctttggtatcctaagggagcgaggcttgatctcattggctataccgatgcggattatgccgggtgcaaagtggatagtaaaagcatatcgggtacttgccaattcttgggtaggtctgttgtttcttggtcttccaagaagcaaaactctgtcgccctatccaccacggaagcggaatatgtttcggcgggggagttgttgtgctcaacttctttgggtgaagcaaaccttgagagactatggcctcaatgtatccaaaatcccactcctatgtgacaatgagagcgccattaagatagccaacaaccccgtccaacactcccgaaccaaacatatcgatattcgccaccatttcttgagagatcattccacaagaggcgacatagatatccaacatgtgagaaccgataaacaattggcggatatcttcaccaagcctctagatgaagctaggttttgtgagttgagaagtgaactaaatatcttggattctcggaatgtggcttgatctattgcatgcatgtttgcttggtagaataggtttgcatactactttgtgacaaaatggtcattcaactcatggatggacactagtcacttttgtggagaacttgaatctatgtgtattgggatctcatttttcaacaaattttggtcgtagcacaacttgaaatagattcacacattccctctctcgagggtgaattatcttgtctcatggtaattccctctcttttgatccctcggattgtccatttgacttgtggctattgttttgtgtgattgattgtgtgctagtcacaagttcaaatggaccctctagagctcgaccatccctcctttcctaatcctatcaaaaatctttgtgaaatgtgtttttgaaaaaaatttcccggtgcttgtcccctacaaaattcctttcaaatgtttgcaaaatagtttcatcaaaattcccggcgaaatccccttgcaaaactgtgttttccaggaattttcggactttccgaaaaattttcggaccttccgaaaatttcccatcctgtcgctcttctattcatgctattccaggatttttcggactttccgaaaaattttcggatatatccgaaaatcatcaaaaccgtgtgcttcccctctagatccgttcggacttatccgaaaattttcggaaatgtccgaaaatttcggggctcatatattttgacccgtggactcctctctctctctctcttcctcactttttcccaacgggtttgactccctcctccactccgcaccggcgaccccattctccggcgacctcccgcggctcccctcctctccaacattgtgggagcgcgtttggggcacttattgggacttgcgttgtcgatcatcaccgcgttcttcaagtgttcttcgtgttcttgaggtatccgccctaaaatcaaatcctttgattcctcaagttttatcttgtgattccctttggtggagatgttcccctagtgccctaggacctgcagattcattttcccaagtttttgttggcggatttgtgctgcatccggatgataaggttcggccggatttttccggaaaatccgaaaattgtttccggatatatccgaaaattcctggccgacccctatcacctcggttttgcacgattcttgccttcacttacttggtccttgcttctttggcttccattcactgattcattgtctatatcttgtttgaaggatgcctccacgcaagcaaacctcccacaagtccaagcaccaaagggaccgctctcccaccccatcctctcatgatgatttggacagtgattggtccgggagagaggatgcggttcctcaggttgcgcgtgtggcttgggccgacactctccctcctcggcggtccactcaagctcttggtggtggtggtgatggtgagggctcctctcatcaaccgcaaacaccaccgcaccaacccaatgtccccacaggtccttttcgcattcatacacccaagagggatccggcggtgattcgccaagtgtatgattggaagcggaagactgaggttgttgctcctcgccgggatgaggatccgcgcccccttcgccgcaccgccacggattcgcggttttggactctctttcaacaagactttgatgagtctgtgatcaagtccaaagctcatcccaccgttcccatgcaatggatcaactaggaggagctgcaggcgcatgatgatccggtgctaaactttgtgattgcaaattgtgagctcatgggaattcgctctttcgtgactttgcagcagaattggtgcagcgaagtcatcgctcaattatatgccaccgttttctttgatccttattgtgccatgcattggatgacccaaggctcttactattatgtctcctgtccgcgatttgttgagatttggggttttgacgtctgttccttgctaaaccttcctgatatgcatgatcttcccattcctgccaacactaatctcctccctctttacactccaaatgatcctaatgtggtgttgggtaaagtcgacggtctcaaaccgtactttgcctgcttgaaccggatgttttgccggtcctttgtgcctaaggatggtgatgccagcagcattaaccacctctccaggaccgtacttctcaggttcaatcccctcctcatcgctttcatgttttgcactttgtgtgggaggagatccgcatggcctccattcagtacaagaaggggttggtctatgctcctcacattatgcggatgatcgagactgtcactcagcttcagtttcatcatgatgtgactcattcccagcttcaacttgcgccttgttaaggcagtaaccccgacaaataaattcttcaaacacccgaacggaaatattattgaaggatttgggattgtacaagatgtacctgtctgctttgaagacaaggaggcagtcttggatttccacgtctttgtgaaagtgcgactaggcccctagtgattttggtgattaattacaatgcgattagagaggattaaaatttttattcacgtaaatgtgaaggttgttatgtcctcaatgagttaaagtaatgcatttcccacccaatgcattgacatgatgtgatgcggcaaatgagcaaatgctatattgtaccttttcttttccttgagttaataggaaagccgcactattaagagggatgatgcattgacatacgaggagtgatcaaagtgctcaaaatcaatttttaaaagtgtttctccttagtttggtgtgttctggaatttttttggagttttccgaaattcattttcggactttccgaaaatacacagagccagtttttcgcttctggaaattttcggatatgtccaaaaggcattttcggactttccgaaaatgactgagaaggcaaatatggttctgcatattttcagacttgtccaaaactgattttcggattttttgaaaaacatcaatagagtcttttcgcttctgtaaattgtcggagttttccgaaaggaattttcggacttttcgaaaatgtccagaagggtgtttttggttctggaaatattcggacttgtccgaaaagttttcggaatgtccgaaatatcttcagttaactttactgtcggtgccgagctggaattttcggacatgtctgaaagagaattttcggacatgtccaaaaatctttcggaatatctgaaaatcacaattattgtgcataacgggcataatttaggctgtggctataaatagccccctcccctcacttgtgagggctgctggtcacattggagattcttgtgctcttggcttgctcttgttgagattcacttttgagccttgcttttcttgtttcccctctcacccgtgttcgattcggatttggtgtgtgtgagagttgtggattcgagtttgtgtgagtgcttgttgttgacttcgtgaagatttgtgagcacttgcatcatctccaggagttcattgcttcatttgttactcttggaggctgaggactcctaggcggctaggtgtcgctcccgagccaccgatctacttgtgattggccgggagaagtttgtgatggtcagatctcacctccgaaagggaagagatacccttagtggaaggaggagtgcttagtgcaacctcttgaggaaagggttagctaagacccaactcttagtgagctcctcaacagagagtagaatccccttaaggatttgaacttcgggaacaacatcgtgagcttcatatttggtgactttacttcctccctctccactagctttgcttgtttgaaccgctataggtctagttgctgtttgtgctagcatattcttgttataggcaactagatctaggatttactttgagtttgtgctgactccgaaaattactgcttccgcttttaattgaatttttgaattagcctattcacccgcctctatgcctaattgatactttcactttgaaatctaagattttgacattctaatcgggcttcccatttgagaaactcctaataaacatgccctgattagatagcctcaagataactttgggaggaaacgaattctcagttgcattctcgcgggcatggttcgccttgaccggctctctcctagagattgagtctgcggaggaggttagagcagttccccctcacgagtctcccgaggcccttctggaaaatgaagtccctgacttcatcaaggaagaagcggaacctagtgagactctcgaacttccaatcatggaactgccacctcgacctccgtttgagcttaaacctctacctgaaggcctacgctatgctttcttgcacaatgacagagaagcccctatcataatcagtgacaagctttctgaagacgagactcaacgtcttctgtctatgttagaaaagcatcgtgttgttcttggctattcccttcaagacctcagagggattaatcctgcactttgcactcatcgtatccctattgaccttgagagtactccctccagggaacctcaacaacgactcaataatgcgatacgagaggttgtaaagaaagaggtcctgaaactcctgcatgccgggattatttaccccataccatacagtgagtgggttagcccagtccaggttgtgccaaagaagggaggaatgatggtcgttgcaaatgctcaaaatgaacttattctgcaacgaaccataactggatggaggatgtgcatagaacaaggctacgaaaaaggatcattttccgctacccttctttgatgaaatgttggaacggctggcaaatcattcctttttctgtttccttgatgggtattgcaggtatcatcaaattcccatccatacggaggaccaaagtaagactacgttcatatgtccgtacgacacatatgcttatcgtaggatgtctttcggactgtgcaacgctcttgcatcttttcaaacgtgcatgatgtctattttctcgaatatgatcgaggacattatggaagtcttcatggatgacttctctatctatggaaggaccttcggtcattgtctgcaaacgctcgacctctgaccaacctgttagccaaagatggtcccattgagttcgatgacgcgtgcctaaaatactttgaaattctcaaaaaggcactcatctctgctccaatcattcaacctcctgattggactctgcccttcgagattatgtgtgatacaagcgatttcactgttggcgcggtcttgggccaaaccaaagacaaaaaacatcatgcaatctgctatgctagcaaaactttaaccagagctcagttgaattatgcaactaccgagaaagagctgctcgcgattgtttttgctatcgataagtttagatcttacttgatgggacgtaagtgataatttacactgatcatgctgctctaaaatacttgctcactaagaaggatgctaaaccacgcctcttaagatggattttgctgctccaagaatttgacttagaaattaaggataaaaagggagtagaaaattctgtagcagatcatttttctaggctgcaaatcactgacatgcaggaataactgataaatgatttcttgagagacgacatgctgatgacggtacgtgactccaacccgtggatggaaacatagtgaactacatggtatcaaaatacataccaccgggagaaaatcaaaggaagttgaaatacgatagccgccgtaacatatgggatgagccatacctatatagggtctgctccgttggtttactaagaagatgtgtgccgactgaacagggacttaagattatagaacgatgccatgcctcaccttatggtggccattatggcgcattccgcacccaagccaagatttggcaatgcggtttcttctggccaacgatgtatgaagattcaaaagaattcgtcagaagatgtccaagttgtcagaggcaaggaggaatcactgctcgtgatgcaatgcccctcacatacaacctgcaagtcgagatattcgatgtttggggtattgacctttttctaagtcatgtaactgcgagttgcaagtttattctggtggcagtcgactatgtctccaagtgggttgaggctatgttgtgcagcgctgcggatgcgaagcataccaagaagatgttgatagagatcatcttcccaaggtttggtaccccaaggatggtcataagtgacggaggttcgcacttcattgacaaaaccttttgagacctcctacgagacatgggagtgaagcacaacgtggccacaccttaccatccacagaccagcagtcaagcagaaacgtcaaataaacaaatcacgaatattgtgcaaaagacggtcaacaaaatgggaacaggataaaaggagaaattgccagactcattgtgggcataccggacagcatacaagacacccattggaatttctccctatcagattgtctacgggaagtcatgccaactccctgtagaacttgaggacagagcatattaggccatcaggaactggaatatggactttgaaggagtaggagaatggaggatgatgcaaattgctgaacttgaagaatggagagagaaggcatatcacaacactaagatatacaaagagaggatgaagcgctggcatgataagaggataaaaatcaagaaattcaagcaatgagacaaactgctgatgttcaactcgagggttaagcttttcggccacggaaaattgcgcagtaaatgggaaggaccgttcgacgttatcgacacctcttcgcacggggcaatcacactctgcgacgactcaaataacatatttaaggtaaacagttaacgtttaaaaatttttcatgagcctaatgaatctttagatgaagaagtggatattattgaattaatcgattatgaaccataatgatctcatctaaagcatgcttaatttcctgtaaaattgtcatttctgagcttagaataagtttgcttgagcgtgtgaaaattttggtagccagctgagcccactagggttcggccgaacccctggttccattctccttcaaagtccatattccattctcctgctcccaccagggtagcacccatcggccccaagtttgaatagcttcctctccgcgctcgttcgagtttgtctagatgcgcattcggaggtagaacttttggatcagcaccataagacccttcttcctcctctcctccatctctgcaactcttctctccatcctagctcacttccttgatttacaccctcaactcaccaatggctggcaaatccctgatgccatacattggctcctcctcaaactccacctacaaccttgaaggagaaacaccggcgaatcaagtcatcccagtggaaaactacacaatggaagggggcattcaccccttgctacggtgcccagctccccagcaaatatggagccggccggcaaactcactggttcggccaaaccaggggttcggtcgaacccgtctcggccccgttcggctccccgttcggcagcacgatccctctcccctcgtcatgtcaccaagaccaaaatccgggggtattagcctgcacgacgaacaacgacgggtgaactcagcctattaaagcgagacgtcttttccaagacgatgacaaggccactccgcctcctgctgagcggtatgtgggcaccctctacaccaaggcaggggatgaggagctccacaactacatcacacccaccgccactccatccacccccaaggaggattggttttgcattcggagagtgcgaactcccggcggtaggtatggtaaaggcttgctccggccgttgacggcatcggagaaggaggggcagcggaatcccgttgccctccacctatgacggtgaagcgtcatttgacgccccctccaattgtaagggcgcttggccaatttcaagaggaagaagtgaagtcgccggaaccctcggtccataagctagcggcacaagtgaagaagctccgcaaggagaacattgagcttagggaccgtaacgcagaactaggggtagagcttgctgagcttaggaataattttgatactcttagtcgcggttcatgcgctagatcaagcgtgcattcgtagagatggggaaggagaataagtatgatgctaattaaatgtctcctttctcatgaataaatgtaattggtgcttggtcatttattttccaatcatgtaagcacttgctataaataatgtgactcattggtgttaaccccaatgtttgccaagatttgtttttgttttgtttaataaagatcaggttttgaataagtgtgggggagatatcctagcttctgacgtgcacatactctgaaatttgctgaatatctaaacacctgaggtacactgaactctgcagggaattgcagaggaattgggtaccaaggtggttgggctgaacccaaccagtgctagtcccaatccctctcaattttcctaggtaagcaggtgagcacgtctattatctgtatatctccaccatggtatagtactagagctgtgaattcagaaattaattagttcaagcataattaaaaagataaaatttccaactaatgaaattcttcctatgattaatcttgtatatttattattcttagctgaacttgtacttgtgaacgaacatccatgtttagggaacgttatgcatcaaagtaattgttatatgtgagatggttaaagatgaaggaagttcttcaactgttgtcattacttatgggaatttgtttttcaaaataaaattttgttttaaagagctcattcctccaattgactttattttatacctaccaaggccatatgcaagtatatcaatgataaactttattatgcatatgactgcttgacattatattgagctttgtcaaatctatgtgactcatgttagatatcttttatactctcatgatcaaggggtcatttccatatatataattaagctaagcttctacactggaagttggcttcccacaaaaattccattaaaatatacacctattttaaactatgttttcttctcctagaaaatccttggaaaaaggaaagaaaatgagaaaaggagggaaaggcatggctataaaaaagagagagaaataaagcttgctctcaaaacattgagcatgatgaaaaaaaaatatgcatatagccatgccacttccacattcatgcaagaaaaaaaaatggaggaggtataggaaaaaaaaggagacacatttctttattccatcattccacaaaatatttcacttttcctttttccaccacatataaagacccttgatctaggagtatgactgataatcttcttgagtccatatatttggctttgcaatatatatgatgcatgtatgtcacacttttacccctaccaagctccatatatcagccttagaataggggtaagtttggcacatttttgccttggtgaggatccacaagaaaaaaaattatttacttgagtgacaagggataaggtcaatatgaggaaaagagttagtttgtgaaaattcataaaaatcccatgagtctgaccggagaagcaagaaggactggagtcgagatcattccatttattaattacccaagatggcaagtaaccactgttaaagttcacaggtgtaggtatggttctgaataatttatatactcgaattatatcttggagaaatttattctacactaacttttactccgggacgagtaaagagctaagtgtagggggttttgttggcagttattcaatgccaattctataccgccaacatctgcataaagtccagacaataaaacatccaacatagagtgataggtgttaaatctcacatatttcacaagtgttggtgtatatttgtatgcaagtgataaactctaaagttgggaggaaaatcatactaaagtgagagaaaatatgtatccatacaaggatggtttttgaacttcatcaaaataccatagaatcaacacaaaactccgagaaatggatagagaagaaccaggagaggagatgggccgaaggccaggccggaagggcccatgtcacgtcctgataaattcatcccgaaataaaaatcattctctaaaaggaataatagaattaattaaaattcgaaaagaaattggttaacactaaaatatgtacaagaaaaattcgaatgtggcccggagaatttttgttaaattctccttggtctaaaatgagccctcaaattttacttgaattttcagagcaccggaaatatttattaagcaacaaaaacaattatcaaagtttattaaaaaaaacggtggttgtactcattcttgctctatctttccccccttcagtaagagaagctttggagaagaagtcttaggtggagtcctggcttataccccagttgagcgcctgtgaagatggagccgtaggcctgctagtccgctgctgtttatttttgattgtcaggcctgaagtgcctttgtaataatgtaaatattatcgatataataaagatgtgccttttgtatcatgtttgtttggtgtaccccggcttttcctgggacggggattaatacactagcgttcgggaaaaggcaattttctcggtcgcgacaagctagtatcagagccatctcgactgtaggataagccaagtggataaaacctaaggacatattttataaatgaaactatttgcgaaagttccttgttcctcctttccctaatgctatttgcaaaatgtttattctcttcttcctccttcggattttcaactagtactagatggttagttttgcgaa

SEQ ID NO: 26745 - DNA, 3263 bp, Oryza sativa
catgttggcaacagcatttcaactattacaaaattggaacaacccagcaggggcaaccaacgttcaagtacctacagtctagcaacagtacaagttattagaatttctcaaaactgagcctccaacctttgccattgccgtcgatcctatgaaagccagtgattggttgcgcacagtcgagaagaagctggggttgattcagtgcacagaccaggagcgggttggcttcgcaactcatcagttggttggaccgacttcagaatggtgggatagctacgaagcatcacggccagaaggacataccatcacttgggatgagttttcatctgtattcaagagatcacatgttcccgcaggaatgatcacactaagaaaacgagagtttcgctacctgaagcaagaagatttgaccgtgacagagtacctgcacgagttccatcgtttggctcactatgcaccagaagatgtggaaacggatgaagacaaacaagagaagtttctccaggggttaaaagatgaggttgcagtgcaactactcctagaggattatgaagattttgagaaacttgtggacacaagccatacaactcgaaagtgatcataatcggatgaagaactgcaagagaaggattgtcaacatcccagtatttccacgtggtaaccaaagatagcgcattgagccacttcagatcaccggatcctctgttgcgcatcaagagttcctaccccaagaagatggacacaatgcagacaacaacattagcaatactaatgctgatgataccaccaacaaccatggttcttgccccattagggaccactcggatcaagcgtgcgatgtcaatagcattcaccaagatatcgacgatagtatcaatgaaggcacccagaatgacaaccctagcaattttgactctgagaaagactccaatggtgatagcaactatggtaccactgatgccaatgttagcaaggatttccaaccaccaattccaactccaagtcagaatgatcgttcccagacgaacagctcagtaaagaagacattgatttgttacaattgcaaagaaccaggtcatttctccacagattgtccacaaccgaagcgtaacctgcgtcatcactccggccattatgcaagaagaagacaagtcactcgccttgtggtcactggagcaaacgccatacctgtgaggcctcgtgctaatcataacccatagcagaaacaatgtaccgatgctaagcacctttccttttttttaggcagtgcttagtattcatgtaataagggagaaatgtataatacagacaagatctatgtggattcttttggaagatgcggatatgtgattatgtgcgtaattgtttactgacaaaggagacctagggtctcatatccgtaagctcataatctatgataaatcaagtaacctagttgttgatagaaaagaaaatgaagcgatctgtgttagattaaaaagccaaagagacttttgtttggactaagagtttcagatgtgtcttctttggatcaaaggcaacaaccgccagtctagcttttgatgaaccacttgaaggtttctctgaaaggcagcaggctcaagtaccacatcgtcaccagaagcatccacaactctcggagtgaagagtacttagttgacaaaggtcaaaagatgattgatagaagatatcgaaaaagatgtttattaccgggcaaagaagtaggtcgaaacgtgattgataagagaaatcgggaaagaacacatcaaggttaaaggtgtaaaggaatacgttgaatgctaactgaggacaacatgaagagaatagtgggaagtgaaccaaatgtaaagaaagtgaatccgagttgcttgttcgtgagagctattcccagttatgaaccaagtgatatgttcaaagataatctacagagtcaagattaaaatcacatccaacaaagaagtttcagatttggcaggtcaataatcagaaaaatacaagtccaacagtaaagacatttgggaagacgtcaaagcatgtcgagtgggataagttggttctcttaagaaacataattcaaagttagaatggtcgaccctcgcagcgaatagcagaagtatctagcactcggagaccaggaaagctaaaatgaggcagttagtggcaagttgtcaatcttggtacccttggtaagtgggatatcatagtcgaatgcatttggtggtaagctagaaggaaacgccaagcatggtattctcatgatgacaagcatggtatcctagtaatgacaagcaggtgtcgacacatgacatgaagttgataacttgtgtgaggttgacgccgaagatatgaatcatgagaagttctggaacggaagcatcattaaactaccgcaacctagtctaagtaacctaaaaggtgcaccctggttcgagtcaggtgaagagaagattccatccgcaataggaggtcaagccaagcagttccgagtggtgaagttttgctggaagtttgtgaagacgcaacagaagaagtcagacaagaagagaagaccgcccaacctatcttcttgctagcctcctcgaatctcggggacgagattcctgtaaggggggtggatttgtcacgtcctgataaattcatcccaaaataaaaatcattctccaaaaggaataatagaattaattaaaattcgaaaagaaattagttaacactaaaatacatacaagaaaaattcgaatgtggcccggagaatttttgttaaattctccttggtctaaaatgagccctcaaattttacttgaattttcagagcaccgtaaatatttattaagcaacaaaaacaattatcaaattttattaaaaagaaaaacctaaaagtaatcccccttcctcctttgggccaagtctggcccaaagtcccctctctctctctctctcggcccgcagccaaagtcctctcttcctccctctctttctctccctctccttctctccctccttctcttgggcctccccttccccctcggcccagctcccttttcctcccctcccgcctgggccgcgtctcggcccaagccgccccacccagccgccccagcctcccgagccgccccccctcacgcgcgccgcacgcgcgctgaccgcgcgcccgcgtggggcccacgcgccgggtcgtcgtcctcctcccgcccgcctcctctctctctcccggaaacctagcgccattcctccccaatatccacgcgattcaaaaattgattagg

SEQ ID NO: 26746 - DNA, 7493 bp, Oryza sativa
cccacttgattcgtgccctctaacacccggaacggccgcgccattcccggccgccggccacatactccaccgccgttccccgctcctcccctggccggctccctccccgcgcctataaaatggaatccccatcctccgttctatagttttagcctcatcccgagcctccccatggtcgtatcacccctccccgccgtcgcccttctctttcccccgcgccggccgcctccaaccgcctgtgcggccgcgcgtgagcgtcggtcggccgtgccgtcgcttccctcggctctgtgacgccgccctcttctccggcctcacctcctcctcgcccgaagctcgccagagcggtctccttgtcggtgtccagtaccttcctgcctccggccggctactgttcctcatcggtgcggcagccgtcgtcgtcatctccttccccggctccacggcgtcaccctccaccccgaccgctgcccgtcttcgtccggagcccgccgccgccgtgccggcctctctttcctcctcgtcgacgtcgccttcggcagccccttctgccatccccgtgcgccgtcggccgtgccaccaccacctccggcatcgcagcggcgagccagcgacgtcgtcctcggcatcgcctcctctccatcctcgtcatcgccgacgtcccttcggtcggccgctcctcctcgccggctcctcgtctcgttgtgccgccaacatctctgtctggtgttgggaaagttgcgggaacatcaattgtatgccaagcttagcaagtgtgagttctggttgtccaaagtcaaattcttagggcatgtgatatctgctaaaggagttgctgtggaccccgaaacagtgaccgccgtcactgattggaagcaacccaagacagttactcaggttcgcagctttttgggtttggcaagatactaccggaggttcatcgagaacttctccaaaatcgctcgacccatgacacagttgttgaagaaagaagaaaaatttgtgtggagcccgcaatgcgagaaggcgttccaaactctcaaggaaaagctggtttcctcgccagttttaatcttaccggatactcgcaaggacttcatggtgtattgtgacgcttcgcgccaaggattggggtgcgtgctcatgcaggaaggtcatgtggtagcctatgcctcacgccagctacggcctcatgaaggcaactaccctacccatgatttggagttggccgctgtggttcatgctctaaaaatctggcggcattatctcattgggaatcgctgcgaaatatataccgatcataagagtttgaaatacatcttcacccagtcggatctgaatcttcggcagagaagatggttagagctcatcaaggattatgatgtgggaatccactatcaccctggtaaggccaacgtggtcgcagacgcgctgagtcggaaaagccgttgcaacactcttggcgtccgtggcattccaccagaacttcatcaacagatggaagccctgaacctaagcatagttgatcgtggattcttggctacgctggaagccaagcctaccttgctcgatcaaatccacgaggctcagaagaatgatccagatatgcatgggatcctcaagaatatgaaacaaggtaaagccgctggtttcacagaagatgaacatggaaccctatggaatggaaatcgtgtatgcgttccggacgacaaggaacttaaacagctgatacttcaggaagctcacgaaagtccttattccatccatcctggcagtacgaagatgtacttagacttgaaagggaaatactggtgggttagtatgaagcgggaaattgcagagttcgtggccctttgtgatgtgtgctaacgtgtcaaggcagagcaccaacgaccggccggacttctccaacctctccaagtaccagaatggaaatgggatgaaattgggatggatttcatcaccggacttccaaaaacccagggcggttatgattctatatgggtagttgtggaccgacaaaccaaggtagctcggtttattcctgtgaagaccacctatggagggaacaaactagctgaactctacttcgctaggatcgtgagtctccatggcgttcctaagaaaattgtatctgataggggaagccagttcacctatcatttctggaagaagctccaagaagagttgggtacccgcttaaatttcagcaccgcgtatcacccgcagacagatggacagaccgggcgtctaaatcagatcctagaagatatgcttcgcgcttgtgtcctagattttgggaagacatgggataagagtctcccctacgccgagttctcctacaataacagctaccaagccagcatacagatggcaccgtacgaagcgttgtatggccgcaaatgccggacaccactattgtgggaccaagttggggaaagccaagtgttcgggaccgatatcttgagagaagctgaagcgaaggtcagaaccattcgggagaatctaaaggtggcccagtctcgagagaagtgttatgcagacaaccgacgccgtgacctggaattcgcagtggatgactttgtgtatctccgggtcacgccgttgcgaggcgtacaccggtttcagacgaaagggaagctcgcacctcggtttgtgggtcctttccgtatcattgctcgacgcggagaagtcgcttaccagttggagctgcccgcctccttgggcaacgtgcatgatgtgttccatgtgtcgcaactcaagaaatgccttcgagtgccgtccgagcaggccgactcagagcagattgaagttcgcgaagacttgacctacatggagaggccagtgaaaatcctggacaccatggagcgcaggaccaggaactgggtaatccgtttttgcatggtccaatggagcaaccacgccgagctccggtccaccgccgtcttcgccccggaccgtttcccgccccggcgtcacctccttcggcttcgccgcaccgccgtcgaccccgtccaccacctcgccgagcccgccgaccgccggaacgccgtcgaccccgtcgacccgagccgcgccgccgccttcctccgctccggccgcctttttcgtcgtcaccgtcgacctagggtgagccgtagaccgccgcctcttttccccctttcctcccctctctcgaccgccgctccgccgcgccggtggtcgccggcggcgaccatcggggcgcgggggcgccgcctcccgccggccgcgccgagtggccgccttcgggcgtgccgagtggccgccacgtggggcccggccgtcagccgcccgtgccctcgggtgcggctgacgcgtggggcccacggcgccggccggtgcgagcccaggtgcgcctggtccactgtggaccgtgaggctgccacgtgggccccactcccgtggacccggtccgcacgcccctcccctcggctgacgcaataaactctttttaaattaaaatttaaatgaagaaattcgcaaatattcatttaaagagcatataaacttcaaatggccataacttggccatttaaactcagaattggaccgttcaagtctctaatttttccttaagaagtcaagaacccatttttgtgctttgttcctgcttgttatatagagtttattagagtaaaagccttttcttttccgttggtcgtgtagacgctgcagcttcggaagatccgctcttcgtggaggttgaagccgacgtttgggaaagcgagcaaggcaagtcacatcatccttgaacatattgaatcccagtttataaaattattttgatttaaattattgcattatcgctttatttagattcccacgttatctctgttttatttagccatgcctatttacctttgttatgaccttattattattgttattgttattattaccttgttcaccctagattaaacaaaaccccaactagtggacactctgctcatggtaccactagtatgaatttaggtagatgcttcgccgcttaattaggtaacattaggtggttttacaactctagactttgggatattcatatcacctggatactatggaatggttggattattgtggaattggattcacacctccccctctattcaaaatcctcaaaatggttttaggctgggctcggggtgcatggttttgatagtagcacctcggccatataaggaccggtcttcgggcctctgttgcaaagcactaccgtacttgcacatgtctagtgggtaaggcttagtttgtggctcagtctggttataaacaaaagtacacagatggagatggacgaagtcgggggtcgatggacatctctaggacaaatgaaggctacacgagccgcgacccggtagtcgagatgtcatggcacagggccggtgtcctgctgctagggactcagtcctgcctacctgtcccgggggttccggccgtaggtggggttgggtcggtactcttgtctatggctaggatgggttggaaactatgtcacgtcttccgtccgtataccgtggtggtatgtggcacgtggttacacgtgaggaagatgtgtcttgtgggtaaagatgtacacctctgatcagagtataatctattcgaatagccgtgccctcggttatgggcaagccgagtaatgtacccaagttagtgttttaattcttaaaacctgcttaacaactaaaatgtggaatggttggcctgggttggcttgggacgagctgggacccagggtcgggttgccagttcggtctgaatcatcgtaggccttgggttaaggcaggttcgtgtggcttcacggccttgtttaataatcttgtatagctctaggatcgtatttacaaaatagctttgagcaactaagtgtcttttaatgctgtttactgcaaaccctaaccctttatattacaaccccccttgtactcccttgcatttattctgcacttatgggtgtgtcttgttgagtacggtggttgtactcagtcttgctcaatttttcccaaactcagaagaggaattcctggaagatgaaggctttggtgtctagctcgtgcctgccgtcaagcgcctgtggtcgtcgccctagccttccgctgtttcccatttgtctttgtgtgtgctgggccttcgccgcctatgtaataaattaattaattacgcttcagcttgttaaactctgagttgtatcaacttttggtgtaccttgcctcctgggacaaggaataatgcacgcacgtaaggaacgcccgttgggttatttccggtcgtgacatgtggatatgcctagctctagctctagctcttgtgtttctatttgtgatgcctcacttgttgttgagaacaatgagcgtaaggagcaagtggccaagctcaacaagagtttggagaggtgcttcaaggataagaacactcttgacaagattttgagtgagcaacggtgcatccttaacaaggagggacttggattcatttcaaagaagggtaagaaaccttctcactgtgccactcgttttgtcaagagcaatggtaagtattgctccaagtgccgtgaggttgggcatttggtgaatgattgccccggtggtaagccttctatgacatgcatgtttgattctcattatatgcttaggaaggctcatgatggtagcattgttgctagatatgtgggttcccctatactcagtggtaaaaagaatgccatttggttgcccaaagttttgatctctaacctccaaggacccaaacaagtttgggtacctaaaagaccttgatcttcttttgtaggtgaactaccgcaccggttggagtcattgggtgcttgatagtggatgcactcaacgcatgaccggtgatagggctatgttcaccacatttgaagtagaagggaaagaataagagaaagtgacatttggagacaatagcaaaagaaaactaattgggttaggtaaaattgctatctccaatgatttggcaattgataatgtctctcttgctaaatctctaaatatcaatttgctttcggttactcaaatttgtgatcttggcttgtcatgtgctttcttcccacaagaagtttttgtttctagatatggaaatctttatttggttgatttcaattctagcgaagcaaatttgacaacttgtttaattgcaaaaacttcattgggttggctttggcataggaggctagcccatgttggcatgaatcaattgagcaaactttcaaaacgtgatctagttgtgggcttgaaagatgtgaagtttgagaaagataagctttgtagtgcttgtcaagccggcaaggaagttgcatgttctcatgctactaaaagtatcatgtccacatctagaccattggagctcttgcatatggatttgtttggcccaacaacctatagcagcattggtggaaatagtcattgtcttgtgattattgatgattattctcgctatacttgggtgttctttttgcatgataagtctattgttgtcgagtgtcacgtcctgataaattcatcccaaaattaaaaatcattcgctaaaaggaataaaagaattaattaaaattcgaaaagaaattggcaaacactaaaatacgtacaagaaaaattcaaatgtggcccggagaatttttgttaaattctccttggtctaaaaagagccctcaaattttagtggaattttcagagcacaaataataattattaagaaataaacaaagttaaaatgattttataaaaagaaaaaccataaaaagtctttttcccccccttcccctcttgggccggctcggcccacctccctccctctctctcctctcccccgcggcccaatcggcctcctccccgcgtgcgtgccgctgacgggtgggcccgcccgccaccctcgctgacgggtggggcccacctgtcatccctgtcctcccgccgctcccgccgcctcgcccgtgccctagcgccgccgccgccgcgaatcccgccgcctcccgccgtccccgcgcgcaataaagagggggaaatcactccccgtgattccctctctctttcccccctcttttccctctctctctccctcggattcgtttggaatccctcccgaaatcttcgccggcgcatcaatggagcccgagatcgccgcgccgatttccttcctctccggccgccctctctcactcccacccctatttaagcactccccgtgcctccctcctccgtttccgccactcgccgctctctctctccgccggaatcgagctcgcgccgtcgtcctctctctccgccgtcgccgccgagcttcggttcgccgccgtcatcgccccggacctcctcccgcttcggcatcgcctccttcggcttcgccacgtcctcgtcgacctcgtccactcctccgttccgcccgccgaccgccggagcaccaccgtcctcgtcgacccgagccgcgccgccgcctctctccgcttcggtcgccgttcccgc

SEQ ID NO: 26747 - DNA, 11845 bp, Oryza sativa
ccgctccgtcgcgccggaggtcaccaccggcgaccatcggggcgcgggcgcgtcgcctccagtcggctgtgccggcgaggccgccttcgggcgcgccccgcggctgccatgtggggcccggccgtcagccgcccgcgccctcgggtgcggctgacgcgtgggacccacggcgccggccggcgcaagccgcgtgcacccggtccaccgtggaccgtgaggctgccgcgtgggccccactcccgtggacccggtccgcgcgcccctcccctcggctgacgcaataaatccgatttttaattaaaatttaaatgaagaaattcgcaaatatccatttaaagagcatataaacttcaaatggccataacttggccatttgaactcggaattggaccgttcaagtctctaatttttccttaagaagtcaagaacccatttttgtgctttgtttctgcttgttatatggagtttattagagtaaaagccgtttcttttccgttggtcgtgtagacgctgcagcttcggaagatccgctcttcgtggaagttgaagccgacgtttgggaaagcgagcaaggcaagtcacatcatccttgagcatattgaatcccagtttataaaattattttaatttaaattaatgcattaccgctttatttaaattcccacgtgatcactattttatttagccatgcctatttacctttgttatgaccttattattgtgattgttattattaccttgttcaccccaggaaaataaaaccccaactagtgggtactctattcatggttccactagtatgaattagggtagatgcttcgctgattaataggacaacattaggtggttttataactttagactttgggaattctcatatcatttgaacactatggaattgttggattatggtggaattggacatacccctctcttcctctttcaaagcccctaaaacctgtttttcggtggggtttgggtgcatgccagttgtgggaagtagcaccccggccactataaggattaagctcgggcctctgttgcaaagcactaccgtacttccacatgtctagtgggtaaggcttagtttgtggctcagtctagttataaacaaaagtacacggatggaggtggatgaagtcgggggtcgatggacattctccagggcaaatgaaggctacacgagctgcggcccggtagtcgagatgtcatggcacagggctggtgtcctgctgctaggggctcaatcctgcctacctgtcccggaggttccgatcgtaggtggggttgggtcggtactcttgtctatggctaggatgggttggaaactatgtcacgtcttccgtccgtataccgtggtggtatgtggcacgtggttacacgtgaggaagatgtgtcttgtgggtaaagatgtacacctctgatcagagtataatctattcgaatagccgcgccctcggttatgggcaagccgagcaatgtacccaagtcagtgttttaattcttaaaatttgcttaacaactaaaatgtggaatggttggcctcggttggcttgggacgagctgtgacccagggtcgggttgccagttcggtctgaatcatcgtaggccttgggttaaggcaggttcgtgagggttcacgaccttgattaataatactgtgtagctctaggatcgtctttataaaatggctttgggcaactaagtgacttttaaatgctgtttactgcaaaacttaacccctatattattatccccttgtactcccttgcattaattatgcatctccggtgtggcttgctgagtactgtggttgtactcattcttgctcaatcttttcccccttcagtaagagaagctttggagaagaagtcttaggtggagtcctggcttataccccagttgagcgcctgtgaagatggagccgtaggcccgctagtccgctgctgtttatttttgattgtcaggccttaagtgcctttgtaataatgtaaatattatcgatataataaagatgtgtcttttatatcatgtttgtatggtgtaccccggcttttcctgggacggggattaatacactagcgttcgggaaaatgaaattttcccggtcgcgacatcgagcttttcaaaaagtttgcaaaaagggcccaaaatgaatttaattgcactcttgtgaaaattagaagtgacaatggttccgagtttaagaataccaatatcgaggactattgtgataatcttggtataaaacacgaactttccgctacctactcacctcaacaatatggtgtagtggagaggaaaaatcgtacattgattgagatggcaaggactatgcttgatgaatatggtgtttccgattccttttgggcagaagccataaacgtatacacaccgctctttccaagagtcactcaattgaccaagtgttgggtgacattactaagggtgttcaaactcgatctcatgtcgatttgatttgtgaacatgacttgtttgtttcttgtcttgagccaaaacatgtagttgaagctctttgtgatccggattggatgaatgctatgcatgaagagctcaacaactttgcaagaaacaaggtgtggactttggttgaaagacctagaggccacaatgtcatagggacaaagtgggtctataggaacaaacaagatgagaacgggttggtggtgagaaaaaggcaaggttggtggcacaaggtttcacacaagttgaaggtttggacttcggtgaaaattttgccctcgtggcaagacttgaggctattcgcatccttcttaaatttgcatcatgctttgatataaaactatttcaaatggatgtgaaaagtgcttttctaaatggtgaaattgccgaacttgtctttgttgaacaacctcccggttttgaagatcctaaaaatcctaaccatgtttataaactctcaaaagctctttatggtttaaaacaagctcctagggcttggtatgaaatattgagagattttcttttgtcaaaggatttcaaaattggaaaagttgacaccacccttttcacaaaaattattggtgctgatttctttatgtgtcaaatttatgttgatgatatcatattcggttctactaatgaggtattttgcagggaatttggtgatatgatgtctagggaatttgagatgtccatgattggagagttgagcttcttccttggacttcaaatcaagcaactcaaggatgggacgttcgtgagccaaaccaagtacatcaaggatctactcaagaggtttggtttggatgatgcgaagcccatcaagacacctatggcaaccaacgggcatctcgaccttgatgagggaggtaaaccggtagacttaatgctttatcattccacgataggtagcttgctttaccttaccgcatataggccggatatcatgtttagtgtttgcatgtgtgctcggtttcaagccgctcctaaggagtgtcacttagtggccgtgaaaaggattctaagatatttaaagtattcctctactattggcttgtggtacccaaaaggtgctaagtttaagcttgttggctatttcgattcggattatgccggttgcaaattggatagaaagagcacatccggtagttgacaaatgcttggtagatcccttgtgtcatggtcatccatgaaataaaactccgtagccctctctaccgccgaggtggaatatgtttcgaggggtagttgttgtgcccaattgctttgggaaacaaaccttgttggactatggcatatccttcaccaaaaccccactcctatgtgacaatgatagtgccataaagatagcccataacccggtccaacattcaagaaccaagcatattgacattcgccatcacttcctaagagaccatgtttccaagtgtgacatagtcattagccacataagaaccaaggatcaactagccgaaatctctaccaagcctcttgatgaaacccgcttttgcaagttgaggaatgagttaaatgtcatagatttctctaatgtggcttgagatggtgcaccatggttgcttcttttgcagtgtgtatatttgctctcattcgcgcttatgctttggaattattgccatttggttcttcattgcaaaaatggagcatgtcacattaagggggagttttgcactcttgcatgtgctctacttccttttatatgtgagcaaatcaactagtgctgctagtagtatttccaacatgcccaagtcaacataagtcaaaacttttgcaaaatcaaagtaatttgaaaactatctcttggaaaatgtttcaaaaggttccctatatgttttccaagcctcacattgcaagaaaaattatttttgaatgaaaatgccattttggccctcttttgaagacactagattcttagttctggccaaaatgaaatttatcccccaaattgagattgagaaggaatttgagaaaagtttcaaaaaaaaattggtagagaggaggttttgaaatgtttttggtattcaaacctatttcaaaaaccaaatcaatcaaaagttatttgaaaaccaatttggcgcaaaatcccctatagaccataaaaggtcacctcctagcacttaagtgagttttgttgcaaatcatcataatcttcaaatattatggatggttcacaatatttaaactcacacatttcaaaatttgctccaaaaatcaaatttttattaaatttcattgtgtgggggttgccggcttgtgcaagggctgtgcacagccagctgggggcctggcagtctgaccggcgctatatgcgcggtctgaccggccagctgtggtggtctgaccggccacatagggccagtctgaccggccgaggtgggcccagggaatttttattccccctcttcttctacccgcacctacctctctccttctcatcccctcacttccccatctcgaaatttctaactctctctcacctcccctcaaaccctaactccttcctccaccaaatcccctcggtttgaccgtggatttctctccggttacactgtaagtgactctcctccgcttccactctctattccatggattggtttgtatttttgttgagtttttgatccatggcatggaaccctaggtgaagcacgaggtgttcttcgatttgcaccaatagagggtagtttcttggtgtgattcaactcctccaaccggtaaatctctctccctctggtgcattgctctcaaatcggtctatttcaatctctagggtttagggtactttcccattgttccaatcttgatgaaataggttcaaccctttgatgttcatgttccaatcctgtgctatattgttctagcaaattttagactcaaatgtgtagatatgaaaatatttggatgcttaaacttgtgggaggaggtctgcctggagacacaagcggtttgaccatgggtcagccgccggtctgaccggccggcagccgtcggtctgactggccaccatgggcggtctgaccggcctgatgccttcggtctgaccaccctactggctgcggtctgaccacccctccacaggatgtaggcaaatttttacctctccaaattgtttctagaattattgctaatatcctatcatcctttgttctttgacagtgatgcctccccgcactcgccatggtcaccgtacgcccactccggatcccgtgagtgagactgaggaatcgagcggagaggattacgctcaaagtgatgaagaggttgaagcaaatattgagggggctagtgaggtggcaagtggagatgatgtcagtggaagtggagaggatgaggatgaaggaaatgatgatatgcacattgatcccttcatccagtttgtggtgaacatgaggaatccatcgcagtataccatcttgaggcatcatgatcagttcttgaggcctcgagacaccctggatccccgttttcacaccgctttccagaagactgtgtatgaacaggtttatgcagggaaagcatttgcaaagcataagtggatttcttggagagacatcaatgagactccagagtttgagagcttgcaggatctcttcaagactgttggtattgaccggattgtgaccctcaagcaagactacaatgaatatttgatccggcagttctatgctacagtgtgggtggctggagactatagtgagatgaagtggatgtccaacaccctccagtgttctatctctcggaggcaattccggcggctcctcaatattcgcttggactttggagatgatttgcatgaggagcacactcacaattcactctccatagactatctctctcagttttatgaagattgagtgtggtacacacatgggaaggttgccggcttgaggactatcccagtgtggttaacaggattgtgagagctaccatccttcctcgccttggcaacaatgatgacattaggggggtggcttggcacgtcatcgatgcaatcattcagggtcgtcagttcgacattgtgtctctcatgatgcaagagattgccatctccaaggggaccttcactcagggaatctattatgccccttacatcatgaggttgattcaagacaagcttggggctgctgggcaaaatttgaagaagcacaagcagtacaagccccgccttcagcttggagctccccgtgctcctaggacggtgccctcttctcatcctggagctagctcaagctcagcacctcctcctcctcctgagtatgatccaaatgctttcttccatccacagtttgcttactttggaacgcaacccaatgaatacttcaacccggtacttggggctattaataccctaagtgaaagcattcaacgcttgtctaccgggcaagaagcattgcatgaggatgtttgtggcttgcgcaccgatgttggagacttgaatgcttccatggggagattgcacactagagtgggtgcattggattctcgagtccaaatgttggagagcacccaagcttttctatatcatcgtcttcctgatgctcctcatccttcctcttcggcgcgtcctccttctcctccacaagaatgaagacctttttggtacatgatgccaaaaggaggagaaagatgtccttaggtgtgctttatgtcttgtgggttgggactagtgctagtaaggttagtcacctcatatttaataggttaaggtagtttgtgctatattatgtatggatatgggctattactctatattgtgtgttctttatcgttttgttggactctatgtcatttggacccttcgtggtcttgtaatagcctatgtttttttgtgagcccttttaggatgatttgtgacttatctgatttgaatggttaagtgatgtgaacttgtgtgatgatggatggtgtatgtgatattgatatatatgtgaccatcttatgctcatggatgaatatttcttgaagttcacattgaaatattgcttatgtgtttgtgcttgttgaaatgtgatattgaagtgtgcattggctccatatttgttgtctatgattgatatgcacacgtttagggggagcttttgattgtcattgcaatatatgtccatgtgttctatgtttgattatatatatttgtggtgtttgtcatcaattaccaaaaagggggagattgaagcatgtaggcccccgttgtaaattttggtaattaataacaagcactaattgtggactaaccgttgtctttgagctatatattttaagttaggtccacgtcatatgtgcgcatggatgattatcgatggattaaaattgacggcgcaaagcaaagggaaagaagacggtaaaactagtgctttaatttttgaattgatcgaggtgtagggcgattaaatttgctagtttatttttagtttcgccgtaggggtaatgacctagcaaagggatgattttaattgccacattaggtcattatgcatttagacttgtgctcacatttcatctcacacactcaatcacttttcatttcactgggttcggcctgacaggggcggtcagaccggccacacagtgccagtctgacaggtgtgccctggccgatctgaccggccatactacggaggtctaaccggcggcacatgcgcggtcagaccagcccgctggaggccgggatggtgctactcggggtggctgatacagagccgacggagccgtattcggtcagaccgagctgatggcggtctgaccgagccgaggccggtctgactagccactcaatgtcggtctgactggccaggccgatgggccctctgacagggctacaacggctagttttctagccgttgtagagtagcacggtctgaccggccacatacctccggtcagaccggcagagcacagagttgggggatttcgcccccaacggctagttttggttggtaggaatataaatactccccctccagcagcaagggggctctcttggcacctaattcaattgcatacatcccttgcacctctctcacacacccttgagcttagtgttcatccattgtagtggttgaggttgttctagccaagagtcaagtgcatttgcttccattgtagagctagtgtggcacttgattgatcatctccacgccgggtcattgcttgttactcttggaggttgccgcctcctagacggcttgtggaggagttgcccggtgacctctccgagaagattgtggaggaggcccggcgccgatttgtgagtggtctggagtacaccaccttcggagtgaaggaagaactaccctagtgatcgaggcttgggtagtcctctccatgggccggctcccgccttgcccaccccttgacgaagggggcgtgcggtggcttcgaggttgagcactggagttgggatcgcctcaacggggagtaggaaaccggcaagttgccgaacctcggtgaaaaatctcttgtctccttgtctcatttacttgttgcatttacatttgtgcaatttacatttctagagatcatttcaccctaggattgctaaacattgacataggagtgtgatttactttcctagagatataatagagccactatcaccctaggattgcaaaacataacttagttacttagttagagttgaccctcaccaagcctagcaacttaggttagtttcgattaggtgtcatttagttttaaatcgcctattcacccccctctagtcaacatctcgatcctacaataattacgaccatgaaacatgggtagatgtctcgagcacgcagctcgtcaagaaactaaatgtctaatgatgtaattatcccattttgtgagctagtggtaattaagcaaggctaagcatacatataattctagcaagatcaacataagtatcacgagctagataaattatcacccaaggttgacaaaggacagataacaagtaaacatggcacaagcgagcagataggtaaaccctattcccatgtaattggcaaaacatgcatatttatttgcaaacggtaaaacatttataaattgggatcaacatgctcaaggggaatgtgtgacttgccttgcttcttcactttgatcttccgaacacttatcctagcgaccgcggacttccgaaatggcgaaagctacacgctggcacgcaaaacaaggaaaaacactaataaacaccaagaaaacagtacataaaaagtaaacaaacatgtagatctatattttagatgaattttgcaagttgaatggctcaattcggagttcgtatgaattagaaatgaagtttagatgttttgagccatttaaatgaatttatagaattattaatgatttattgcgcaattattatttattttctcaaaggacaagttaagcgctgacgtcagcaaagggccggcgtcgacaggcgggcccacacatcagcggctccaaggggaggacacacggtggaccaagcccaccgcggcctaggcggcaccgtggacccggaccacgggactggtccatgggaccgacggctcggatcggccaagagccgatccaacggccaagggcggcccggctagggcacggcacggctcaaagccggccggcgagtggccaccggtgacgtgggacgacgcgcggagggcggcaaaagggagaggaggaggaggcggttctcaccgtgcgaacggggcggcgagacgaagacgaggaggcggccagcggcaaggattaggcggccgcgggctccccggggtggtggcgatggcggtgcttcaacgacggcccgcggcggatggaggccgggatttcctggggaagaagatggagtggttaggaaggaaaataggcaaccggagcggcgagaataccacgccggagagttgaggaatggtggggctcaccggtggccgagagataccgagctccggtgggtttccggcgatgaacaacggtgaccgaggtgctgcacggcgctgtgaggcaagaggtgagggcggagcaacgcggcgatggctaaggcgaggacggcacgcggctggaggcggcgtatggtggagctcgggtgatgcggtggaatggttgttccagcggcggtttgagggagaggagcggttgccggggtgctacgcgatgcggcgaagctgatggtggcagtggcgcggcttagcagtggctatggcaggggtggcgcgctgtcggagtcggcaaaggcggtggagagaggtggtgcgcgtggcggcattgtttcggatgctaacagaggaaatggagtaggggacggggcgtggaggagcgcggtgatgccagtggtggtggcgtgtggatggaaggtcgccagcgaggggcggcgatggggatcggcgcggggagagcgagggagggcgtggcgggcttgggaaaaatgggggaaacggataaggagagcacggggaggccggggagtggcgaatttggggcggcaacggccggcgacgcggagctcaacgtgggcggagtggggctcgatttgcgcgagggggagtcgatcgggccgagaagggagttgtcggcccgagagggaggagggaaggagagaggtgcgagcgggccaaggagggagaaaagatcatgggccaaaaatggcccaaggaggaaggggagatttatttaattgattaaatgaactttgtgacttttaaaattagatattgagctccgaaaattccgaaaattagtatatcagggcacaaaaaatattgcaaaatattctcggccaatgatttttaaaggaaagtttaattccctcaatatttcacttgattaaattgatttaacttttatttaatttctagaaaatacattattaattgattttaaatcccgaacgaaaatcggggcgttacaattattgttcaccataatcaactaaaatatagtgattgctttggtgaattataaacactaaagtagatattaattgctgagacatggtgtttagtttattgttatctagtaattgctgtgtatcccacagtacgtttgaggtaggttgttgacagctgttaagtgcacaaataacgccgtcaatacctacataaaaccataaatgtgaaacatccaacatagtggtaggatttatttctaacaatttccacgagtgttggtgcatattagtatgcaagtgatcaaccaccaaaattgggagagaatgagcataaagaatggaaatatattttgctctgatgaactcacatggttttaagctacaatatataaaatgtgcaatcatttgaagccaaaacatggagcatcatgaagtggggcccacatgtcagcatccggaagaaagatgtgggccatgggagccaaccagggt

SEQ ID NO: 26748 - DNA, 1246 bp, Oryza sativa
cgaacccctagctggcccagtccagcccatattcggtatgacgattgtactcctcatcccaatgatggttgtggccgtttctaccggtggaagccgtcatagagaggacacttgtcaagagaagataaagctagagggaatattctcataggatgcttggagcatctccactcccccaaggcaactctccacctataaatatccctctcctctccctcattcacacacaccaaagcatgagctgaattataagaggctctagtgtactttattgcatattagaatagggagagagtaaggtagaaggaatcggaggaatcccgaagttgtcggtaatctcctcctacttttgtatcttgttaattactctgctttaatagaaatatcattctgagtatttaagatttgcttagtcataattactttttggttagttcctaattagcatacaggatcattgttcactatagtccatttatttgtagtgattgctttagtgtttgatcggcactagagtagttattaattgcgtagacgtggtgtctgggtaattaatctctagtggttgctatgtatcccacagtacgtttgaggtgggtgtagaggtggtgatagccctcaagagcacttatgtcctccctgtccacgtacgtagtagagcgatatctgggaacagcggattgccagtgcctgaagtattgtgttaggattaaacttaagctttccctagacactgtttctcattaggaaatcctctctgccctctgcccacattagctttgtgtccttggatgaaccggaggaagagataatcacacacgttcccttggattcgatacccttggaatactctgtaagggaagtgctacatcggtatatctgtgcgcttgtggattctatctgtgatcgtaagaaataccaacaagcatttctggtgccgttgctagggaacggttgctgtttatttccgaaccttgttcatccttatcctttttacctttttattcaacctctacccctgctatcccatagaagtattcctgttcaatccttctcgaccatggagcaacctctcttcgagttgtgcgctcctcgggacgaattttacgagccacctccttcatcggagccaattttaacacctagctatgaaattcgtatcgaattcatcagtatggttagggagaaatctttctctggtttaggccaggaaaaccccttccaccatcttcaggaattcgaaaag

SEQ ID NO: 26749 - DNA, 2085 bp, Oryza sativa
gaacgaacatgagtgttagtgaacgaatgcaaacgaaggtgaacgaacgcgaacgaacgcttaacgaatgcgaacgaacgtgaacgaacgcgaacgaaacgttaaagaaacgtgaacgaacgcgaacgaaacgtgaacgaacgcgaacgaacgcgaacgagcgtgactgaaacatgaacgagcgtgagtgttagtgaacgaacgccaacaaaggtgaacgaatgcgaacgaacgcttaacgaacgcgatcgaacgtgaacgaacgcgaacgaaacgttaaagaaacgcgaacgaaacagcgaacaaaacgtgaacgaacgtgaacgaacgcaaacgaacgtgactgaaacgtgaacgaatgcgaacgaacgtgaatgaaacgcaaacgaacgtgattgaaacgttaacgaacgtgaatgcacttgaactaaaagtgtgagaacgaacgcgagcgaaatgtgtacgaacgagataattaaactattgttgaacttagcatatatatatatgattatatatacttgaaaacgtgaaatacattatatgttcctttgcatttagactagtacattttttttgcatgttgcagagaagacgtcgctgtcgttgtccctcaagccgaagtggtagctagccctcgaaggaattcgtgcaggcaagtgatgtaaagatgtgattgttacagatataatataagattgttagatttctaatataagattattagattattagagttagcatatgtgagtgttagagattattagattattagacttagcatatttgagtgttagagatagttagagatttaatataagattattagaggtttaatatacgaaacttaattagacttagcatatgtgagtgttagagatttaatataagattattagagatgtaatattcgaaacttaattagacttagcatatatgattatctatcgtacaaatacacgacacttagacatagcatatttgagtgttagagatagttagagatttaatataagattattagaggtttaatatacgaaacttaattagacttagcatatgtgagtgttagagatttaatataagattattagagatgtaatattcaaaacatatttgattgttagagatttaatataagattattagagatgtaatattcgaaacttaattagacttagcatatatgattatctaccgtacaaatacacgacacttagacttagcatatatgattatttgagttttaatacaagattagtagagtgttaatattacgcttagcaaatatttcttctatgaacagatggctgatcacgatgaggaacatatactgtacgatacaatcgcatcgggaagcagccagtgctggaacgaagaagacgggaacgaggatccaaaccagtacttgaacaaggagggaaacgcagagagggatgcagaggggaacgaggaggggaatggggagagggatgcagaggggaacgaggaggaggctagtggaagtcatccctccgctagacagaagagggcacgcgaacaacgagatgccgcgaagaagatagagggtcggcacatcataactgaggtggacgcagacggccgacctagtgccccggcacaagcagccaagaattttgtacgccacagcggttgggttgtgagggataacgtgcctgtcagcaaggtgtactagcgcagaacaaaggcacgcgggggtgatgacagctttgtcccggaatcagagaaagagatgctgtggaccacaatgctcaagatgttcacgctccctacaggtacagagaacatagtgaaacagtggactcttaagaaaatggcagaacggttccagaccttcaagggagatctgtaccggaaatacatcctgaaggggcagacaccgaacttcgacgtattcccgaagctaagggatcactgggacaagttcgttgcttacaagacaggtcaacaagggcaggcgatgatggaaagaaacaaagaaaatgctgccaagaagaagtaccatcaccacttggggtcaagcggctatagcgtcgcgatgccgaagtgggaggagatggaggc

SEQ ID NO: 26750 - DNA, 2292 bp, Oryza sativa
gaggagctatctacctatgtaatgacagtttattcgcttataaattagagtaatagattgtactctattatcgatttgttattgtgtgcctcggctgattcctggacgagggttcacgcacatgtaagcgtttggaattttggatagaaattccgggcgtgacaagttggtatcagagcccccttgaccctaggttatgccaaatggttatccatagaagccctctaaaaatattggaaaagtagaactgttctcctccccttctcttttaattaaaccgaactaatggcacatgcacttcataatctcttttaatggttctcattcaaaatttattccagtgttattagtactgtacatccattactgtactaatggctcattttaccagcaaaagttttacaatattgttttatttaatcttgctgcaataaaataaatttagcatgatgattttataactttcttttatttcttttgaaacctgttgttcaaaagtacaaaaattgtaactttgtttccaactgtttcaacttattttgcaagcttggtttattttatttacttacctatttactttgattttctaactttattcaaattaatccaaaaacttgtgctattaattggataaatgtcttaactccctcctttcacttgtctttagatgccgcgctacaagcctgagtacttgtttggtgttgagggttttgtctaggagttgcgtacgatgtcctttgtcattggatttgggactgcccctttttatgctcagattcctcatgatcgtcatgaagagaagtgccgagtcaaagtcaccttgaacagtaatagcgaagatatcccctcagtgatgttcgaagctggaggaagaaactacatccatgcatgtcaggaagtggcaaggatcgccataggagagctccgcgatcgctacagtgatcagttggccgacactgagtatcgctaccatcctcgccaaccccagggaagtgaccgtggcaactaccttgagactgaaggaattgagaatgatgctactacaagacatttggttgagatgctgtgggctatggatgaaagtcgtgcggagactgtgttagcagctcaggatcatgaagattggaatcgtggtaagatttgcaagctagaagacaaggtggatcgtttggagaaggagctagccgcgttgaagggagaagcaccgccgcagaaggccaggattcgtcttaccgcaagaaagagagctctatttgtccctcgctatcaattggcgccaaaggttcgtgtggtggagaaagaagttgccccaaccctagcagatcctccggtcatcatcataagtgatgatgatgaagaagaatccaagcgcaaccattccaagattgagtgggtagcaactcaagatgatgaagacgagccgaacgagccttcaatcgacctccgatgctcggaagaactagagtgacttgttaagtcgttgtcatagatcgttgtgttagtttgcttgttttaagtttgcttgtgtgtgtctcgcatgtgatttacatcagtggtgggatgtaagtgcatgcgtttatttgcttttgagtgttaggaagttggtgagtttagtggtgtgagagttttcagtttgtaataatgaaactcagttaagatcaataaaagttaaagtaattccctgtcctaagtagtttcccccggtttcccttcttgtgccctgtccatgccagatggtgaacactcgcagcaacgggaatggccccaacaaccccaataacaacaacaatggagagaatcccactcttgctcaagttcttgctcaacagacacagctaatgaacatgatgatgcagcaactccagaaccagcaaaaccaaggaaataaccatgcacctccccagaacaagttagcagaatttcttcgtgtgaggccgcctattttctctagtaccactaatcctgttgaagctggtgattggttgcatgccatagagaagaagttggatttgcttcagtgcactgattaggagaaggtctcatttgcatcacatcagttgcatggtcctgcctccgaatggtgggatcactttcgccttaacaggactactgctgaacctatcacttggcttgaattcaccgctgctttccggaagacgcatataccatcgggagtggtgtctctcaagaagaaggaattcaggtcgctcactcagggatctcgctctgttacggagtatttgcacgagttcaatcgtctggctcgttatgctccggaagatgtgcgcaatg

SEQ ID NO: 26751 - DNA, 1749 bp, Oryza sativa
ctcagtcggaggagttgccgttgatcctagtaatgtggaatccgtaaccaactagaaacaaccgaagacagtttcagagatctgcagtttcttaggcctcgcaggatattatcggaggtttatagagaatttttccaagattgctaagcccatgacacgactgcttcagaaagatgtgaagtacaagtggtcggaagaatgtgagcagagttttcaagagttgaagaatcgcttgatatcagctcctattttgattttacctgatccaaagaagggtttccaggtgtattgcgatgcatctaaacttgggttaggttgtgttctgatgcaggacgggaaggtggttgcctatgcatctcgtcagttacgtccgcatgaaaagaactaccctactcatgatcttgaattggccgcagtagttcatgcgttgaaaatttggcgtcattatcttttcggtactcgtacagaggtatataccgatcacaagagtttaaagtatatctttactcagccggatctgaacatgagacaaaggagatggttggaattaattaaggactatgacatgggaatctgtgtccccgataacaaagatttaaaagatgcaattctgaaagaagcccatgataccttatactccattcaccctggtagtacaaaaatgtaccaggatctcaaggaaagattttggtgggcaagtatgaagcgtgaaatcgcagaatacgtagcagtatgtgatgtttgtcagcgagtcaaggcagaacatcagaaacccgccggtttgttgcagcctttgaagattcctgaatggaaatgggaagaaatcggtatggattttatcactggtttacccagaacgtcatcaggccacgactctatttgggtgatagtcgatagacttaccaaagtggctcatttcatcccggtaaagacaacctattccggaagtcggttggcggaattgtatatggcaaggatcgtgtgtttgcatggcgtccctaagaaaatagtgtctgatcgaggcagtcagtttacttcaaatttttggaagaagcttcaggaagagatgggttctaaattgaactttagtactgcttatcatccgcagacagacggacaaaccgaaagggtgaatcagattttggaagatatgttgagagcttgtgctttagatttcggtggaagttgggataagaatctaccttatgcagaattttcgtacaacaacagttatcaagctagtcttcagatggctccttacgaagcactgtatggtcggaagtgccgcactccgcttttgtgggatcgaacgggagaacgtcaggttttcgggacggatatcctaagggaagcagaagaaaaggtgaaaatcattcaagaaagattgcgtgtggcccagtcgcattataagagttatgccgacaatcgccgcagagatttgagttttgaagaaggggattatgtgtatcttcgtgtcacgcctcttcgaggagttcatcgttttcacaccaaaggaaaattggcaccgcgttttgtgggaccttatatgattgtcagtagaagaggagaggttgcttatcagttggagttacctcaatctttggcaggagtccataatgtgttccatgtgtcgcaattgaagaagtgtttaagggtacctaccgaagaagctaatcttgaacagatagaagtccaagaggatctgacctatgttgagaaaccatccgtatcttggaaacaaatgagaga

SEQ ID NO: 26752 - DNA, 7749 bp, Oryza sativa
ctgagtatcgctatcatcctcgtcaaccacagggaagtgaccgtggcagctaccttgagactgaaggaattgagaatgatgctaccacaaggcatttggttgagatgctgtgggctatggatgaaagtcgtgcggagactgtgttagcagctcaagatcgtgaagaccagaatcgtggtaagatttgcaagctcgaagacaaggtggatcgtttggagaaggaattagccgcgttaaagggagaagcaccgccgcagaaggccaggattcgtctcaccgcaaggaagagagctttatttgtcccacgctatcaattggtgccaaaggttcgtgtggtggagaaagaagttgccccagctcaagcggatcctccggtcatcatcataagtgatgaagaagaagaatccaagcgcaaccattccaagattgagtgggtagcaacccaagatgatgaagacgagccgaacgagccttcaatcgacctccgatgcttggaagaactagagtgacttgttaagtagttgtcttagatcattgtgttagtttgtttgctttaagtttgcttgtgtgtggctcgcatgtgatttacatcagtggtgggatgtaattgtgtcacgtcctgataaattcatcccgaaataaaaatcattccctaaaaggaataatagaattaattaaaattcgaaaagaaattggcaaacactaaaatacgtgcaagaaaaattcaaatgtagcccggagaatttttgttaaattctccttggtctaaaaggagccctcaaattttacttgaatttttagagcaccggaaataattattaagcaaaaaaaacaattaacaaagtttattaaaaagaaaaaaacctaaaaataaccccacaatcaacttattgggccaagtcaggcccaaagtcctaccctctctcccctcggcccgcggccgaagtctccctttcctccctgtctttctctccctctccttctctccctcctcttgggccccccttcccctcggcccagctccctcctccctctctctcccgggctgcctctcccccccccctctcccctcccggcctgcccggcccaggccgcctccccctcctctcctcctgggccggccgcccggcccaacccgagcggcgccctcccgcccgtgccgcgcgcgtgcgcgcgctgacgccgccgcctgaccgcgtggggcccacgcgccaggccgagtcatcgtcctcctcccgcccggccgtcctctctccctctcccgtgaaccctagcaccattcctcccttaaatccgcgcgaatcaagcttgggattcccaaattgattggggggaattaatcccctttcctcctctctctttcccccttaatttccccgtgaatggcgcccccaatcgccgggaacggccgcgccattcccggccgccttccattgccgccggccgtggttcccgccgccgttcccgctcctcccgtggccggctctctcccccatcctataaaatgggatcctcatcccccgttctctcgttttagccccctcccgagcctccccgtggtccctagccatctccccgccgccctcctctctctcccacgccgccggccgcctccagccgcctgtgccgcctcgaccgtgcgccggccggtcgcgccgtcgcctcctccagcgtcgccgccacctcctccaccccggcctgccctccgtttcgcgcggtgaccaccggaggcgcgttcccgccatcgcccttctctttcctccgcgccggccgcctccagccgcctctccctcctcgccggagcaccgtccggccgcaccgtcttctccctcggcctcgcagccacctcctctccctcggtcagccctccgtttcgcgggggaagcaccggagacgcatcctcgccggcaaaacagtggcgttgccgccactgttccaccttcggccgccactgtcgcgtttcccgtgcaccggccgacgtcgccaccacctccctcggctccgcgacgccgccctcatccccggcatcacctcctcctcgcccgaagttcgccggaacgccgccgccgcgccaaccacccattcctcctcgtcggctcgtcgccccgctgcaccaccaccttctccaacatcgcagcagcgcgttccacgccgtcccctcctccgctcagccgctgctgcctgccatcatcgttttcctcgtcaccgttcgtcctcgccgatcgacgtcccgtcggtcgcccggctcgtcgtctcgcggcgccgcctccgtcatcgtcatcgctgcggcgtgttccacgccgtcctcgtctccgtgcagccgctgccggctgccctcgtcgcctcctcgccggttccggtcgtcgtcgtcgtcgtcctctcgtcgttcccggtttcgctcgtcgtggcgttcgtccctccgtcaagccgttctcgtccgtcgtccgcgttcgtccagtgtgccgctgcagcccccgtcgtcgtcttcgtcctcggctccgtgtcgtcaagcctagtgccggccgcgtctcgccttcgttcaaggatcgccgccgaagtcgttccctcgccgtccgtctccgccgcgcccgttcgtcgttgtcgttcccacgcctcgtcgcgtggtggtaaggtttcctcctctcgctgccccgtcctcgtcctttcggtgtcgccccgtacccgttgtgcggtcgtcgaccccggtacccgtgtaccggtgtcggtagtcgttcacgtgtgcgggtggtgaccgtgtagtgtccgtgttagtgtgcccgctcggtagccgcgtggtttccacgtgtgcaacccgtgtggtgtttagtggagtccgtttgtcggccactcgcctcggttgacacacgggatccgcttccgtcgaaccgtggaccgactctgtgtactcggtctaccgcggtcctttaggttgacatgtggggtccgcatgtcaacggcgcagccttcctgtcttttccaggctagcgcttacacatgttttataattgcaaagcttaattataataatccgcaaatctccatataacagcattaaacttcggatgatcatatcctggtcatacgagctccgaatcgacccgttcaagtctcctaatgtttgttataacctaaagaaccctgtgctttctttttatgtattgttattgcttctttataggcttgtagctttgcttgtgtgctttgcgtagcttctgtcgttccggaggttcccgaagcgtggttcgcggtcgccgccgaaggttcggaaggccgttctctctgagcaaggcaagtcacatcatccttgagcatattgaatcccagtttataaaattattttgatttaaattaatgcattatcgctttatttaaattcccgcgttatcactgtcttatttagccatgcctatttacctttgttaagacattattattgctattgttattattatcttgttcaccctaggaagataaaaccccagctagtgggtactctattcaaagttccactagtatgaatttaggtagatgcttcgctgattaattaggcaacagtaggtggttttataactttagactttgggaattttcatatcacttggatactttggaatggttggcttttgttggaattggacacacacctccccctctattcaaaacccccaaaatggttttaggctgggctcgaggtgcgtggttgggttttgttagtcgtacctcgggtactataaggattaagctcgggcctctgttgcaaagcactaccgtacttccacatgtctagtggtaaggcttagtttgtggctcagtctggttataaacaaaagtacacggattagagatggatgaagtcgggggtcgatggacattctccagggcaaatgaaggctacacgagctgcggcccggtagtcgagatgtcatggcacagggctggtgtcctgctgctagggggctcaatcctgcctgcctgtcccgggggttccggccgtaggtggggttgggtcggtactcttgtttatggctaggatgggttgggaactatgtcacgtcttccgtccgtataccgtggtggtatgtggcatgtggttgcacgtgaggaagatgtgtcttgtgggtaaagttgtacacctctgatcagagtataatctattcgaatagccgcgccctcggttatgggcatgccgagcaatgtacccaggtcagtgttttaattcttaaatttgctcaacaactaaaaggtggaatggttggtctgggttggcttgggacgagctgggacccagggtcgggttgccagctcggtctgaatcatcgtaggccttgggtaaggcaggttcgtggggttcacggccttgattaataatactgtgtagctctaggatcgtctttataaaatggctttgggcaactaaggtgacttttaaatgctgtttactgcaaaacttaacccctatattattaccccttgtacccccttgcattaatcatgcatctgccggtgtggcttgctgagtactgtggttgtactcattcttgctcaatctttccccccttcagtaagagaagctttggagaagtagtcttaggtggagtcctggcttataccccagttgagcgcctgtgaagatggagccgtaggcccgctagtccgctgctgtttattttttattgtcaggcctgaagcgcctttgtaataatgtaaatattatcgatataataaagatgtgctttttgtatcatgtttgtttggtgtaccccggcttttcctgggacggggattaatacactagcgttcgggaaaaggcaattttctcggtcgcgacaaattgcatgtgtttgtttgcttttgagtgttaggaagttggtgagtttagtggtgtgagagtcttcagtttgtaataatgaaactcagttaagatcaataaaagctaaagtaattctctatcctaagtagtttcccccgttttctcttcttatcctgtccataccagatggtgaacactcgcagcaatgggaatggccctaacaaccccaataacaataacaatggagagaacccaactctggcccaagttcttgctcaacagacacaactcatgaacttgatgaataaggtgtttatggaatacctagacaagtttgtggtggtctttattgatgacattcttatctactctcgaaccaaagaagagcatgaagaacatcttcgccttacattggagaagctacgagaacatcaactgtatgctaagtttagcaagtgtgaattttggttgtctgaagtgaaattccttggtcacgtcatctcagccggaggagttgccgttgatcctagtaatgtggaatccgtaaccaactggaaacaaccaaagacagtttcagagattcgcagtttcctaggcctcgcaggatattaccggaggtttatagagaatttttccaagattgctaagcccatgacacgactgcttcagaaagatgtgaagtacaagtggtcggaagaatgtgagcagagttttcaagagttgaaaagtcgcttagtatcagctcctattttgattttgcctgatccaaagaagggtttccaagtgtattgcgatgcatccaaacttgggttaggttgtgttctaatgcaagatgggaaggtggttgcctatgcatctcgtcagttatgtccgcatgagaagaactaccctactcatgatcttgagttagccgcagtagttcatgcgttgaaaatctggcgtcattatcttttcggtactcgtacggagatgtacaccgatcacaagagtttaaagtatatttttactcagccggatctgaacatgagacaacggagatggttggaattaattaaggattatgacatgggaattcattatcacccaggaaaggctaatgttgtagcagatgctcttagcaggaaaggttattgcaatgctacagaaggacgacagttgccattggcgttatgcaaggaatttgaaagattaaatttgggaattgtcaatagaggtttcgttgcagctttagaagcgaagcccactctaattgatcaagttagagaagcccaaattaatgatcctgatattcaagaaatcaagaagaatatgagaagaggaaaagctatcggtttcttggaggatgagcaaggaactgtatggttgggtgaaagaatctgtgtccccgataacaaagatttgaaagatgcaattctgaaagaagctcatgatactttatactccattcaccctggtagtaccaagatgtaccaggatctcaaggaaagattttggtgggcaagtatgaggcgtgaaatcgcagagtacgtagcagtatgtgatgtttgtcagcgagtcaaggcggaacatcagaaacccgccggtttgttgcagcctttgaagattcctgaatggaaatgggaagaaattggtatggattttattactggtttacctagaacgtcatcaggccatgactctatttgggtaatagtcgacagacttaccaaagtggctcatttcattccggtaaagacaacctattctggaagtcgattggcggaattgtatatggcaaggattgtgtgtttgcatggcgtccctaagaagatagtgtttgatcgaggcagtcaatttacttcaaatttttggaagaaacttcaggaagagatgggttctaagctgaattttagtactgcttatcatccgcagacagacggacaaaccgaaagggtaaatcagattttggaagacatgttgagagcttgtgctttagacttcggtggaagttgggataagaatctaccctatgcagaattttcatacaacaacagttatcaagctagtctacagatggctccttacgaagcgctgtatggtcggaagtgccgcactccgcttttgtgggatcaaacgggagaacggcaggttttcgggacggatatcctaagagaagcagaagaaaaggtaaagatcattcaggaaagattgcgagtggctcaatctcgtcataagagttatgccgacaatcgccgtagggatttgagttttgaagaaggagattatgtgtatcttcgtgtcacgccttttcgaggagttcatcgttttcgtaccaaaggaaaattggcaccgcgttttgtgggaccttataagattgtcagtagaagaggagaggtcgcttatcagttggagttacctcaatctttggcaggagtccataatgtgttccatgtgtcgcaattgaagaagtgtttaagggtacctaccgaagaagctaatcttgaacagatagaagtccaagaggatctgacctatgttgagaaaccaatccgtatcttggaaacaagtgagagaagaaccaggaatcgagttatccgtttttgtaaagtccaatggagtaatcactcggaagaagaatcaacttgggaacgagaagatgaattgaagtcagctcatccgcatttgttcgccagttcttccgaatctcgaggacgagattctgtttaaggggggtaggtttgtcacaccctgaaaattcaaaatatataaattgttgttcaattggaatttttagaaataattttaaaaagtcttgaaaagaaaatctaattttaattaataaattccaatataaaatgggcccagataaaatttcattaaatacattgcttaattctataattcctagatttttctgggatttatttgagctaagaaagtatttttaataaatggaattg

SEQ ID NO: 26753 - DNA, 1598 bp, Oryza sativa
gccgaaccttccttcctcgtcgccggtcgccgtgggcctttgccgccgcctccgagcccctttaaaaggacccccggtgtctcctctacccgtcgccgccttcgccttcgcctctcgtcgtcggaaaagccctagcgccgtgtgccctagctttgccgtcgccgccgccgctccagccgtgcttcgccgtcgctccagccgtcgccgtcgctcgggaagaccgccgtcgtggtcgccgtcgcgtcgccgtcctcgtccgccccttcgctgtcgccggagatcgccggagcatcgtcgccgtcgtcaagccgaagagcgccgtcgtttcaatctcgtcgccgtcgccgtccgttcctcttccgccgtcgctttggtcgccggtgagttcgccgtgccgtccgctacccgttggtgccctccgttcgtgccgtagcgccgccgtttgccggcaagcgtgcgccgcccgagccgttcgctccgccgagccgccgccgctgtcggtgacgtcaccgctaacgtcatcggggtcgtccgccgtgagccggtcgtggaccgatcgatctcggccgtccatcttggatcagttagatctcggccgtccgttcgcgtgaaccgccgcccgtgcgcccggtccaccaaaaccctagccgctgacgcaataaaccttctcttccttttcaaaattaattcattattgcgtcataattcaattttaaccaatttaagtgttttaatccggtttaatctttaaaaattcataactaattcatcttagctccgatttagttggttcaagtctctaaatttttctaaaattgagatctacacattaaaaatatccacatgtactgttcatgcttgtttatgtgctattttggtgatttggttcttttctgcttagattccgtcgtttccggagagtccgttttcgccgaagaagagtttgaagagttccaaggccagcaaggcaagtcacacagatcccaaacaaccctttgagcatgttgatcctatttaaagctattgtttcttttcaactattgcatttattttcgaatgtcattgggtggaatcaacctattctttgttatagcccttttgttcttgattactttattccttgataccttgggttattataatttgactggttgaactttatttatattggttcaactagatactagatataattgcttagccctgcttagaaacattagcacactatttggataactaatgactcactgttgtttcatgatggcttaatgatagttcacgatggtcgatcgtgattagttaattaaataatgtgccaactaaaacttgataatggtgggttgtgagcacatggttttgatggtcgtgctcatgacaattaaggaccggttcacgagtttcggttgtgaaacatttatcgtgccaaccacaagccagcatgggcaacggctttatcttttgtatagcatggttcattgcggggcaccagactgtgaagtggcggagataagcccacgggggtcgctggggagtccatgccttgtttataagggggtgattatgatccaggaaagtgcgctgcagtggattgtgttatg

SEQ ID NO: 26754 - DNA, 2812 bp, Oryza sativa
tgatcggctttcaatctcagcaaagatgtaaaaggctctaatcttccagataagttagatataaaccttctaacaaaatttatcttgctgatcaactcctgcaactttgtgcttgtcctccagaggttgaatgttctgaattgcattaatactcctttgaggcacctcaatccccctgtcatgaataagaaatcccaaaaactgactagccgacacaccaaaagcacattttgttgggttcatcttcaaaccaaactttcgagttctctcaaaaactttcctcaaatcggctatgtggttttcgatttcctttgatttaacaaccacatcatcaatataaacctcaactaaaccagctgatcagatcatgaaatatatataattcatggctctttgatatgtggcctccgcactcttcaagccaaaagtcattacaacctactcaaacaagccgatcgcaacaggacatctaaaagctatctgatgaatgtcttcttcggccataaaaatttgattgtaacctgcattgccatccataaaacttaaaatcttatgtcctgaagcagcatcaaccaactgatcggctattggccttgggtactcgtccttgggatctcgaaaatcaatgcacaccctaactttgccattcttcttgataactggaactatatttgaaacccattcagcatatcggcatagacgaataaaaccaacatcatacaaacgcttcacttcagccttgacagcctcaagcatatcggctttgcacctccttggtggctactggtacggccgaattccaggcttaataggaagccgatgtacaacaatcgatcggctgagtcctggcatctcataatacccccaagcaaagcaatctctgtattcttttaaaagctctatcaacttggttctaaattctgaagataaattcttactaataaatgtcggccgtggtctgcctcccggacctatgtcaatttcttccaaatcgtcagccgacatgaaaccctgtccttgcttggcatcgagatcgtctaccgtgtccttgttgtagacgtttgaaccctccacaatgccctcaaagtaataatttgggctctccatcttcaattggttgtatatcacaatcggacacctttagaaaatctccatcccaaacttttccagacaagcaatcaataccgtccatctcccaaagagctaaatcagcattagcaacattaactgacctgtcggctggtacaatttcaatcttgtcaccttgccattgaatcaagcactgatgcatggttgaaggaatacaacgattagcatgaatccaatcccttccaagcaacaggctgtaagaaccctttccatcgatgacaagaaacgttgtaggaacagttttactgccaactgtcaactccacatttaaaactcttttggtttctgatggattgccaccaaaatctttgagaaccatattggtcttaatgagatcatctggatttctgcccaacttcctgaatgtagcatatggcattaaattcacagcagctcctccatcaaccatcattttggacatcggcttcccattgacaaacccattaatatacaaaggcttgagatgccgattttctgtcactcctggcttctcaaaaattgcttgctctggtgacaaaactaacttagccaaagcctcttcaacaccatcaacctcagcttgcttagcttcaaattcggctggtagcgtaaaaaccatgttcaccgatgcagatgcaacggccttacccttgagcaaccttcttgctttatcggtttcgacttcatcggctgttgtaactgtgctcttaacgtgccactcttgcctagtctttgttttcttcagccgatgattaatctcctgtcgtacttcctgaaattgttctctgtcacgcccggaatttctatccaaaattccaaacgcttacatgtgcgtgaaccctcgtccaggaatcagccgaggcacacaataacaaattaataatagagtacaattattactctaattaataagcgaataaaatgtcattacagaggtagatagttcctctcaaccaataaggatctaagcagcggaaaataaaataaacggcgcagacggctccactccacaggcagcttgaccaaggctactcctaatcctccactccatcagcctcattgtagaactcttcctctgatgaatgattgcaaggtgagtatatgacatactcagcaagccacgcagcaaatatgcaagtgcacaggataacaaaggatggcataatagggtttcatttgcaaaagcagcatttagcaaacatttcagaatttaacaaaacagttaagtattaattaagcaatattaatccaacgctatacaacataccctgttgtataggcccaaccattctgaacaaccatcccggctgcacagttctatctccaaaccaggaatataccattccaaaccaggagctaatcaaattattaccaattatagcatcatttactatggtgagaagggtgaaactaatcacgaaagacattgttagacccgcccataaccgcgggcacggctattcgaatagttttactctgatcagaggtgtaccactgtacccacaagacacaaccccacatcatgtcaccatgtgcctcaataccaccacggtacctcggaaaggagttgtgacaatacccctcgcataacacaatccactgcagcgcactttcctggatcataatcacccccttataaacaaggcatggactcccagcgacccccgtgggcttatctcgccac

SEQ ID NO: 26755 - DNA, 4261 bp, Oryza sativa
tgaacaacaggtttcaaaagaaataaaagaaagttataaaatcaacatgctaaatttattttattgcagcaagattaaataaaacaacattgtaaaacttttgctgataaatgagccattagtacagtaatggatgtacagtactaataacactggaataaattttgaatgagaaccattaaaagagattatgaagtgcatgtgccattagtttggtttaattaaaagagaaagggaggagaacagttctacttttccaatatttttagagggcttctatgagtaaccatttggcataacctagggtcaagggggctctgataccaacttgtcacgcccggaatttctatccaaaattccaaacgcttacttgtgtgtgaaccctcgtccaggaatcagccgaggcacacaataacaaattgataatagagtacaattattactctaattaataagcgaataaaatgtcattacagaggtagatagttcctctcaatcaataaagatctaagcagcggaaaataagataaacggcgcagacggctccactccacaggcagcttgaccaaagctacacctaatcctccacaccatcagcaacactgtagaactcttcctctgatgaatgattgcaaggtgagtatatgacatactcagcaagccacgcagcaaatatgcaagtgcacaggataacaaaggatggcatagtagggtttcatttgcaaaagcagcatttagcaaacatttgagaatttaataaaatagttaactaattaaacaatattaatccaacgctatacaacataccctgttgtataggcccaaccattctgaacaaccatcccggctgcacagttatatctccaaaccaggaatataccattccaaaccaggagctaatcaaattattaccaattatagcatcatttactatggtgagaagtgtgggactaatcacgaaagacattgttagacccgcccataactgcgggcacggctattcgaatagttttactctgatcagaggtgtaccactgtacccacaagacacaaccccacatcatgtcaccatgtgcctcaataccaccacggtacctcggaaaggagttgtgacaataccccttgcataacacaatccaccgcagcgcacctttcctggatcataatcacccccttataaacaaggcatggactccccagcgacccccgtgggcttatctccgccacttctcagtctggtgccccgcaatgaaccatgctatacaaaagataaagccgttgcccatgctggcttgtggttggcacgattaatgtttcacaaccgaaactcgtgaaccggtccttaattgtcatgagcacgaccatcaaaaccatgtgctcacaacccaccattaccaggttttagttggcacattaattaattaaccaatcacgattgaccatcgtgaactatcattaagccatcactaaataatagtgagtcataagttatcccattagtgagctaatgtttctaagcagggctaatgtcacgcccagaaattcccgaatagaatttcaagcagaatgtgcattaaaatccccgtccaggaccagccggggtacacaaacgacaatgttgacatacagatccacgtcttacaaacatcataaagtcttacataaatgtagcggaagaaaagaaagacaacaggagctaagccttgactaaactgcagcgggaacaccactccacaggcatcctcgacggcacggacgaagcctactcctctgagaaaccttcatctgacccgaactcgaactctgaggttgggaaaagtagagcaagactgagtactacccactgtactcagcaagtcataccggaataggggtatgatgcagggaatcatcaaagaagagctgaagtggttcatttgcataaagcgagcatttataaacagaaattgaaagatttaaacagttgtaaaaattaattaatactaatcatccgctgtccaacgctaacccacgttgcaacaggcccaaccatccacctaaactatccaaattaaaggattacactaaggtgagactaatcacggtgaatctggttgaccgcccataaccgcgggcacggctattcgaatagttttactctgatcagaggtgtacaactgtacccacaagacacagccccacgacacgtttccgtgcgccgacatgccaccatgacgtaccggaaagaggccgtgacaggacccttcgcataaccccctctagccaagcacaccacacctcaggtttcacccccgtccccagcgggcaacgggcagtcccctcttgtgcctaggtgaatccggaagtgacagaggccgtcgcagggcccgccccgctccatcacgcccacccttgcctggatgcgtcgactagaggaacgctacactacaagcccagccgttgcccacgctggcttgtggtaagtacgataagttcttccagggcatcccgcgaaccggtccttaactgccatgggtgcgaccagcaaaaccatgcacccacagcccaccatgtggtttattttaattaaccaacaccaaagcggtggtactaatccaacaaaccattagaaccaacagtctaaacattaatatgattttccccattgtgaactagttgaactaagcatggctaagcaattcctagtccaaactctaatcatgttataaccccaagctaacaaaggagcatggtatccaaaaagcatggctataacaataggtaaccatcccatagtaatattataaaacaatgcaatatttgaaagaaaacaatagagcatttgcaatataggatcaacatgttcaagtgacaagcatgacttgccttgctctgctgctggaggaacctcggcgactatctcgaagtacaccggagcatcggaggaatcggaatctagcgacatacaaagaaaacattgcaaacaagctataagactactgaaacagagaacaaaaccatttttaatggattctacacatttttcttgatttactgagacttgaatgggcttaaacggagctcggatgaattagttatgaattttagaagattcactgggtttattactataaaagaaaaaccctaaatcatttattgcgcaatatattccagggctgacgtcagcacggaggggggtgcggcgccgacatgcggggcccaccggtcagcggctcgggagagggaggaaggggcgccggcaagcgggacccgcatggcagtgactcgggagagggcggtccacggcggatcgggtccacggaccggggaggagcggcgcaccacgtggcggccgaaccgatggcctcgatctacccaagggtagatcggacggcggcgggagctcgcggccggggcgcgcgggcacggcgcaaaccggcccggcggccatggcgcgcgacggcgcggcgcgcttgcggcagcggcgcaagacggcggccggcggcgaaggcgacggcgcagaaggcaacgcgaaggcggctgcgctaagcggcggctaggaaggggagggaacgggcggcgataaaggcggccgccggctcggctcggcatcaaagccgaccggccggccaggtctagcggcgacggcatgcggccgacgacggcggcgaccggcggcactggaggcggcggcggcggccgaaggcgacggcgcgcgactcgaagcggcggcgcggcactaagaggagaggaaggggaaaagaggggagggggtgcctcaccgagggtggccggcgcggagaagacgatggcgaacggcgacggcaagccacgggaggacgacgtcggcgggcggacgagcttcggggtgccctaaggaaggagaagagagggattagagagagggagatggaccacggcgatcggaaaccatggccgaaggcggcggtggagttggtgctcacccgagtgcgagggaacgagggctccggcgacgaacctcgacggaggaggggtggacggggtggatctcggccacgcgaacccgacggcggcgacggcgcggcctggcggcgaccctaacggcggctagcggtggccggagtagcggaaaaggcggcggcaaggggttgcacggcgcgggagcgatgggaggctcgagagagtgcggcgaaatggggaaaaagtgagaggggacgacggcgatgcttaaatagggggagaggagaccggacgtggccgggagaggcggggaatcgccggccgacgtgggggagtgggg

SEQ ID NO: 26756 - DNA, 3052 bp, Oryza sativa
tgcgggcgcgacggcgcgagcgagatcggcggaaggtgggggaaggacccgacaggtgggccccacctgtcggcgaccccgggagaggagggcggcgggcggcctggctgggcctcggcctgcggccggcccagcaaggaggagggggaaggaaaggagagaatgggccggcggcccattcgaaaaaggaggaaaaagagagaaaaagaaaaagaaaaagaaaaaggaaaaaggattttccctggaattaaaatattgcttgctcaattttaattggttaaaattatttctagagctctgaaaattccactaaaaatcctgttaatgaatttcgacatgtagaactcaagaaaaattccacatgtcaaatccgattattatttgcattactttcttagggttttctcttgatttcacctgcattttcttggggtcgttttaaaaaaaattttaggcttgggaggagaacttcggggtgtgacagctaagcaattatatctaatatctaattgaaccaatataaataaagctcaactagtcaaattataataacccaaggtatcaaggaataaagtaatcaagaacaaaagggctataacaaacaatatgttaattccacccaatgacattcgaaaataaatgcaatagttgaaaagaaacaatagctttaaatatgatcaacatgctcaaagggttgtttgggatctgtgtgacttgccttgctggccttggaactcttcaaaatcttctcctgcgaaaatggactctccggaaacgacggaatctaagcagaaaagagcaaaatcaccaaaacagcacataaacaagcatgaacagtacatgtagatatttttaatatgtagatctcaattttagaaaaatttagagacttgaaccaactaaatcggagctaagatgaattagttatgaatttttgaagattaaatcggattaaaacacttgttttgattttaattgaattatgacgcaataatgaattatttttgaaaaggaaaagagggtttattgcatcagcgggctagggtttcggtggaccgggcgcacggcgacggttcacgcgaacggacggccgagatcgacttgatccaaaacggacggccgagatcgaacggtccacgaccggctcacgggagagggcgacgatgacgtcagcgatgacgtcaccaccggcggcggcggctcggcggctcggacggcgcacgctggccggcgaacggcggcacttcggcacgaacggaggacaccaacgggtagagcgtgacgcgacgaactcaccggtgaccaaaggagcggcggaagaccaacggacggcgacggcgacgacgaaggatgtcgggtcccaaaactaatgattcggaaaccgacatgtttagactgtatcaagccctggatcagtagattgatacaggttcaacaatctggatcttcattgcatatatttgattaaggtttcaaaggagatattattacaaaatataagggtatttacaagcttgtggctaactattacagcagaagctatagaatgactcaactctaatgttttgctatagacttaaaccatctatctaatctatacttgagaactaagttaaaatgagattaacttatatgattgaactcccagcttcggcaagaactccaagatagactctgaaaaatgggggttgaagcaagggtgagtacaacgtactcagcaagctattatattcaataataaatgtatgaaatggtaatatttgagtagagctaggtttaattgcagaaagctgagaataaagaagtagaaatcctgaaatgtttgatatgcaacagtatttaataaagtttgaaattatgtttctaaccaagatgccatagtgagtcccaatgctcgataaccgcgagcacggctattcgaatagttttgataatattcatactgcagtagatgtacgctttacccgcaatccatgacatgctaatattcattagcttagtcatggcaaagcttttcggttactaacatcagtggtacctgttccatgaactataatccccatgcgctctgaacgtaacgttatcagtagcgagaggagttctggcgttcccgaggtttttagagagaactggttgagagacccccgtcatctcaatcaggttttcataattcacacacacagctcgcgagataatcaagatatttacctgcgcctcggtaaatatcacaattgccctgttcagcgtaagtttgcctcctgcgcgaggacttaaaaagaaccactatacagaggtaccacctttgctagataacttaatcagctaggtctatgcccatacgagaattgcggtcgtactcgtatgttcttcacatgtacttggcaatcttatgtcggttggaacagtactagccacccggaaatcaaccatttctaccgtactgttccaatctaagttcattaaattttatgcataatctaactaggcatggctaagcaaaatctagcatatctggtttgctatgttcaggttatgcatttgaaatcatgtatgactaatgcatagaacagagatatagaatatagggtatttatgctcaaaggagaggaataataacttgccttgctccaacgcaaataaatccgagatgggcaacctgattatccgatccttgaaatatcacaggttgccatccaaaatataacggactccactgaagaagaggaagatccaaattcaataaaagccatagaataacaagaaaacgacaaacggttaagagggctagggtttagggtatagcctatcttttctatagggtatagggattactgggctaatattttatgtgcagattctaaagggttggaggctaaggtggataggagattaagcaattagggtcgcttatatttgatgcatgggcttatgtggtttggaggataggaaatatactggataaataatgtggttaagtaggcatgtagctggtataggtcaaggtcgggctttgatagaacagtggctagagtttagttgttctcgagacgat

SEQ ID NO: 26757 - DNA, 6462 bp, Oryza sativa
taggatcacacagagcccgagagctaactgtgcggcgtgctatggaggtcgagggaatagtgaagctccgaccgctgtacgcatcgaggcgtggggtgccaggagcagcacttcgaccttaggtttggttttgccgggctttacaaccaacggtccgacgtcggggccagtagaccgcgaacgtccccatggaaggcgtaaagttccaaccggcggctttttagtggctaatgggtatttttggggtaaaagaaaatatttgaaaaaggcaaatataaattcaaatgatatttgaataaattcaaataaaattataaaatagcaaattaggcatcaaaataaagcatttgaatttatatgaatttaggtccaggttttactgagatcggatctatggtttaggagatatgggcttctaaagattgggatttgaattaaataaagaaaatgtgaaatagtactgtgtaagggcccacctgtcagcctttcctttcctctttcttttctctttcttcttccttcttcctcctcccgttctcttcctcttttctgttgccgagtgagttgagaggaggagaggaggggcgctggctctccggtggatggaagactgcgacgccggtggcaatacatgttcccgagcgacgcgcatccggggagggtgatagtcggcagaggaagtgagagaggaagctggaacggcgcaggcaagagctctgctccggcggcaaaagaggaggttgtggtggcttgttttaaaggggaagggaaaggggaaaggggtgaaatggattcgcctcgatgagacgaagctagtggcgcgagggcttggccgacaacgctccggtgagggagatcgactagtggtggccatggcctaacatggccaggagagagagagaaaagctcggcttgtgtgggggagaaagggacttcaccgtatatttataggcttcggaggtcggttgctcaagtcggttcgcagaggaggagggcgacgaaggcacggctgcagcgacgtgaaggaaagaatgacggcaccggttctttcctcccattggacgttggagtcggttcggcttgcagatgtcgtcagcgagttgaggtggtggctgacgtaagattgggcggcagaggaggaaggcaaggcacggcgtcggtggagtgggggcgaagagaacagcgccggcttgattccttagcggcgaggtttgcggcggcgtgcgccgtgcacggcacgcgcactgagaggaaggaggcggctgggttgtgggctgaattgggccggctcggcttagctgggccggcagcccaagaggaaggaggaaaatagaaggaaaaaggattgggccaaaaggaagaaagaacggagtttcggcccgatgacaaaaagaaagaagtctaatttgtatacttgatttgaatcactgggttttgcgaagaatttgaatttagagagaattcacaaaggagatttcctaatttatttgagtgcaatgtttagaggtggagtttgagggaatttatttggaagcactcaaataggaaaggaaattaatagtattcctcaaaatatttttgggaatgtggtaggaaaataggtggaggcaaaaggataggatttgaaccctaaaatatatggcataggtttcaaggaattgtttgaggctaaaaggaaatttaggtgacaaggatataatttattttcttagcacaagagcaattattcacaatatttgtaataatattattcttgtgccgagaaggaaatcaagccacaggaattaaattagcggctagatcaaaaggaggaatttagatatttggcgataaataagaataggtttggaatcaaaggataggtttaaaatcaaaggatgggtcgacaattgaatccaataaaattggaatcatttggtttaggttctaggacaatagtggcagaatttcttggcaccataattcataaaaatagaaaggggttttcaaactaaatttgaataaaagaattttagtcaaaagaaggtttcaaaccaaatcaagaaatacctcaatttaaccaaatatattttaaatgaaaaacacaaaagaacttaaataccagagaggttttgtgcgagttagttctaggaggtccctctaattatattgttctaagtttaggaggttattgaaaacataagaatcggcatgatgcaggattggaaaatgacacattttcaggatgttacaaaggaacggcggcaaacttcgggtcgacggctgcgacggtgctccggcggtcttcggcggcggcgaaggggcggacgaggacggcgacgacttggcaaccacgacggcggtcttcccgagcgacggcgacgtctggaacggcggcggcgcacggctggagcgacggcggcgacggcggcgctagggcacacggcgctagggcgctacggacgacgagaggcgaaggcgaaggtggcggcgggtagaggagacaccggggaagcttttaaaggggctaggaggcaacggcgaagtcccacggcgaccggcgacgagaaggaaagttcgggctcggagagagagagactgatccgaatcgacctcgaatccacgaacttccaaagcgagatagacgatgtttccaaaggagaaaaggtagaggagatctcggggatcatttcccctcttttgattcggccggagaaggaaaggagcggccggatttggaaggaaacggcggcggcggcgcgctagggttcggccgggcgacggcggctcagggaagacgaacctgacaggtagaccccacctgtcagcgagcgagggcgcgcgcgcgcggcggcggactgggccgacttgggccgaggagagagagcggttttgggccgactttcggcccaaagccaaaagggactttttaaaacctttttcaatttaaattatttcttaaatgcaattccatttattaaaaatacttccttagctcaaataaatcccagaaaaatctaggaattatagaattaagcaaagtatttaataaaattttatctggccccattttatattggaatttattaattaaaattagatcttctcttcaagacttttaaaataaattctaagaattccatttaaacaacaatttatatattttgaattttcagggtgtgacattctctatttctcatcctttgaacccttcttttctgattcttggtgaaaatacccgccggacaccattgtgttttcctatcttcaccctcatcatggtcataatcttgattcaccgggcccaacctctgatgaacaggaacccttttctgactcagccgattacctccagaataggatcggctcgaattccctgcattactgcatccagggcaatcctcaatagatggcaacctcatacccttattccagcaaaatctaaaaaattcacaatcccaatgaggatcaaaaccaccatcttcttcatgatatttatcttgttgccttccatacttcctcttgtatttgctgataatcctagccgaattcacctgaaattttctattattcccccccatcggccgtccttccagacgtatgcaccatattaacagggaaagggttgccatcaaccttcattggcttctttgaatcatcaaatttgatcttccctccctcaatggccgcctggacttgttgcctaaagaccttgcaaccattagttgagtgagaaccagaattatgccacttgcaatatcttcttttgcccaattcttcggctgatgggatcagatgaccagcaggaagttgaatttgtttcttccaaagcaatacgtcaaaaatcttgtcagccttggtgatgtcgaagtcaaacctctcctcttttccagagctctttacccattggcaaggtatgactttctcgctcttgacccattcggctgccgccacttcgaaatcatcatcctcatcatcagaatcatacatgtaaggatatacatgattgattttcttgaagttcttctttgcctcagcaaacctttgctcatgtagagtcaccttttgtgcaagatgagataaactctcaaaatcttgagccgaaaacttttctttgattggtgctatcaacccctgaaaagctaaatcggctaactgagaatctgtcaaagacaaactgtaacacctgtttctcatctccctaaacctttgaatgtaatcttgcacagactcatcatgcctttgtttaattgttattaaatcggatagtttcatctcatgaattccactgtaaaaataactatgaaactgcttctccaaatcagctcaactgttgacagaattgtatggcaaggaagaaaaccatgtgaatgctgatcctgacaaagataaaggaaacaatctaactctcaaagcttctgtagccgatgcctcaccacattgatccaagaatcggctgacatgttcataagttgaaatattatcctgccctgagaattttgagaagtctggtactttgtatcagctaggcaatggaaccctctcaaaccactcagaataaggatgccgatacaaatttccagtatcttttggcttgagcccaaactgttccctcattacatctgcaatcatatcagtccatgatgtttgctaaggtactccttgtatttgttgctgcattggctcaaactgattgaattgaggagcgtactgacgttggcgatcctgtctgctgatactgaacatgatgtgacagaggctgatattgataattcagatttcctccttgatagttctggagattcgtctgaatattatgcaccaaatgtttagggataacctgaggcataattgattgatcggcctgtacgtgatggaccaagtgttcaggaataacttggttcacaggatgctgtattggctgattgtcaggtgtccttaaccttccaacacatgctacaagttttggtgctgagttggctgaaccgtctactgcctcggctgtgcttgctgagtcggcaacggctgtgttgggtcgactattgttggattcggcagaaacattgcagcaacttgatcctgggtcagccgattgacattttgcccagcatgttgtggctactctctagtcaataatctgggattaactatctgccttggtgctgatgatgtaacttgcgcagtagctaaaactggagccgtcggccaagccggcaaagcattagatgtattctgctaatttgctataaccaaaggcctataattcggaaaaacacctcctggtagataaactggtcctgaggcttggtgctcggctatcgagctatcgacaacagtcttcaccatgttggttaagatattaactagcactccaaattgattgatcaaagcatgttgcacagcatagtcgatcctatcttggaaattattgaattgcaaaggcacttggttgccatctgcaccaaggtcttccactgtaccatcttggggaatgtcacccttgtcacctgagccagttgcagtatcttagttaccctaagatgaactcgagccgacctcatcggctgcaaccaccttcagtttgtacttttgtacgatggtccctctacgggtctcttgaaaagaatccataaacttgcccttcacgttgctcatcatctgttcaagttcatccctttgcttagctgtcagcctatctaatgtgattgggacaatattggttgagtcgacttcagctgatggattttggcacctgttttgttcacaggaggtttgaaccctgttccctgtgatggtggtggttttttagccatcgggatgaggtcgtcgaaaactcgggtcccaccgggcatgccaaaagcgtgttgatgtaaaaacacgaggcctgagagatctgcttaactccagtgcaggtccaaaatcttgccttttaggttcatgagcatgccagttgatttgatcctgcaatcaacaagaaacaaagacaaataaaccgtagttaatccataaattatagccgatcggccagccgccgatgacgtatcatttatactcgagctgatgtcatctctgtatcgatcggctgtgcgaggcaataataaagaaactagatctattcgatcggctgtagatatcaatgatatataattttcatgtcgacatatacttaaatcaagtgattgggatagatcggtcgccatgccgagacagtataaatcacttagatcgaaatatatgttaacaaggaaactataaccattcatagcatagtcaatcagatagatctagtgtgtatcggctaatactccgatactactctacattaagatattaaagcaagtaaaatatatcaaacgtaaagtctaatacacctaaaagcaataagatcttaacataaagggcagatctagcatatcaactaagcacatggaatataaagctaaatcaggtaagatcggctgaaaccccgatactactctaatc

SEQ ID NO: 26758 - DNA, 22146 bp, Oryza sativa
aggggtatttttgcatgctggtgagttaagagccccgcatgcaaaaatacacccttattttcgcgtacggacgctttaagtggtctgtttggcaaaaattgaattttgtgtgcgggtctctgagccgtatgtgaaaatgggagttgatttttacagacacaaacatttatggaaacctattagagtatttgtccagaaaaatcatttttgcactagtgtgattattttaagggcgtatagatagtttacagcggcattaacactactacaggacatggctgttgtaacacagctatgtgctactacatacccaaaaaggtgttactgaggtccgcagtaacacaaaatataagtgatgcaactgcctatgttacgggcatatagtctagtagcacatatttagtgttccaacctataaaaaagggtgttacaacaaagcctagtagcacataactaagtgttccaacaaagtagaaaaaggtgttacaaccatatcgtagtcgcacatattagatgttacaaggcatatactagtaactgttgacggttgttatcgatcagtttcgaccatcaatattgccaaaatagaggagaactagtgatgcttgcaatgcataattacgttagaataataatattccactagtattaggtatactaacattttgcagagaatgacaataaagtgaaggagaatcgacatcaacacagacgataaatcaatcgcacgatgtcgacaatcagacttatgtatgaatgggccaagaactcagaattgacacgatgaattgggacaaaattcacaagtctgcaaagtggagcaatagaggaggccaccagccgaaattgggctagattgggccagccccaggttcggcccaacctggtggttcggccgaaccaatccttgcgccgttggatccaggttttggcgtggacgtccaggattgcatcccaatgacagttggatggcacttcggacaattccccttccacaaccgtcataactacctctatataaggagctcactctcttcacttcaacacacacctcaagcaatagctctctcatttctctcaagcttagtttagtagtatctagctagtggaataggaatagagtagaaatcaggagtccgaaagtcttcggaagagttcgggtatgactctagcagcttttctcttctcttttgtaagccttgtacttttattagaatactcttctaaatacatttatggtattgaaatactttccgagtatatgagtacctactttatattatgttcttgttatactgaatatacggctagcttatctaggagatgctttggtgcgggtataatgtttgcttatgcaattactctatgtcatgacgatgatattagagtagtatctggtagtttagacgtggtgtctagattacgggatatcattatttggggttatatattgcggatgagaggtgggccgctgatggtgacagctcagtacaggtattcctccgcgcctatatataatcctaagttaatttcctggggagggtattcctccgtatttagcccggttgtgtggttatgatgggctgtcgtaaggaactcagcagtcaggggtggcttctcgaagtaccagaagggcatcggaaagagggtattagctagtatatcagttaactaagatgtatgtatactatgtatattagaagtataggaatagattatcttcctcttttctttccacttagcttagataatatattatgaaaatgagtagttaatgcttgtgtgtcactctacccttggattatcttaactcctacttagaatatgattattacaagcaacatataaattattagtcaagtcctctctacatgatcttcccacgggataaaataaatacaatacccttggaatactctcgggtgaaatgctataatggtatatccgtgcgcttgcggataaactctgtaactataatataccaaaagtatttatgcgccattgctgggaattatatttctagtaatgtcgttaagaaataccaacagtaacaccattttttaacctcaggttgcactttggaacaccttgctataggtcccggtaacacatatcttggccactagtaacacatcaaatgcacagtacagcaaaacaataatgatttgattaccaataatgctctaattagctttttttttacattgttgccttttaattttcaggaatgtgccaaaatatttcaaaatatcctttataggcatcacatatctcaaataacacaaatcaacatggcaatttgaattgcatacgaagcaaatgttattttcatcaatccacatatcaacaataagtacaatttctaaacgattttacaaagtgtgtctatttctatattcttcataaaattatttgctgcttgatccattgttgcacctgaacgtgcatctttgctcttaagttccaactgagtatcaacttgtatgtgtaatgtgtacaataaactgtacctgcagttgatcatgatgaaaatatccctgttaagcccataaaatttacattgaattgtacatatgaaagatcaaacacggattacgccacaaaatgagttaagcgagaacggaagtatctaagacataacagttgccaatcaagctaatcattattaagtaataagaagtaaacctgtttgtaactgtgacagataatttggatagatgccatattaacatcaatatctgaaatatgtttgacaaacttaaaacttcatgttattctacttttattgaatcttacatggataagcaattaagtttgacatgtccggcaattcacaaattttgagactgcggaagtaaatgaatagaacagtgccttgtgagatctcctaaataatcacacagaattggagttcaatgcttttatttctaaaaatttggcagcacaaatattgtgatggatgagaaatgctattgttgctttgaaaaaattaaagcatgcagtccaatggataaaaggacggtgcatacagttctgcgcataaggaaaatgaatctaacacagataatacaatgaaaacttgcattggataagaatactattatgtgatttcagcaacaagaccagtatttatcttggaataagaatcaccaattgtttatccacaatgaactaataaagcatactattttttctatatgagaaatttcaacacaatatatatactgatctagtccaataatgtatgaaaaaaatcaaataaaaactttccaatgattagtatataaagatacaactcaaagttgatgcatatttttctatatatcacatttgcataaatttgcatgaagataaaattttctactttttttcggtttacctgaacctctgaacttgaatgctgaagaaatccttctaagttacaaacaaagaatactagattccttcaactacaatcccttttctgttccttgaactacaatcccttttctgttagaaacaatatacaaccatagatcatggaaataattagaagtgaagcaaatactaccataccagagaaaagttctgaaaagctatcaccattgccaattctgattgcactatgtatctaccataactataccaacttcagaaaatctcagtttttccaacagtatggatatttcaatcagaggatgcatgcagcaggctattttaagcatatattatagcccgttataagcatatattagcatgtatagcccattattgcttaccatatcatagtttcctcctgtgacattgagattagtgacaggcgtagccatgagctaatcactactaagcaataataagaagaatatcaaccatggtctgtagtaaatgccatattagcatcgactgctagagaaaaatttgacaaagttcagaatatatgttttattctagtgttattgaaccatagatcagcaatcagctaatgtgccttgtaaaatttcgtaagtagtcaaagacagagctggagttcaatgctcccattgctccaaattttggtgagtgccattgtaaatgttgggatgaataaacaatgatctaatcgctacatataaactttgaaatttcgcttcttgtctacccacttaactagcatatcattatataaactgagctggtattaatctagcaacaaaaaaacaagaaacaaaaacaatgaagaacagacaacttcaccttctgttatagctaggaatatttgtgttccccctttggttgcaaccaaaggccaaatctcgtcatacacaaaacaaaaattgctgagattagtttacgggttggagattagagagagagagagagttgaggtctgaggagtaggggaagagaaggactggtaaaggaacatagctgttgaaccgaggggagcaccgccctggtatctggcctgagggagaagccccacgtactagcacatctggccatcgcaagcggaactagtcaccaactcacctttgagctcgtcgggatgcgtgacgccgccgagcgctgctgtggggaggcgccaatgtgctgccaagatcttcgccatgggggtggagacggtggctgagagctcgatgacctggctacaggccgggagacggcggcgtgggggccggcgggtagcgacgactgggggggaggcggaggagaaaatggccattttgccatgttcaaaacacggtttcgctagaatgccattccgaaaacgtgattcgataaaataccaatatgaagcgtgcgtctaccaccactttgctattttcaccattttattcattttcgaaaagattttctctcctctactaggtgttgagacaaaattgccccttatcaacttagagaacacggtgagagaggagacagagagaaggggcggcgacgccgctattgccggccggcgcgccgcctctccgcatcatgcgcggcaacatcgtgcgcgtccgccgcggcggccttcgcatgctttactcggcgccggcgccaacgctgagaacgggatcgatcatcgacgaggccctctacatgatgaagctccgcaagaacgtcgtcgactcgatgaaggccgacctctgcacccctgtcgatgccgccacccgcgatggtggagcagaggcgaggggctagcgccggcatggtttcggcggcggcgtcgtccatgaggtcgtcgtcatcatggtcgaagtcgaccgcctccacatcggtgtcccggcggagctcctggcgcaccgccagcgtccgcaccaaccttcacctgatcttcgccttcctcaccgacgacctcagcatccgcgaccagctccgcccagcgctcctctacctctaccgcctcggcttccacgacggcctcagcttccttcgacggtgtcctcgtcgcctcactgaccccgccagtgagcctctgttctccacggcgacggcagcaagcaatgctcccacgctctgcctcaggcgccgcgggcctcgcggcgggcggccgcctccgccgcggtgctcccctgccgcaggcgcgctgccgccgccgtcggccgacagcatccgacggctggtgctaacgccggagggtcgggcgaagttggatgcgccgcttcccgaccaccgccgctctgacggcgtcctcgagagagaggaagaggggaagaaggggaaaaagagaggtgagagagtatgaccggtggggcccacgttaggggtattttggtctagggaaagcattccagtgaaaaatgatttcgaaaatacacaaaatggctaaaatggcaaagtggcggtgagcacacgttttatattggtattttagcgaaacgtgtttttgagatggcattctagcgaaaccgcttcttgaacgtggctaaatgtctattttcttgaggcggagggaccagtgtgtataggggaggggagaggatggggtggcggcgttgagcggtctggggagtggggggggagtggggactgggagtgggagggtaagagtccaagagatgagcactttaattagttggctgatgactgatgagattatcctacttgagcagagcccgccaataccaatttcaccagttccaaaatttctctcaccccgccctgtctccaaaatttcgagcttagttgtagatagatttttacaactaaaattctgtttttggaattcctaatttgattttaaggtgaaaatatatttttatttccaatatatatcttaaatggcattgttgcaaatagtagtcactgaagggagtacaagggagaaaaacgagtggcttatcgccttctcggcatggctagggcagctccaccgccgccgacgcggccttcctccgaccgcattcgcttgcctctttccctttcacttgcaaggccgcattcgcttgctgttttcccgttcacctacaaggtcgcctcagcatagacacgacatctgcaaggtcgtgatggctacagtcttcatgggcgacgagaggaacatgagatgggagtcggggagacgctgctaaactcggctgcgagttggcgccattactccctcaccaccgccgacatcctcattgcccatccgtccagtggcccatggcctccattgctcctccaaaagagttccttcgcggcccttgccatcgcctttggacttcggtgcccgacggactacgagctccatcagccatagcaacggatggttggatttgcttcctactacaccactaccataaccaatggggttacaactaaaggtctattttagtttgtgtcgagtatgtgtacgtagtcgattacagtttagggtttggagttatactaggtgttagaaatagagtaagagtcggactctatcctactatctctcttaaacagatgggcaaatctgctgtaactgcacataatgactagattgctcaccaccttcgccagtgccattgatcagggtagataaggagaacatcggtgacgatacacgcctttgatgcaacgagcgtgtgctgcacgggagcacctagtaatgaaaatattagaatgaagcacacggccgacctccaaacatacgtagtttgtcatttagatactaaactaaatgtatttttaggtctacgaacttgtcttcggtgtcatacaggtgcaagcgggctccaaccgctctttgcattgacatggcataccattgttggtttttttattttttagatctttttatttttttcattttattaatagacatttctaaaaaatatttccaaatctgaaccttttgaccacgcgcacacacagctgacctgccacgccagggtaggaggggaggtttttggggggaggggggtttcctcaaggcttagagggatggccgtaggtggcggaggacgcagtgggcggtggacttcggcgggcggtgaggcagcggcgccatcgaagccgcagggatgaaggagggcggtgggccagcgtcggcggcggggcaaagcaagcgtgcgattaggaggcggcggccggtggtggcggatccgatggcagggagccgccggagacggggaagatggcgtggcagggacatctccccatcaccaccttgagaagaaagagaggtgggaaggaggagcggggaggcggaggagcctcgctaggggacctcactggcgctgttgactccttccgaccagccgacgaggcaggcggcagcgcggtggggcagtggtggcggtggattggaatgctcgaggaagcgaggggaacgggagaagaagaggtagggttgagtgcttgcatgaatcttaaagcatatctgatggtccaaaattcgaatgatagaaggtgagattttctgtgacaagatgtgtagcaaatcaaattcattcaatcctcttttatctaagtcctaccactggcgccaaagtcttactccatatggcggtaaatcgaattcttctagtgaatttcccgcgcccaattttttctttggcgccaaatctctgcatatggcgccaaatccatcccagggcgcgcctaatctctcctgaaataactcctcccagcaccaatggtctcttcagccccttctcctcccctgactccctgagagtccatgcaaccatgcccagtttcctccacgcgcttgctctagctggcccttccactgcctgtgtccaccactcccaggcgccaacacccgcttcctatgacagcgtcgagacggagaaggggcagcgcctggcagccaacaggagggcggaggcgggggcgcggcgcggagcgccgccggctgcggagcgcggtcgcgtggagcggtgttgcttcgcagcggccgggcgcgaaagcactggctgcagcagcatggtagctggctatttggcgagcatagcataagcagcagccagcgagaggtaaataggtgagcttgccacaattgaaatctgaacaattagatttggaagttcaatgcatgatctatagaagatcttttttttttttttttttgcagccaagcagcagccagcgtcctgactccagagcaatgtttctcgatttattttggactgggaatggtttgagaatgggttcaacccattttcttgtgtttgttttgaaccgatttggattatctttggtacttgccgagtaggtttgggttttgggagtgattaatttgtttggagtggtttggtagtatgctatacagacaaattgttctgaagtgtgtcgttaaattagtctagaaaactattaggtgatgatttaatttgcctccgttttgtgcatactgtatatgtaaactttgatcatcatacctataggctgatatttatcatgtaagcatttctttcatcttatctaccgcagtcgtgtagacaatttgctgaaaatatttcaaacaatgtgcagcaagacagcaagatggtggatagatattgactagtaaaaactagcccatgaagtatgcaatactatgtcggacaatttgtttatatatacatcagaatcagaacttccttgcattatttattttacttacctgaacccatgaactgaattcctgaaaatgtttttagttacaaatgaagaacactgaggtttgactgaaaaatacaatctcagactcatcagttgtggaattagatcagtgtgttttccaattgatgtttactttggcaatttggtacatttcgatgaaatatgatgtttccattttttttagtgaatagtttggatatatttattcttcttcatactagtcatggatgtctcagtttttattggaaatttggaaactatcctttgcaattcaataggtgcaccatatacgcttcaatacaatttaaagttggtaattcctaacatgtgtatcatacattgttctttggtgcaaaccataagccaactgcaagatatatgttgaaatatttaaaataagataatgaatcactaaatctaaagcttactgattcatactgtgagatttactctgcacaagcttgaattacatgataaatagcttatttgtgatggttcagttgttacttgtgtactctgtttttttcgcacatgattataacacggatgaagaaacaagtattaagtatttaaatgttgactcagaaaaaaagtaggatctcaaatattgccatctatatataaacaattagtacaaaaatcaaagcaaaatatagtttatttccatttatcatgcccataaattgatatttttattttataaggttgaaatatgatactagacgcaaaggacatgtagaagtaattaaaaaaaaggctatgccaccaattagtggttatcatgcaactgtgcgatcctggatccattgtcttggcaacacatcctttgtaacacgtattttgtgctcctacctcacttttctagagctatattttacatcttttgaaaatgtgttacaagcagatgttgtagcacatagtatgtgttcctgtgatattgccgtgtaacacatcctagtatgtgttacagggtttgttacaatatacctgtcctgcagtagtggccaattcgcgtatgctggcttcaccgaggggagagagggagggcatcccaggaggcatttgcttactggtggggctgcctgaagtgcctaggcccagtggaagtgaaagagagggaaatttgagaaagaggtggtgtcccgctttgaaagctgtttggggatttgaccctagggtctcgccgagttgtgttggtgggaaaaaaattgcaaaatttacaatgagtagaggagttcatcataactttattaattactagaaaaaatacatgtgttgtaatgggtgaagatgttttcagtgatacaacaactattaggtgatgggcaatcgcacgggtaaagatcttttcagtgacacaatagctattaggagctgagcaataaataaaaatattagaatcgctatacattgtaatttaaaaaataatgaatatccttcattggttttagacggaagcatatttcttccttacttttcagcttagcctagtctgatacctccctccgcccgtcctgcctctcttcggcccaacccacaagtagagacgcaactcgcatagccaactgtttgtcctcaaccttcaaaaacagtccccgatcttctcatcaaatttggccgaatctcttgttctcctaaaattggttgagggcttttgatccattcgttctcctctttccctttttcataaaatcaggtaaaaaggccggggaagcttgccggtaggccatcaacaatggagcgacaaattgaagctgaattgaaagggaaaatcatggggaaaatactaaggaataagtggggaatcaatttttgcaatcaattttaggaggaaacatgtgggaaggtagatcgacgttgtgatgatgctagggtttggcctgggcagcggctagaggtgctgcgcgtgtgcaactgattggatactactaagatagattggatactactgagattggacaaaagaaccggcaaccaaagaaagggatggataaaaaaactcgcacaaaaaaattccacgtgcaaaaaaatacaaatctgacaaaaaaatcgacgacgaaaaaaaagaagacggacaaaaataaaagcaaaccggaagtgataaagacaaatattagaaaacaaactcggatgacgtaccaaaattttgacaaaaacatcttcaattttttttttaatagtagagaaaaggcctccatcccaaattatagggcgcctccttttttagaaaaatcaaacttgataacttttgactaatgatcatactaaccatatatatactaagtattatacatgttatataattagattcatattttgatgtactttctttttatgctaatttcatatttataggaaacctaatataaaataaattaatggtcacagtgtgttattgaagaccgtgtaaaaaaatataaacctaaattataatttaggatggatggagtataatttaagtactatagagagttcttcaattttgacaccattcttctcatatactagataataacccgcgctttgctgtgagatatatattagatagtaaagaaataataaaatgatttggattgtaatattatgaaaatgatttgagaatgatgatttagcacgtgtatgtttagttttagaattgaaataaattatagatataattattatatgcttgcatgttgagctctgtgtgcttaatgggtcgatgtggcatgcttgcatgtaggttttaggagagccaataaatactatgcttgaacgttgagttttatgtgtttagggcaggtgttatagaagatgtgactaccaccttcaaatttatctatatcattcactcataaactaatagataactcatgcaataaaacacctctagtacacaaataccaacgtctctaatactctcacactcttcttaaaatttgtgtggaggttacctcttgatttaggggtagctcattatctctctcctcacttctctactccaccctcatcacttaatttaatttaatgtgccattcttagggacagcatatgaagcattatactcagctttttgcaaatgattatttgaagggtgcagagcatattttacagcagtattgaattgtgctactatatataactcacagatctcgatcatgaggccatgggtcggcagtgcaattgagtacatcaggggaatttttactacgccatctcgataattatttctaaatctaaacttttttactacgccaccccgtatgacagtacgaattaatattgtcacatcacctacagtcgacatgtcagtttttgttttgctactatgctttgccactacgctcttacttaattctaaactttttcttcaaacttttaacttttccatcacatcaaaactttccaacacacacaaccaaatttttcatcacatcgttccaatttcaaccaaacttctaattttggtgtaaactaaatacaccctacaatgtggctagagtagaaataagttttgaaagttttgaaataagttttgaaagggtttattttaaaaaataaaaataaaaaaggttaaaaaaattaaaaagtcttcaaggaagtgccgcaatgttaaggaagccctattttgaaggcagtacttccttctcattattttctgcttcccttgccctattttctccctaacatgtggcccatgaacagtaacatgtggcccatgaacagtgtgtgccatctactagaaaataatgagaaggagaagaaaagatgcccaggttgccaggtgctatatttttttacactgtacgaacgtagatatttatatacatgcccacacactcacccatgcatataaacgcataaacacgtacctacctctttaattacccccgagagattacgttggaatatatagagagatgatgttaccacttatgtcttattattgattgatacgttgcctacaaataaaaaaataattgctcataaatgtaagcatatgtgtcaaggttagaacttgacaccagatgaataggtgctatcataacaaacatatataaccaactgaacttcgttcagctcgcatgcaggtgcacattattgttttggacttttgtaggaatggatttgaggaaaaattaaattgaatattttactatagattttaatttaattatgaaatttggttcatggggatattggggattgttatccaaggtataggaattagagcttaggcaacaaatttggactgaactaaaatttgaaattcaatggaatttgtaatcaggaatactggaagggaaaaaagaggaattgattgggaaattatttcggaccgaaatttcggtcgtatcaagcctcccccccaatagaaagtgctcgttcaatatatatattgaaccctggttagtatgcaaggtttacttttttatttggttgggtgagtgggatgatccaattttatgtttggtttgagccataaaggtgaatttttttatgcagttttttttagttgaaggaagtaaggtgcatgagctattgtgatcactctggtgagaataccccttcacttcatatatctcactgataaagactgccttaactcaagcaggttgggcaaactatcaaagcgaagaattctttcggatcttacgtaataaaagatacatgaaatatccaaagattagtatatcgttcataaaatgaaaaatcaaagattagccggggctgcctacggctcgggcgcccgacatcatgccgatgtcagcgcccgatttacgtacaaaactactttaaactgatgtttctcttaaattacttatccaaatcatgatctgattacaccattaaattcgttacaattaaatcttcaaaacaagaccacacatggatatattccgatgaaaaaatagcttattattgatttttttaaatgttgcacgatgttccaccaggtatatcggaattgtttcactaagtagatcgaaaatgtttcactcgttgaaattaggtgctgtttcaacttatataaaaacaatattttagcaaatagcgaaagaatgttttagttcactacaacattagatctatacatagtgaagcattatgagtacactaggtgaaacatttttcggtggaacaaaaaataaaccaaatttccttaatagggggtttccaaaatatgtgggtttttgttgcaatggaatgtttcgttcactgcaacattagatctatatatagtgaaacattgtcagtacactagatgaaacatttttgctggaacaaaaaataaaccaaattctcttaatagagagtttccaaaatatatgggtaatttgttgcaatagagttgtgtgtgaggacacgtggtgggtcaggggaggggagcgcgcgtgcatggggtaggggagcgcccgatttctcctcccccgcccgatcacctgacgggcatcattatcgagattactccggctgctcccccaaatttgatggcgaaaatcggagtgcaaataacctcatgaacattagtaattattatggatgcatataatgattaatgtgtttacacccaaatttggcacctaggagtaaaataagaaaaattgccaaagtttggaagtctgccggttttcctctgtggggccggtctgaccgccgtgtgtgggccggtctgaccggtggtgtgtggccggtctgaccggcagagtccgagtccaggtctgtttcaccgggtctcgaagtttccttgctcaggaaggcatgtttctggtttcctttggattctatcccgagttggacgtggaggagggcctgtaaagggtaagaccaacccctatataagggggtaaggccggttcattgtaaaaaccaatctacaatcaatcaatcgaatcgtttttcatattgcttttagttttctcttagtttgtccatctttgtcgatttgcgccgtaaatcgtccaccgcccctacaagagtgcgacatctctttgtaggtttgtcctgaaaaccttccgttttgcccacgagacgggtagttatctagaatcggctccgttagccagtttagttatcaaaacctatcttggtttagcttttgctagattgagatggttggtgactctagtatcaacgcaaggcgtttacgtgctgcgatcgtgcttgtcaacttgtcacaaaaagttgccaagatgatttttggcgactccactagggaaatctgctcaacgtcatctcaacttcgatatcgccatgacaaagcctccatcaaccaaggcggaggtggaaccggtcaatgtgataccagtcgcattggaggagcttgatgagggagcacgcaaagctttagatgaacatctcaaggcatatactcaagatctactaatgaaggcgtgcgctaggacccgccaaggtgtgattttcaagccgggatcattgcctaaacatactttcgacatggtaagtgctgaagaggtatcacaatctatccaacaacaaattgcgcatacgatagattcatctatggttactttaaataataagttagatgcatctatcgaaactcgttgtgaagaatttatgaggactaaatttggccctctcatggccgattttatgttcaaagataaagcctctaccagtgctagccaagcccccatagatcaaataagtagtaaaaccgatggggtgaagacgcaacaaactgacgaggggtggtcagcgcatacagccggtctgaccgggctagatggtcggttagaccgcgactttgccgccggtcagaccggtcagaccgggtattaccccggcggtcagatcggaccccaaaccggtctgaccgcgcctttggatgccggtcagttcggggcttggaccggtcagaccggcgcaatcatcccaatacagggggtagatccaatgacaaataacatgtttttataccatataccagcacccaatcctcctatatccactattggtccccaagttcaaccacatatccctaatgcttacaatgatcctactaggggatatactcccgatactaggcatggccaatataattatattgcgccgcaaccacaacctattaagccaccaaacccaccaccaaatcaaaataggcctgataatatggaggaattgattagtggtattattaaggataaatttggaattaaagctaggaatcatactaaggtttaccaaaagccatatcctgattactatgacaacataccatatcctcgtggttatagagttcccgaatttaccaagtttagtggtgaggatagtaagaccacatgagagcatgtaggtcaattcttagcgcaatgtggagaggctagtagttctgatacttttaaattgcgtttgttttctttatctttgtccggtacttcttttatatggtttacttcttttccggcaaattctattcatacttggactcaagtagaacaaagatttcatgattatttttatactggtgaaactgaacttaggctaagtgatttaacatcggttaggcaaaaacacaatgaatcagtcattgattatgttaagagatttagcgatgttagaaaccgatgttatagcttgaatataactgatagagatttggctgatcttgcttttaatggtttaattgctcctattaaagaaagattagattgccaacaatttttttatgttagtcaactcatgcaaaaggctctggctcaggaaagccgggttaaggatagcaaaaaatttgttagagcctaatgttaatttgattgattatcctgaagctagtgatagtgatgatgagggtgatcatgatatgtatgttgcggagtgatcatgaactaacaaaaataagccttttgtttgctctaatttaatgccgactcctcgtaaagatcggcaaagtaaggttaagtatagttttgacgtggccaaatgtgatatgatttttttttatcttttgcaagaaaaacaaattagattacctaaaggccatgtcataccctctcaagtagaattgaagcgtcaagcttattgtaaatggcatgattctcactctcattctactaatgattgcaatgtgtttcgacgacaggtttaatcggccatagatgaagggcgattgaaatttaccgatggttccaagatgaagcttgatcatgatcctttcccggtgaatacaattaatttcaacaataagaaggtgttgattggtcaaggagtggtcattggagagcctaggccaaagatgatggtgccaaagaatccggaggttggtgtttggaaggagaataggagcgaagtttcaagttctaaagctcctaagaggactaaggtgaccttcgatatgcttttgaataagtatgagaagcaaggtggtgagaaagctcgcaacaaaaggaaaagaccaagatcacctcctagggagcgatttggtcattcaccaagacagtcggaatcacctacatatcatcgttctcaaaacatgtcatgggggccttatccaatgctgccgtcgggttatccttttccttactacatgccatggggggcaacaccatcaatgttcaatcatatgcctccaatgcaatacaaccggggccagctcgttagcgtttatctttaccaaacaatggccagttttatgctaagaaccgggccaatgaggagaaaagggaaggaaagcgtgtcaaagtggagattaggacttcggaggtgattactatcaaagtggggtctcatgatgagccaataccttctggagatgaagttggagagtcttcaagcaataaatccaacgccgggaccagctcatcgcaggcggccggtctgactaggccctctggccggtctgaccgcagccctaaggctggtctgaccgggccatcaggccggtttgaccgtcagcccaatgtcggtatgaccggcgcttctggctggtctgactaatggtctacgtccggtctaaccgggctccagcgccggttcgacaggagatttgcaaagggtagttcaggggcttcatcgtcttcgagtaaaatcaacagagggcattatttacctcctggaacagagccgaaaccgaggtggatgcctaaggatttgacgggtaccaaaagagaaggttgcaacatctttgggcccaagaattaagagagagagaggccgaagagcaaagagatagaaggttcaatgagttgcgaccactgcctacaaagatgtggaggcataaatccatagagattgaagaaccggttgttgtgcaaaaggagaaggaagaacaatcggttgctaaggatgaatcatctccaaaggaggacatggatgtcaacatggtgtgtatgttgcctatggagttttacgctatagatgaagccgaggttgctcaattctcactaggtcctaaagatgcggtttttgagaagcctgatgagtcaaaccgtcatatgaagcctctctatttcaaaggtcatattgatgggaagccggtctctaggatgctagtggatggaggtgctgccatgaatttcatgccatactcgttgttcaagaagttggggcatggagatgatgagttgaagaagaccaacataattctcaatggcttcaatggtgaaccaacggaggcgaaggatatcttttcagtggagcttaccgtgggaaacaagacgctaccaaccgctttcttcatcgtcgatgtgcaaggtaactacaatgttattttgggtcgttgttggatccatgccatttgttgtgtgccttttaccttgcatcaatgtttaattcaatgggacggcgatgatgttgagattgttcaagcggatacatcgcccgaggttgcaatggccaatgcaacatttgagtggtgttatgggaatattcaatgcttatcgggatggatctttctagctatgattttattagtatcgccaatggcaaatttgtacctatctctgtatagccggctagtttagcacggctaggccatatcactttatgtaatgaataaagaagctaatttagagtggttgcaaaagagggtgcaagaatatcggtctacaaagaacgatattagtgaaactattgaagattttgatgaagtagagaagcttggttaagggttcacatcggccgatccgttgcaagaagttgacataggtgatgaaactaagccaaggccaacttttgtaaacaaaaacatgagagtcgattataaagctaaaataatcgagctacttaaggagtatgttgattgcttcgcatggagtatctgttgacgaaaaaatcgaacacatcggcctggaagatctgcttaactcatgtgcaggtccaaagattcatgagatgcaggcgtgccagtcagtttgatcctgcaactgacaagatatgcaaatagtaaatcaaaacagccgatcggctgacaagccgatgaagtagttccagccgatagccaataatagccgatgccgatatcagccgatagcgatagggattaagcaatcggctatatgtgcaatgtagataatgatataaaggcaatctgctgttgatgatgtaataaaataacaatataaccgagtagaaaccaattggctagaaacaagatataataatcactgatccgaaggttaaaacacacatcggctggaggtccgatgtcatgaaatccacaagattagattaaacagtgacacctttgttgtcatcggctaaatccaatttatatgtatatgcaatccttatgagccgatgcaacgtccagataactcaccggctgaaaccccgatgaaacccttattggcagtcaaaaagcaggctagagattatggttctatacatgacttagtagatcaaactcaactgatgcagcactaagtatgaaaagaaacataatatctagacgatcaaaccgttgactgagttttcagggtggtagatatctaagttaatctaatctagcaacgcgatttagccgataccggcagaaaccctaaaacgagaagcagctgatagagctaaattgatatgctaagactagattaatagagacatatgataaataggtaggcaaatatatcatccaaaccagagcaatccaagaggtcgaatgtactgatgcagccttgaacgacgccgacgtaaacgatgcaattgcctggaccgacggaacattgaacttaccccttcgccggagatcgaagacgatgcagccccgcgtcgggtgccaagttccgccggaacgtagaaacaaaagtagaagtaaaaagggtggcgatgcaccgaattgtattgatcgagagataattacatagaccccgggtgtacatatttatacccatgggttgatacaagtccttgtcggacaagaaagaaactatcctaaagataaaaggaaaagataaagtccttatcggacactaaacatactttcctaaagataaaaggaaactaacaaactatacctaattaatagataaactgccatgccgcatccttcttgaactcgaactcttctagataagcttcctttgattgatttgattccaccgagaacacgacagcatggcaacttgatgactcccatcggctgattcctccaatcggctgattccagtactctggagctgatattgactctaagccgatgatgacttcgggcttgaccaaattttcactattaacagtatcatgagatgccgggtcttaaccgtgatcttgtcgagcatcggcttccaattaaaccgggttttaggcctcataaacaaccgcctcgtcgtttcaatcctttgctatatgaccgagtcaaagaagagattgatcggttgttgaaagcggggtttattaggccatgtcattatgcggagtggatttctagcatagttccggtggagaagaaggggagtggtaagattagagtttgcatagactttagagatttgaataaagctactcccaaagatgaatatcctatgcctatagccgacatgatgattaatgatgcctcgggtcataatgtgattagctttttggatggtaatgccagctacaatcaaatctttatgacggaggaggatatgtacaagacggcttttaggtgcccgggatttgttggtatatttgagtgggttgtcataacttttggattgaagaacgccgaggcaacatatcaaagggcaacgaatttgatcttccatgatttactaggtattatcttagaaatctatattgatgatattgttgtcaaatcggatggtattgtgggacatagccgatttgaggttagcttttgagaggatgcgccggtatggtttgaagatgaacccacttaaatgtgcttttggtgtgtcggcggggaagttcttaggattcatggtgcatgaaagaggagttgagattgatcctaagcagatagaaaagattcgtgatttcaaagcgccgacatggaagtaggaagttcaaaaattactaggtaaggtgaattatttgaggagatttatatctaacctagcgggtaaaatcgatgcttttgtccctatacttcgtttgaaaaaagaagccaattttacttggggtgcaaaacaacaagaggcgtttgaaagattgaaaaggtatttatctactccacccgtggtacgagcgactaaagttggaatgccgtttcggttatatattgcttccgaagacaaagtcagtggtgccgttttggcacaagaggaagatggcaaggaatatatcattacatatttgagccgccgtcttttgtatgccgaaacgaggtatgtctttatagggagactttgtttatgcctatactgtgcttgtaccaaattgcggcattatttgttatctagtacatgcatagttgtttgtcaagctgatgttattaaacacatgttgcaaaggccaattctaagtgggagaattggcaagtgggcatacactttgattgaatatgatttggcttatgaaccattgaaatatatgagaggccaaattgtagttgattttatagtagaccatcctgtagatattgcttatgaggaagaggtttgcttagttgaagttataccttggaatatttatttttatggttcttgcaaagtaaggtcaaggcataggggtagttttgttttcacctaa

SEQ ID NO: 26759 - DNA, 2675 bp, Oryza sativa
tggaagcttttggtgattcggaattggtggtgcaacagttgccggagtttacaattgcttggacggatcactaaataggtatcttgattcatgtttcgatattattgccaattttgataattttgctattagacatattgctaggcatgataattctatagcaaatgatttggcacaacatgcatctagctataatgtgaagaagggagtatttttgatattggaagagccggtgcttgattttaaacctttgtgtgaaattggcaaaatcacaaaccaggggtggtctgactggcgttgcacggctggtctgaccggtgaccaggggcggtctgaccggccttgcatagccggtctgaccagttctggatagagcgctggggggcacgccgcaattgattcaaagccaaattaattgtaaattcggacatttgcgcccagaagacaaaagaggattggagaattcctttgattaaatatttgaaagatcctacacttaaagttgatcggaagatttgtcacgaccggaaatcacccaacgggcgttcctgacgtgcgtgtattattccttgtcccaggaggcaaggtacaccaaaagttgatacaatacagagtttaacaagcggaagcgtatataaaattattacatgggcgacgaaggcccagcacactcagagacaacgaaaaacagcggaagactagggcgacgaccacaggcgcttgacggcaggcacgagctagacaccgaagccttcatcttcagggaactcctcatctgggcttgggaaaattaagcaagactgagtacaaccaccgtactcaacaagacacacccacaaatgcagaataaatgcaagggagtacgagggaattataacataaagggttagggttgcagtaaacagcatttaaagacatttagttgctcaaggccattttgtaaacacgatcctagaactaaacagtattattaatcaaggccgtgaacccacacgaacctgccttaacccaaggcctatgatgattcagaccgaactggcaacccgaccctgggccccagctcgtcccaagccaacccaggccaaccattccacattttagttgttgagcaaattttaagaattataacactgacttgggtacattgctcggcttgcccatatccgagggctcggctattcgaatagattatactctgatcagaggtgtacatctttacccacaagacacatcttcctcacgtgtaaccacgtgccacataccaccacggtatacggacggaagacgtgacatagtttccaacccatcctagccttagacaagagtaccgacccaatcccgcctacggccggaacccccgggacaggcagacggaactgagcccctcacagcagggcaccaaccctgtgctttttgacatctcgactaccgggccgcagctcgtgtagccttcatttgccctggagaatgtccatcgacccccgacttcatccatctccaatccgtgtacttttgtttatgactagactgagccacaaactaagccttacccactagacatgtggaagtacggtagtgctttgcaacagaggcccgagcttaatccttatagtggccggggtgctacttcccacaactggcatgcacccaaaccccaccgaaaacaggttttaggggttttgaaagaggaagagaggtgtatgtccaattccaccataaaccaacaattccagagtgtccaggtgatatgaaataattcccaagtctaaagttgtaaaaccacctaaggttacctaattaaattgcgaagcatctacctagaattaaactagtggtgtcttgagtagagagtccactagttgaggttttgtttgcctagggtgaacaaggtaataataataacaataacgataataatatggtcataacaaaggtgaataggcatggctaaataaaacagtgataacgcgggaatttaaataaagcgataatgcaataatttaaatcaacataattttataaactgggattcaatatgatcaagatgatgtgtcttgccttgctcgttttcccaatcgacggcttcgacttccacgaagagcggatcttccgaagctgcagcgtctacacgaccaacggaaaagaaaaaggctttaacactaaataactccacataacagcagaaacaaagcacaaaaatgggttctttacatcttaaggaaaaattagagacttgaacggtccaattccgagttcaaatggccaagatatggccgtttgaagtttatatgctctttaaatggatatttgcgaatttcttcatttaattttcaattaaaaatcccatttattgcgtcagccgaggggcgggcgcgcggaccgggtccacgggaggtggggcccacgcgtcagccgctcggtccacggtggaccgggcgcacgcggctggcggcggtcggcgccgtgggtcccgcgcgtcagccgcacccgcgggcgcgggcggctgacggccgggcccacttggcagccgcgagggcgcgcccgaggcggcctcgccggcacggccgacgggagcggcgcgcacccgcgccccgcatggtcaccgccggcgaccaccggcgcggcggagcggcgcccgagaaagaggtgggaagggggaaacgaaggggatggtc

SEQ ID NO: 26760 - DNA, 4261 bp, Oryza sativa
cgagagcgagcggcgagcggcggaatcggaagagcggagctcggggagcgattatatagcaacgggagggagagagggcggccgtagagagagcaaacgggcgcggagatctcggccgccattgaatatgccggcgaggtttgcgggattgattccgagcgaatccgagggagagagagaggggaaagagggggaatcgggagaggggattgcggggaataattcccccctcattaaggcgcgcggggaaggcgggatgcggcggattcggcggcggcggcggcgctagggcacgggcggcgacggacgcggcgggaggagggagatgacaggtgggccccacccgtcagcgagagtggcgggcgggcccgcctgtcagcggcgcgcgcgcgcgggggagccgatgggccgcgggagaggagagagagagggagagggaaatgggccgagccggcccaagagggaaaaaggggggggaaaagaacttcttttagggtttttctttttataaacctttttaactttgcttatttcttttcaattattatttgtgctctgaaaattccactaaaatttgtttaagcattttaggcttttaggaaatatacaaaaatcctccaagcctcatttgacttttatctttgcacattttaattgttggaggctttcacatcgaattttaattattctattgcacaattttgaggatgaattttagagtcgatttgggacgcgacaagattaagtggctaccattcaaatatacattgcttgatggagatttatatagccgaaatatagatggagtttggagaggacgtgagcgtattagggtgtgtttggttgggtggatgagtctagatgggagatggccgcccgattttttgtggtgtttggttggagggcagggtgaatggggtggcccggaattgggaatattccctcaatatgctggatgagtgcatccggccgattttgctggatgaagccatccagttttggtctaggtgacgtgtcctattctgattgggtgtggtggcttgattttctgttaagcaagctccaaatgatctttctcctaaaccgtttatctaatttatgattttattacaccgttatatttgttacaattaaatgtttaaaacaagatctcggatgattatattttgattaaaaaatatatatgacaaatgggtcaccaacttatggcttttcccatccatgctatatccctccaaccaaacaagaaattggatcaccatatccatacaaaccgaccaaaaaattggatcgccatatccaacaaaatatgtgttggatagtatagggagtgaggaatactttgaatatttgacacgttgtattgagcctcaggggggcggtatatataggattacatggggaggagataaggaatgattacagatatggaaggagtccacacaaatcaatcctattctaatatgactctaactactatatactctaacatccccccgcagtccaagcgtgagcagcgcggacacttggactaggcggacacttggactagagaagaaaccggcgagagtgctcaatatcgacgatagcccttttgtgccgtagtcgatgtagccaaagcgaagggtgcgagggagccgtggtcgatgtagctgaagtcggggaatcgaggatgtcgaggtagccgtgccgcagggcgcgcatgggacactgtagaatggtcgtggactctcgagagggtgtcatggaccaaggtgcacgaggacgagctgaagacgaacgcggtgacatgatcgtggcaatcgttgaggaagatgatgctgaagagccgatgtagtcgaaccgtgaaggacgagacatcacacagggtttgccaaaccccgggataactcaagacgaatgcgcgcgccggtgttgctaataccgtgcaggcgaggcaggggaccaccatgaatcatacgccaatgttggaggagactagcagagaagcctccaagacggttgtggcacgagaacggcgtagagggagaattgctggagcagcacgcggttgtcggagaagagcgaagtgcagtcaaggaagatacggcgacgctggcgatgaatcatgctggacgaagtagaaggcgatgtagcaggaccaacggcctggatggcaacgtcgatagccatgtagaggtagctggaccaccggcctagagcggcgacggtggcaacttggagatgcggcagtaatgctcaaagtagatgaagaagaacccgacggctagagatgaccaatgcggacgacgaggatgtcgatgcatgaacggcgatgaagacgacgagaggggtgacgctgtgacccgaaggggcgacacaggtgcggcccgatgtcgatatagcggcgagaactccaccggtagtgaggccacgctgaggagggcgcctctccgtgttccaacaaccagtggaggtggaccacgggcggcggcactgcagcccaagggggcaacgcagcggcaacccgaagattgatggcgtagacgcatgctcgataacgattggttacagaagtcgttgtagccgggcacctgaacgggtgatcaagccgaagatgcgcagggctgaacgatgaaatcgaagcagagtcgatgccgatgtcggagacacatagatgtcgacgaggcagtgggcgacgcaaactcgatctctaatcgggaaaaaaaaacagatacatgcagcagcagaacagcatcagttgcaagcttacccactcacacatggtccatagaccaagtccacgtccagcaacctctctgcccaactgtaccagcagcagcgacacatgcattccctccacaagtccatagccagccagccaacaaactctctgcaaccatcttgtctctctctcctctcccttgctaatcacgtgcaagatgactagcaaagtgacggacaaccagacaatacagggagcgagaggcaagacagacgcggatgcgtaggggctgaccggcggagggcgtcgaggccgcaagcggcgacaatggtgcagatcctggtggcgaggtgtcggcccgcgccagagacgacgggccagcggcgtcttgcctgccacgagggaggaggcaggcggagaggcggtgaagacgtgggtctatcccccgggcggcagtagaggcggatggggatgccgacgtctggtggagcttgatgaagacagcggtcgaggcggaaggacctgacaacgacggttgtgaaatcattgtcatgattaatatttatgatgaacaattggttttgtaaatgatttaatcaatgaattggttttaaaagatttgtggatgttggtgggagtgcgtgtgactaatgtgggtcaggttgtgatatttgtgctcaggaacagttgttttatctgattgtgtacaggtaacttgaggtcaaccttggtcaatggtgaggaccaggactatactcagggtggagcagaggtctagtacggtcgggataccatgtgagaaggcgactagagtcaggattcttggaggtcaacttcggtcaacggtggggatcgggactagactcagggaggagttgaggtccagacggttaaggataccgggtgatgaagttggatacgagatggcacacagtggatggacaccgtgtgggagtgatcttcgcaacgggcttcacaaggtgtacgtgcaagcgtcggtgttcacggaggagattggttgagaaattggagcataagtatatagttctacagtactctaggtactgtagcggtgttactgtattgtgcatgtatgcgaaaacgctttgtatcgagcgtccgatacaagacaaactccggacagtcgacgggacccacctttccccaatcttatcctcattccttctcatccccaacctctcgttcaacttcttctcctcggcgtctccaactctccatgctgcacacgcggccgcggcgtcatcagggggcgcaggcgccgctgccgccgccgacggcggggcttcctgtgcgggtggccagattatggcgccaccagtgatgttcgtcagcggcatcgtgtggcaggcacggtggctgtgttccgggtggcgtcgatggcgacgacagatggaagagagggaggaagcgtggggtggtgctcgtcgccggcgaggactaccatgcgcttgagcggcggccggtgcagcagttccagcggtagggtgcggtgagcaccggcaaccacgttggcggcaacggggcagcacgacggaa

SEQ ID NO: 26761 - DNA, 1867 bp, Oryza sativa
aggaaggtgtccccgtgtgggacgagaataaacaggaggagtttaacctacgagcgctgctgttcgtaaccatcaacgattggcctgcacttagcaacctatccgggcagtccaacaaggggtacaaggcttgcactcattgtatagatgaaacataaagtacgtatcttaagcactgtaggaaggttgtgtatatgggttatcgtcgattccttgcagtaaaccacccaacacggaagaaatgcaagcactttgaacatacggcggaccaccgtacgaagcctaaacatcgctgcgggaaaatagtgtttgctatggttaaagatcttaaagtagtgtttggaaaggggcctggcagccagcctatagagagcgaagatggtcacgcggcgatgtggaaaaaaaactccatattttgggagttaccctattgggaattcttggacgtccgccacgcaatcgacgtgatgcacctcactaagaacctttgcgtaaaccttcttggcttcctaggtatatatggaaagtcgaaagttacactggaagcacgtaatgatctgaagcatatggaacaacgcggcgaccttcacccggaaccacaggagaaaggcagccattacttgagtccagccagctacactcttagcaaggcagagaaggaaagtatgtttgaatgcttggagagcatcaaggtaccgtctggatactccacgaatataaagcgaataataagcacgaaggagaagaagttcacaaacctaaagtctcatgactgtcacatgttgatgacacagcttctaccagttataataaggggtatcctcccagacaatgtccgggcaacaataacaaagctatgttcttttatgaacgcaatttcgcagaaggtcatcaatcctgataggttagaagcccttcagaatgatgtggtgcaatgtcttgtaagctctgagttgatattttcaccttcatttttcaatataatgacgcatctgctttgtcacctagtgaaagagatcggtattctcgggcctgtgttcctacacaacatgtttcctttcgagaggtacatgggcgttctgaagaagtatgttcgtaaccgtgctcgtccagaggcaagcatcgccaaggggtatggaacagaggaggtcattgaattctgcgtagaatttattgaagaccttcgcccaatcggggtacctgaatcacgccatgaagggagactacggggaaaggggactctcggaaggaaagcaataatgacggtagataacaatttattccgtaaagcccatttcacggttttacaacaatcttcattggtggctccttacatcgaagagcacttggctctagttcgcgccagaaacatcggtaagtccgatgcatggattacacggcatcacattgatactttccctgcatggctgcgacaacatctcatgggtaacgagacgattaatcagcaactggccttcctggcgaggggtccatctggctcgatcacgacattccagggatatgagatcaatgggtacacattctacacaagagcccaagtcatgaagaccacgaaccagaacagtgttgttcgtatcgatgccatgggacacaatggtacaactggcacgtattacggtgccatcgaggagatatgggaacttgactatggacctctcaaggtcccattgttccggtgccaatgggttaggttgactggtggaggcgtaacgattgatgatagtgggatgacaacggttgaccttaacaaggttggatactcggacgaaccttttgtccttgccaatgatgtaacgcaagttttttacgtgaaggacatgtctagcaaaggaaagaagggcaaagg

SEQ ID NO: 26762 - DNA, 722 bp, Oryza sativa
aaccaattggctagaaacaagatataataatcactgatccgaaggttaaaacacacatggctggaggtccgatgtcatgaaatccacaagattagattaagacagtgaaacctttgttgtcatcggctaaatccaatttatatgtatatgcaatccttatgagccgatgcaatgtccagataactcaccggctgaaaccccgatgaaacccttattggcagtcaaaaagcaggctagagattatggttctatacacgacttagtagatcaaactcaactgatgcagcactaagtatgaaaagaaacataatatctagacgatcaaaccgttgactgagtttttagggtggtagatatctaagttaatctaatctagcaacgcgatttagccgataccggcagaaaccctaaaacgagaagcagccgatagagctaaattgatgtgctaagactagattaatagagacatatgataaataggtaggcaaatatatcatccaaaccagagcaatccaagaggtcgaatgtactgatgcagccttgaacgacgccgacgtaaacgatgcaattgaatggaccgacggaacattggacttaccgcttcgccggagattgaagacgatgcagccccgcgtcgggtgccaagttccaccggaacgtagaaacaaaagtagaagtaaaaatggtggtgatgcgccgaattgtattgatcgagtgataat

SEQ ID NO: 26763 - DNA, 5066 bp, Oryza sativa
ccctcttcagtaagagaagctttggagaatatgtcttaggtggagtcctggcttataccccagttgagcgcctgtgaagatggagccgtaggcccgctagtccgctgctgtttatttttgattgtcaggccttaagtgcctttgtaataatgtaaatattatcgatataataaagatgtgtcttttatatcgtgtttgtatggtgtaccccggcttttcctgggacggggattaatacactagcgttcgggaaaatgcaattttcccggtcgcgacaataatgcctcaacttggtgcaagagaaatataaacataagcacaatttttccaccggagaataccttgtctctgcatccaagagcctacgacttaaataaaatatagccctttcttttccttcaagctcttgaatcaatactgagccaatcgacttatcaccagccgataggtacaatctgaaaggtatccctttttgtggagaaatttgtcacaccctgaaaattcaaaatatataaattgttgtttaattggaatttttagaaataattttgaaaagtcttgaaaagaaaatctaattttaattaataaattccaatataaaatgggcccagataaaatttcattaaatactttgcttaattctataattcctagatttttctgggatttatttgagctaagaaagtatttttaataaatggaattgcatttaagaaataatttaaattgaaaaaggttttaaaaagtctcttttggctttgggccgaaagtcggcccaaaacctctcttctctctcctcggcccaagccggcccagtccgcagccgcagccgcccacgcgcgagtgcgctgtcgctgacaggtgggtcccacctgtcgggatcttcgtcttcctcgggccgaaaccctagtttcgcgccgccgccgccgctttccaatccggccgctcctttccttctccggccgaatcaatagaggggaaacattctccgggatctcctctaccttttctcctttggaatcatcggttaaatcggtttggaaatcgagggattcgagttcgtctcggattcgtttttgccgaaccttccttcctcgtcgccggtcgccgtgggcctttgccgccgcctccgagcccctttaaaaggacccccggtgtctcctctacccgtcgccgccttcgccttcgcctctcgtcgtcggaaaagccctagcgccgtgtgccctagctttgccgtcgccgccgccgctccagccgtgcttcgccgtcgctccagccgtcgccgtcgctcgggaagaccgccgtcgtggtcgccgtcgcgtcgccgtcctcgtccgccccttcgctgtcgccggagatcgccggagcatcgtcgccgtcgtcaagccgaagagcgccgccgcttcaatctcgtcgccgtcgccgtccgttcctctttcgccgtcgctttggtcgccggtgagttcgccgtgccgtccgctacccgttggtgccctccgttcgtgccgtaacgccgccgttcgccggcaagcgtgcgccgcccgagccgttcgctccgccgatgtcgcgaccgggaaaattgccttttcccgaacgctagtgtattaatccccgtcccaggaaaagccggggtacaccacacaaacatgatataaaagacacatctttattatatcgataatatttacattattacaaaggcgcttcaggcctgacaatcgaaaataaacagcagcggactagcgggcctacggctccatcttcacaggcgctcaactggggtataagccaggactccacctaagactacttctccaaagcttctcttactgaaggggggaaagattgagcaagaatgagtacaaccacagtactcagcaagccacaccggcagatgcatgattaatgcaagggggtacaaggggtaataatataggggttaagttttgcagtaaacagcatttaaaagtcacttagttgcccaaagccattttataaagacgatcctagagctacacagtattattaatcaaggccgtgaacccacacgaacctgccttaacccaaggcctacgatgattcagaccgaactggcaacccgaccctgggtcccagctcgtcccaagccaacccaggccaaccattccatattttagttgttgagcaaattttaagaattaaaacactgacttgggtacattgctcggcttgcccataaccgagggcgcggctattcgaatagattatactctgatcagaggtgtacatctttacccacaagacacatcttcctcacgtgtaaccacgtgccacataccaccacggtatacggacggaagacgtgacatagttcccaacccatcctagccataaacaagagtaccgacccaatcccacctatggccggaacctccgggacaggcaggcaggactgagcccctagcagcagggcaccaaccctgtgccatgacatctcgactaccgggccgcagctcgtgtagccttcatttgtcctagagaatgtccatcgacccccgacttcatccatctccatccgtgtacttttgtttatgaccagactgagccacaaactaagccttacccactagacatgtggaagtacggtagtgctttgcaacagaggcccgagcttaatccttatagtggccggggtgctacttcccacaactggcatgcacccaaaccccaccgaaaacagggtttaggggttttgaaagaggaagagaggtgtatgtccaattccaccataaaccaacaattccatagtgtccaaatgatatgagaattcccaaagtctaaagttataaaaccacctaatattgcctaattaatcagcgaagcatctacctaaattcatactagtggaaccataaatagagtacccactagttggggttttattttcctagggtgaacaaggtaataataacaatagcaataataatgtcttaacaatgataaataggcatggctaagtaaaacagtgataacgcgggaatttaaataaagcggtaatgcattaatttaaatcaaaataattttataaactgggattcaatatgctcaaggatgatgtgacttgccttgctcagagagaacggccttccgaaccttcggcgacgaccacgaaccacgctttgggaacctccggaacgacgaaagctacacgaagcacacaagcaaagctacaagcctataaagaagcaataacaatacataaaaagaaagcacagggttctttaggttataacaaacattaagagacttgaacgggtcgattcggagctcgtatgaccaagatatgatcatccgaagtttaatgctgttatatggagatttgcggattattataattaagctttgcaattataaaacatgtgtaagcgctagcctggaaaagacaggagggctgcgccgttgacatgcggaccccacatgtcaacctaaaggaccgcggtagaccgggtacacagagacggtccacgggtcgacggaagcggaccccgtgtgtcaaccgaggcaagtggccgacaaacggactccactagacaccacacggcctgcacacgtggaaaccacgcggctaccgagcgggcacactaacacggacactacacggtcaccacccgcacgcgtgaacgactaccgataccggtacacgggtaccggggtcgacaaccgcacaacgggtacggggtgacactgaaaggacgaggacggggcagcgagaggacggatccttaccaccacgcgacgaggcgtgggaacgacaacgacgaacgggcgcggcggacggcgagggaacgacttcggcggcgatccttgaacgaaggcgagacacggccggtacgaggcttgatgacgcggaggcgaggacgaagacgaggacggggctgccgcggcttgcttgacggacgcggacgacggacgagaacggcttgacggagggacgaacgccacgacgaccgggaacgacgagaggacgacgacgacgacgatgacctggaccggcgaggaggcgatgaggacagccggcagcggctgcacggggacgaggacggcggggaacacgccgcagcgatgatgatgacggaggcggcgccgcgagacgacgagccgggcgaccgacgggacgtcgacgacgagaacgatcggagacgacaatgatggaccgcggaggggtttggatggaggggaaacgatgccgaggacgaccttgccgctgcgatgccggaggtggtagtggtgcagcaagccgacgagccggggaggaggaaggggcggccgaaagaacgccggcgacgaagaggatggagaggccggcacggcgacggcgttccggtgaaaccgaggagcagccggggtggagggcgatgcggcgacgccgagggaggagacggcgacgtcggccgacgctcaggcgaggcggcagggatggctggagatggtggagtggtggcgacaccactagtcgtcggtgaggacgcgtctccggtgatttccccgcgaaacggaggcgaagccgggaaagagggggcagctgcgacgccgggagaggtggcggcgcagccggagggtgcacgggcgaggcgggaggtgcggctggaggtggccggcacggaggaaagagaagggcgacggcggaaaggcagctccgggggtctccgcgggaaatggagggcaggccggggtggaggaggtggcggcgacgctggaggaggcaacggcgcggccggccggcgcacgggcaaggcggtaggggcggctggaggcgtccagcggcacgggagagagagggcgacggtggggaggtggctagggaccacgggagaccgcgggagggggctaaagcgatagaacggagcgagagggttgcattttataggagaggagagggagccagccacgggggaggtcggaacggcggcgataaaggcggccggcggccatggttggtggccgggaaaacgcgggcgttcccggcgattgggggcacgattcaagggggaaattggggggaattgaagaggattcaatggggatta

SEQ ID NO: 26764 - DNA, 554 bp, Oryza sativa
tcagttcttcaacaacaatgctggcaataacaaccgcaatcaagctccacgtcctgttgcagctccaacacagcaacagcctgccaagagggagcaaggcagcaagcccgtggtgtgtttcaactgtggagacccggggcattatgctgacaagtgtccgaagccccgacgcgtgaaggttgtccctgcccagagcaactctaccgtaccagcatcaaaggcccgtgtcaatcatgttgctgctgcggaagctcaagatgctccagatgtgattttgggtacgtttcttgttaacttagttcctgcagcagtgcttttcgattctggtgctacacattcattcttatctatgagttttgcgggaaatcatgggatggaagtagaagatcttagacgtcctttgatggttagtaccccaagtaatcaagcactctctttgcaacgtagcccctctgtcagaatagaaattaaaggagtattatttctggccaatcttatcctgttagaatccaaagaccttgatgtcatcctagggatggactggtttgccagac

SEQ ID NO: 26765 - DNA, 574 bp, Oryza sativa
caataatgaattattttgaaaagaaaagagggttatggcatcaccgggctagggtttcggtggaccgggcgcacgcagacggttcacgcgaacggacgcccgagatcgacttgatccaaaacggacggccgagatcgaacggtccacgaccggctcacgggagagggcgacgatgacgtcagcgatgacgtcaccaccggcggcggcggctcggacggcgcacgctcgccggcgaacggcggcacttcggcacgaacggaggacaccaacgggtagagcgcgacgcgacgaactcaccggtgaccaaaggagcggcggaagaccaacggacggcgacggcgacgacgaaggaacggcggcaaacttcgggtcgacggctgcgacggtgctccggcggtcttcggcggcggcgaaggggcggacgaggacggtgacgacttggcgaccacgacggcggtcttcccgagcgacggcgacgtctggaacggcggcggcgcacggctggagcgacggcggcgacggcggcgctagggcacacggcgctaggacgctacggacgacgagaggcgaaggc

SEQ ID NO: 26766 - DNA, 7831 bp, Oryza sativa
tttttcttatacgcattttagtgtttgccaatttctttcgaattttaattaattctattattccttttagaaaatgatttttatttcgggatgaatttatcaggacgtgacaaatccaccccccttacaagaatctcgtccccgagattcgaggaggctagcatgaagataggttgggcggccttctcttcttgtctgacttcttccgctccgtcttctataacaaacttgcctaacaaaacttctccactctggactgcttggctcgatctcctgttgcaggtggaatcttcttttcacctgactcgaaccagggtgcacctttcagctgacgcagactaggttgcggtagtttaatgatgcttccgttccagaacttctcacgattcatatcttcggcgtcaacctcacacaagttatcaacttcatgtcatgtgtcgtaacctgcttgtcattactaggataccatgcttgtcatcatgagaataccctgcttggcgtttccttccagcttaccaccatatgctttagactatgatatcccccttactaaggataccatgattgacaacttgccattaactgtctcatattagctttcctggtctccggtgctaggtacttctgctattcgatgcaagggtcaaccactctaactataagttatgcttcccaagagaaccaatttatcccacttgacatgctttgacgtcttcccgaatgactttgctgctggacttgttattgtctgatcgtgatcctgccagatctgaagcttcgttgttagaggtgattttaatctgacctctgtagactatcttcgaacatatcacttggttcataactgggaatagctcccacgaacaagcagctcagattcactttctttacattcagtttacttcccattattatcttcaggttgtcctcagttagcattcaacgtattcctttacacctttaaccttgatgtgttctttcccattggatcatctcccaagacatggcattacctggtaaccggtgcttgcacttttcacttcgtgtagcatctgataccgagttgaagatttcactccttgccttcatagaaacacttttacctaggtcatcttgcttacttaatgacaaggtgattgttgcggggcaattactatcaggggtcttccttgagcgatgcagagcatgtttctgtttatcaatcacctttcggcctacttctttcatgctggagaacatctttgccaatctcttttatcaatcatctttcggcttatctctaacaggtggtattctttaatgtggattgcggacgcttctggggacgatgaggtcctttggcttgctgcctttcagcgaaacctggatgtggttcgtcaaaaagctgcactgactaccttcagggaaatacattgcttgctatctgtatctatgccactagggtttaattgccgatgatcatctttagtgcttcctcgagatggggagcatccatattgttcttctgccatatcacctttgacccttttctgatacctgatagactaattaccaaccatcgactattatgttctcaaatattgatgtctcctggatcttcttaactgtttgcaggtatatccgaacttatcaatgtagaggcatggcgggtacccttatgggtttcatccaacaatccttatcttgatctgtaaaaggcgtatccaaaccctatccccaactactgtctcattggctttttaacccaacacagtttaattggttttcttttccatccacaggttggttattaactcgaggttagaatatagttcctctgacacgagaccctaggtctcctttgtcagtaaacaattatacacatgatcacatatccgcatcttccaaaagaatcctcttagaacttgtctgtattacacatttctcccttattacacgaatacaaggcactgccttaaacaaaaagggaaggtgcttatcatcggtacattgtatcctcaacatgaatcatccctaaacatagcaagctcactgtttacagacatgaatatatttattaattacatgattgctgcaaactttcgattacacaatgataagtagcgaactgaaaaccacaagcgtggctgctcattttgattctggagagatatagctggcgttgttctagtgactgcatcatccttgattggttctgtgatgatgtgataggactgcatattgccatcattcacaggagaagcttccttctgagtgctgtttgaagcggatgacggtcttctgcttggtatcgccctccagaggttgattgcccttggctcggcctggagtaggtcggggagagacacaacttcttccatcgacgacaattctttgctgaggctgtcggtgcagagaatggttggtgctaaaggtattattgctatgatttattgcagagttaggtggagcaggaggagcattggtgctgtggatgatgtcgtcaatgttgctgttggagctgactagctgatgagacaatcgtagggttgttcgttggatttctgcggtcttggtcaacaacacactgagttggcaatccttgggcacatggtttgttccttcgcacagaaaacatgtcaccttgcgagtgggacactcccctggtggatggtcttcttcatagtgagtgcagagtgtgagacacatgctagcaacgtgtccaatttctccacaacgggtgcatgcctttgatccgaagaagacatatctgaaactcttagtccaaacaaatatctctttggttgatcacttgattttcttcgccatcaatcgctaggttatttgattcataataagattatgagcttacggaaatgagaccctaggtctccctaatcagcaacaaaatgtacacaactcacagcacttgcaatcttaacatggatccttcataaacttatcaaactccttcataatctcatgtttctctgttattacatgattgacgggaacaactataaaacaaaagtatttgaacactgatataagagtattatggttgcttctgactagcgctaggcttaacaggtactgcatttgctccagtgaccacttggcgattggcatgcctgcttccttaacaggtactacagttgtaacagacaataactttcttacgctcgggttcttcatcttgtacttgatttcttggctgctgtgctggaacatccaaaggtacaatgccgatactggcctctgtcttatcaactgatggctggggctgaaattgagcattgacaccttgtggtaatgcactcgctggagttggagctgttgcaacgcgggatataggactgcttcgggatgcatggatgacaattcgctgagaagcaagcttctgattgcagggagttgcgtggactgacgtgccggcagctatgtttctcggttttgggcacttgtcggcgaaatgacccattccttgacaattgaagcaacagatatcttcccggactcggcattttcttttctcattttgattcctctgtcctggcactggagttaggctgaaactgtaatcttggcgaggatttgtgttgccttgatgcttctctccgttggaactggcgggttggttggccatcttcttcgtcagcagaaaattgaattgacaatcttttggtatatgatcagttccttcacaaaagaaacaagtgatcctgctcgttggacacctgtcgggtggatggtcttcctcacaatgaacgcatgtagtggcacacgagctggcaacatgaccgatttctccacaacgagagcatgccttacgttccatttcgtcttcatcatctgaggagacttgatctgaatcttcactatcagacactctacctccattagctaaaagatgctctgtcaactgtgatacacctcggaaggtatttcttctctgacgttttgtcattcctggtggaggccattctgtgctggtaatgatcatcttacggacttcatcttcggttcgcattggtgtttttcttttctgctgaggacactcccttgcatagtgcccttgctcatcacacataaaacaaatgatacttgcttcttttgagccaacatgtggcacatcaccatgggtccttcgggatgctggcggcatgctgacttgtggtgtgagtgcttggactgcctccaactgcacttgaggttgtatttgactcaggttcagaattggcgtctgatgctgctctagtatctctataagcaatcggttctggttaatcaggtgttggaccagtgtcacacaactggtgtctggtgcttcattcattcgggagcttgaggtaccaatgtcctgacttctgaccttattgcctttctcattgtcagccatctgttgcaaaggtttggagagggagagagggaaaacaaaggggagagacagattagaaactaaggatgggaccttaacagatctaagtcttttgctgttatgatgtatgttaggcttattctgcaagttgattaagcaaacaacctagcatggttacatcacaacccactgatgcaaaccacgcgctacacacacaagcaaggaaacacacgacaaacgaaacactagagggtggcttaggttctgcgacgggttcccaagatcttcactcctgcttcacagctggcttcactgcttcctccacttcgctagcggatcctgcagtcttccggagcttcggcaaacaactgacgatgtcttcttcttcactgacctgaccatctagtactagttgaaatccgaagaaggaagaagggagtaaaccttttgcaaatagcattaggagaaggagaaaaaaggaactttcgcaaatagttttatttataaaatatgtccttaggttttatccacttggcttatcctacagtcgagatggctctgataccagcttgtcgcgaccgggaaaattgcattttcccgaacgctagtgtattaatccccgtcccaggaaaagccggggtacaccatacaaacacgatataaaagacacatctttattatatcgataatatttacattattacaaaggcacttaaggcctgacaatcaaaaataaacagcagcggactagcgggcctacggctccatcttcacaggcgctcaactggggtataagccaggactccacctaagacatcttctccaaagcttctcgtactgaaaaggggaaagattgagcaagaatgagtacaaccacagtactcagcaagccacaccggagatgcataattaatgcaagggagtacaaggagataataatataggggttaagttttgcagtaaacagcatttaaaagtcacttagttgcccaaagccattttataaagacgatcctagagctacacagtattattaatcaaggccgtgaccccacacgaacctgccttaacccaaggcctacgatgattcagaccgaactggcaacccgaccctgggtctcagctcgtcccaagccaacccaggccaaccattccacatttcagttgttgagcaagttttaagaatttaaacactaacttgggtacattgctaggcttgcccattaccgagggcgcggctattcgaataggtttactctgatcagaggtgtacatctttacccacaagacacgtcttcctcacgtgcaaccacgtgccacataccaccacggtatacagacggaagacgtgacatagtttccaacccatcctagccatagacaagagtaccgacccaaccccacctacggccggaacttccgggacaggtaggcaggattgagcccctagcagcaggacaccagccctgtgccatgacatctcgactaccgggccgcagctcgtgtagccttcatttgtcctagagatgtccatcgacccccgactttgtccatctccatccgtgtacttttgtttataaccagactgagccacaaactaagccttacccactagacatgtggaagtacggtagtgctttgcaacagaggcccgaagaccggtccttatatggccgaggtgccactatcaaaaccatgcaccccgagcccagcctaaaaccattttgggggattttgaatagagggggcggtgtgaatccaattccacaataaaccaacaattccaaagtgtccaggtgatgagaatatcccaaagtctagagttgtaaaaccacctaatgttacctaattaaacagcgaagcatctacctaaaatcatactagtggtaccatgagtagagtatccactagttggggttttgtttaatctagggtgaacaaggtaataataacagtaacaataataataaggtcataacaaaggtaaataggcatggctaaataaaacagtgataacgcgggaatttaaaataagcgacaatgcaataatttaaatcaaaataattttataaactgggattcaatatgtttaaggatgatgtgacttgccttgctcgctttcccaaacgacggcttcaacttccacgaaaagcggatcttccgaagctgcagcgtctacacgaccaacggaaaagaaaaggcttttactctaataaactccacataacaagcagaaacaaagcactaaaatgggttcttgacttcttaaggaaaaattagagacttgaacggtccaattccgagttcaaatggccaagttatggccatttgaagtttatatgctctttaaatgaatatttgcgaatttcttcatttaaattttaatttaaaatcggatttattgcgtcagccgaggggaggggtgcgcggaccgggtccacgggagtggggcccacgcggcagccacacggtccacggtggactgggtgcacccggctcacaccggccggcgccgtgggtcccacgcgtcagccgcacccgagggcgcgggcggctgacggccgggccccacgcggcagccactcggcgcgcccgagggcggccaagccagcgcggccggcgggagacggcgcgcccgcgtcccgatggtcgccgccggcgaccaccggcacggtggagcggcggccgatagaagggagggtagggggaaaggaagcgacggtccacggctcaccccggggcgacggcggcgacggaggaggcggccggagcggagggaggtggtggcgcggctcgggtcgacggggtttgtgcggcgtaccggcggtcggcgtccgaaacggagaggtggatgaggtcgatcgagtatgcggcaatgccgaaggaggtggctgccgaggtgggaggcggtccggggtgatgtcggcagcgggccggagctcggtcggcgtcggcggagagatagagagcgacgtcgcgagctcgaatccggcgagcaggaagggcagcgagaggcggaaccggacggaggaggtgcggggagggtttaaatagagccggggcgagagagggtggccgggaagggaggaaaccggcgcgggaggtcggccgccttcaatggcgccggcgagatttgcgggggcaaatccgcccgtttgaacgcgggagagagagggagaaatggggggaaagagagagggaatcccggggaataattccccccactttaatgtgcgcggggacggcgggaggcggcgggattcgcagcggcggcggcgctagggcacgggcgaggcggcgggagcggcgcgaggtaggggatgacgggtgggccccacccgtcagcgagggtggcgggcgggcccgcccgtcagcggcgcgcgcgcgggggaaggccggatgggccgcggggaggaggagagagagggagggagctgggccgagccggcccaagaggggaaaggggggggggaa

SEQ ID NO: 26767 - DNA, 10624 bp, Oryza sativa
attctccgggccacatttgaatttttcttatacgcattttagtgtttgccaatttcttttcgaattttaattaattctattattccttttagaaaatgatttttatttcgggatgaatttatcaggacgtgacaattatctatggtccaatgaatgtactgtgatatgtaaagccgatgtggttaagtatatgctatcagctccgattctaaaagatagggttggaaagtggatatttgctttgacaaagtttgaccttcggtacgaatcgccaaaggcaattaagggataggctatagccgattttattgtggatcatcgtaatgattcaatcggctcagttgatattgtaccatggactttattcttcgacggatcagtatgcactcatggttgtgatatcggcttggttataatttcaccttggggggcaaattttgagtttgcctatactattaaacctcatgtaactaacaatcaagctgaatatgaagcagttcttaaagggttacaattacttaaggaagttgaagccgatgctattgaaattatgggtgattcattgttggtgatcaatcaattggcaggagaatgattgcaagtatgaaacattgatgatttatcatgagaagtaccgaaagttaattgatgaggttcggcttgtaacctttgagacatacatctcgaaaacaaaatatcgaggctaatgacttggctcaaggtgcatcgggatataagccgatgatgaaagatattgagatagagattgctacgattaccgtcgatgattggagatacgatgtgtttcaatatttgcaaaatctgtctcagtcggtttagtagaaattgcgttataaggcgttgaaatataccttgttagatgatgagttgtactatcggacgattgatggggtgttactcaagtgtttaagtactgatcatgccaaagttgcgataggcgaggtacatgaaggaatttgtggtactcatcaatcggctcataagatgaagtggttgcttcggcgtgcaggatatttttggccaacaatgttggaaaattgcttcagatactacaaaggatgtcaagattatcagaagtttggagcaattcaaagagcaccagcatcggctatgaatcccattatcaagccatggccatttcgagggtggggtatggacatgatcggccagattaatccactttcaggtaaaggacataaatttatattggtggcaactgattattttaccaagtgggtagaagctgttcctatgaagaaggttgattcaggagatgctatccaatttgtcaaggaacacattatctaccgatttggtattccccagaccattaccactgactagggctcaatatttgtgtccgatgagtttgttcaatttgctgatagcatgggtatcaagttgttgaattcttcaccatattatgcacaagccattgggcaagctgagatatccaacaagagcttgattaagttgattaagaagtagatttccgattatcctcggcaatggcacactaggttagccgaatcattatggtcttatcggatggcttgtcatggatcgattcaagttcctccctacaagctggtttatggacatgaagcagttttaccatgggaagtcagaatcggctcaagaaggacggatttacaggatacatggacagccgatgagtactacaaccttatggccgatgagagggaagatttggtccagtcaagattacgagctcttgcaaaagttaccaaggataaggagagaattgctcggcattataacaagaaggtggtgcctaaatctttttctggatgggagcttgtttggaaattgatcttgccgataggaactcgtgatagtaaatttggcaagtggtcaccaaatcgggaaggaccgtttcagatccacaaagtggtgtccaaaggagcttatatgttgcaaggacttgatggagaggtttatggacgggcactcaatggtaaatatttgaagaaatattacccaagtgtgtgggttcattcatgatcggctaagtttgccgatatatgtacaaccgatgtgtttacatcgacttgagatggccgatatagttatatcgcccttagtcgtttttcttatcataatcggctgtgactttgccgatgtatgatggctgatatggttatatcgcccttagcagttttggtttcatttagcataatcggatgtgactttgccgatgtatgatggccgatatggttatatcgcccttagatcaaagtataattttatcaatgccttcatcattgcaaaattaggggggcacatatatatacgataacgatgttggaaaaagttcgaaattaaaaaaagtatcttagctgattacagaaattgttctaagccctattacatgtatgatcattgcgacaaatatcgctggatagacgatatagcccgttgcctaatttgttctacttcttctatggcttgagtgtcttgagcatcggttccaggaataactttgagggatttagtcatatcagcaacatttctgatagccgatttcaaccgtgatttctgttcttcaattgcctttgggagatcggttagcttcttttgctctagagccaactcggcgttgcattcttcaagttgggctatgagctcaatcttccgagcttcgagccgatcaatgttggatttatcagaccctcagacagttgatcaagcttggacttttcttcgtgcacaagctgccgattggcttggattgtggcttcgatatccttgcgctcccggcgatcggctaatctttgcttggccttctccagcttgaattggtgctgctcgaggttgacggctggagtgagggcgtcggctagctcatctgggatcagagcttgaatttcgtgaagccgagtcctgattgacccacagtcgaccaccaagttgtctaatgatgatccctctagccgatgagatatgtcgtcaagtgttctcttcacatcatcggataaaggggccaaggctttgctggttgtatcttcttctgtctcatcaagatagtccttgatatcgaatgagaacagatcggctaagacctgcaagagagaaaattgaaggcagctgaatatcaagacagattatatagccgatttgagatttttaaaaggcaaaacttaccgggatagcaggagtagctgattgctcttcctcttcgacattatgactgcctgcagccgatggagtgcggttgcttgtttctggttgcacaggaggcaaaggaggaggaggaggctaaagaaaagacaagtgttagttgaacatcggctataatcagacttaaggagataaagggaaatttaccggtggagctggcttagatatagacaatgccgatttcttcttcacagcagtcttctttctctacaaagttaagattaataagcaatcggcaatttaaatttttttatctcaagaaataagtgaggtgagtcccttactcgtgaaaagtgagctggagcagcgggagttggaggagtctgcttgggtgaagccgatggtgtcttctctggatcacccaattcggctgctgcttggttgatatcctcttcgatctcttcttcatccaaagcttgttctatggatggatctaaagcaggaaaatcatcggttggcttggatttcttcctcttgacctttttcttcggagccagagttgatgggtcaatagccgatgccttggtctttctcttctttccggcatcggctggttcccttaattgcccttgaagcagacttgaggtgttgggagcatggtagccgatgacagggggagataatccacctccatttggaataaggccaggagcatagtctatgtccctgccactgttgctctggcgaggaggagaagattctgtggtctgcaagatggaagatgaaattagttaaaatattaatcggctaatggttatgtttacaaaattgacaaaaagaagaaaaaacttacttgggggatgacatctggaaagagatctgtcatatacatagaagccgattgatcgaacaaatgcagcttccattctccccaccatctgtcaaaggaccagctcctgaatcttgctaattcaatattctcaatgctgccaagttgtggtcctgggatgttcagcagccaatccatcatcaaggctgaagagatgtcacctctacactggatcttgtcggcaaagtacaagccgattagcagttgtcccattccaaattgcctagccgaagtcattgggtgataaaactcataggagacttgaatatttctcaattgatggatgccaacagggaggatacatgggctgataacagtagtaaagacttctctagattgctgaaattttcaatgattgatgtcttcaaatctgaaatcagctggcagttcaaagtccattgagtcggcataaggaaaccaggctcgggcatccttctgaaacccgtcgtagaagctgacaaaccaatccttcagcagctcagccgatagctttgctccagcatcggctggtgtagatgcatattctccataagacatgcacctgtggtgggtttgctcttccccatcttcatttgtgatcggttccagtcttgggaattctgcttctgtcgttgatggccgattaacagctttcatggctaccaaatttagccaagtttgcaacaaccaccatgatccgcctgctccaaccaccgagccaacggctatcttagctgatgcattattcaacatttggtatagatagccgaggagaatcttgcccaaggggaattgtctctttgtttctaaggcttcggctaagaactgtcagttggttgtagggctgcagcttgatccacaaaatagaaatttgtccagccacattagcagaaaagctacatgctctcgagaggtggctcgccctttgcccatgtaagctgcaatatatcctgaccagcctccaatactttttgttttgaactcaaaggtgttcttagtgttcaagctcatgggattagccgacgaggtcacatctaagccagtgagcatgatgatgtctaacagagaaggggtcataggcccttgattgaagaggagagcattaagggcattggaccagaaataagtggcagcagctataaggggctcatccttagccgaatttcctattgtaagggctagggcttggccgatcccaatttcatcccaatgggcctgcttgatagccgatactcgtttgtaccatacaggccaacttttctcaagggaaggccaggatttaaaagtgtttttccaatgacttatgtttggattggctagtctaaaagggatcctattggtttcggctatgataaactcagtaggatcaaggttgctgattggaccaagaaagtactgatggtcatgcgacaaactggaaatcgcaacaagattggaaagatgctacaagtgcaaaagaggtagagaagaagaaaacaagatgagatgaaaaaatcgatctactgcatgggaaaagggatctagccgatggatacatacctctgcgtattcggttgatggcgcagcagacgggctggttgatggtgcagcggacgggccggcggaagtcgacatatcccgcggacggaagcttggtcggagaggagatcgcttgaaaatcgccttgcgcaccgaggggatcgccggagagagagaaaatgaggtttgcttaagcggtgaaaacggaggtgacggtgtgaaatttctcgggggtggcagttagtatttaaagcaatggagtaacggtcggaaaacggcaagcgcgagtttctctcggaaatggatatggcaaatccgaaacattaccaaatattccggacttggggggcatgtgttaacgaccaaatttggcaatctgagtatcggaggtaaagattagatcgaagcggaatccatgatgaagatcgttttggaaacaaagcaagaatcggctggagtccaaatcggctacaactagatcggctgagtccgagtcagaaagggttagccgatacagccgattttggcaatatggctcggtttacgtcgtcaggctgagttaatgtgcttcacgtggattgccacacacggataaagtcctaagaaggcaattgtatctattgattaggataattttatgtaattttcttagagataagtgtgggcaaaagtctgccgcaaggtcttatggtatcttagagtttgttagagataagagtcgtgtccgacaaggacatattttgtaatctcgggtataaatagaccccgaaccccatgtaattagataacacgtgttcaaatacaatctcggtgtatcgccacccttttactttcgttttgtttcgacgagttcttgctttcgggttgagctgcatcggtttcgatcttcaactagaggtatgacttgttatggcggcttgcgttctcgggattagtgcttccatcattatgatactctaatcttgtctatgtaagttgtcgagttatcatatatcttatataatctctgataatattgctatctaacctccaatcggctaatatctatcactagggagtagtcgattaggttagatatcgatgttggcatagattatataggatatctaccactctatgaagcttccaatagcttgattgtctagatattgtcgttcttttcatacttatggttgcatcagttgagtttgatctcataagtcatgcttagaactataatctctagcctgcttcttggttgtcgattagagtagtatcggggtttcagccgatcttacctgatttagctttatattccatgtgcttagttgatatgctagatcttttaggtgtattagactttacgtttgatatattttacttgctttaatatcttaatgtagagtagtatcggaatattagccaatacacactagatctatctgattggctatgctatgaatggttatagtttccttgttaatatatatttcgatctaagtgatttatactgtctcggcatggcgaccgatctatcccaatcacttgatttaagtatatgtcgatatgaaaattatatatcattgatatgtacagccaatcgaatagatctagttcctttattattgcctcgcacagccgatcgatacagagatgacatcggctcgagtataaatgatacgtcatcggtggctggccgatcgactatcatttatggattaactatggtttatttgtctttgtttctagttgattgcaggatcaaatcaactggcatgctcacgaacctaaaaggcaagattttggacttgcactggagttaagcagatctcccaggcctcgtgtctttacatcaacactatttcaccgtggtgtttcaaatgtggactgacttagagtagactaactcacaagatagctcttgcggctgagctttttagttgaacgtaaaatgtgacgagtcattagcacgattaattgataactattaaatattaaaaacttaaaaaatattttattattattattaaaggaaccttatatatactccatccattccaaaaaataagttacaaccaccattaaaaaaaccaaaaaataataattattattttctaatttggatcacctgataaatataatacatacacccaatagaattagatatttgagggtagaagattcaaaaatgataatttagtagagagaatgtgttagttaattattttatacatgtatgcacatcttatattatgaaacatctgaaaaaaaatatgtgtgctttatattatggaaacaaagggagtcgtaagtttttttttaaaaaaatgaacatggcctaaaaagtatgatcattaataatgaagaactagctaagccctaaagtgtttagaatgcatatggtacccaaagtcttattataatagtactccgtacaaggttatggtcatctcattatgcaaaattggttgatgatgttaacctataactacattgattggtgatggtttggcatcgatgagggtggactcgcaaacatgaagtcttcttatagtactaagtagtactacactaattaataatggagaaaattggcattatgccatcgtcaaaaacaggtttcgcctaaataccattcttcaaagtggattcgttaaattgccactctcaaccgaagtctacacgctataataccatctgggacgaaaatgccatttgtcctctacttctccaactccggtcatcacgtcttggccgtgacggtgaactcttcgaccggagcccctccgtgcgaacaccggagttgaagatgcggagcccggagggatcccggaatcgaaagagaccaggggtatttttgtctgggattgcattatagcgtgtagcctctaattgaaagtggcaatttagtgaatccccttttcataatggcatttgggcgaaacctatttttaacaatggcataatatcaattttctcgtaataatgttacacgaagaaatatatataggatggtggggtgtactagctatcaagtggagaaggggtatgtatcacgcttcttctgcatgcggtgcatcgggcagttagcacatgagcccaagtgactttggtctgtgggaccaggtcggccgagtgtgctgcatgcaacttaattgttgtgttggcctgatggatattgaaaatttgccaggacaggggagacccaacgtatgtgtagctgtggggtgcatgaattgatgtatgtatatattttctttaacaaaaactcgtaacattttattaaacaagacagttcaggagagcaaacccccgtacatcgccatagatattagctgaaatcattcaaccatccttaggttcactgaactagggaaacaatcttcctaataaacataacagcagaattggagcagatcgacaggaagctccggcgatagatggctgcatatacgaagcgcgtgactatttatatgcatgcacaagtttacattagagcaagtactaaaagttactgtaagcggattatataattattagttgaggtcttagctagtatttattaacatataggtaattaatgtacggatgaactattaatcttttatagatgatatcactggtggagaaaccatctttggtcggtcggccgaattccacgatagtactggttgcaacaaaagggtaacgggcatattaacaccaacctagtcccggttcaaatgctgtcagggcttgtcaggccccccgggatctttagtcccggttggtgttaccaaccggtactaaagaacaccaaccgggactaaagtcccacccctttatatatgtcttcttcctcctccagcccgagcaagcttcaaaatttcttagaaaaagaggagaggtcattccaaaatttatagtgaatttactttggtgattatatataaatcggaggtgcctaaaaggttagcaacttcatcctccaatgtttttttttggtcatattacatttggagctatgttttgcacacttttttgtctccaaaattttgttgtaagttgatgagagagaaaatttgtgtgggaaaagaaagaatatatagaaattttgtttatttgctaaataaggttttataaaatagttgagtaggaaaatatagtgaaagttaatcttaaataaaagaaaacaaactaaattgaaaattaaaagaatttaaaacttaaaaaataataaataagaattatttggtggaatattttataatttttgtatgaataatgatatgtcattattgtatgactgtcattattggacgaataattatttgtctacgattttttttacatttcatgtagatggatcggcaatggatgtacgctgaccggcggtccaaagagtttattgacggcgtgcattattttttgagagtggccgaagctaacaagcagaagggttttatttgttgtccatgcaataagtgtaagaatcagaaggagtattctgcatccaggactattcatttccacttgtttgagtcggggttcatgccaagctataattgttggacatcccacggagagcaaggggttaaaatggaagaagatgaagtggaagacgacaatattccagactttgctcagtacgctggatttgaaggaaatcaaacgggcgaggaggacatagatgctgattataacgacgttgcggatgttcttggtcagatgttgcaggatgccaaagaggactgcgaaagtgaaaagggggcccataaattggacaagatgttagaggaccacagaacgtcgttgtacccaggttgcgagcacgggcacaaaaagttggataccactctggagttcttgcaatggaaggcaaaaaatggtgttagtgacaaggtatttggcgatttattaaaactcgtcaagaacattcttccggagggaaacaaattgcccgagacaacgtacgaggctaagaagatagtctgccctctaggactggaagttcagaagattcatgcatgtccgaatgatcgtatcctatatcacggtgaggagtacgagaacctagaagcatgccctgtttgtaaagcactacgatacaagattaga

SEQ ID NO: 26768 - DNA, 87707 bp, Oryza sativa
  unsure (1)..(87707): unsure at all n locations
tgagtacttttatggagaggtgatccatttccaccattccttgcccagcttgccatcgaatccttcccaattccaacaatttccacatgattggaactcccgttcaccatcatggtgatactgttctgtctgtcaatgagagggatctcatcctctggatcctctgcaatctccaaatgccgccttttgccagagtctccatcaacaaaaccttcagccttcctttttcttggacaatcaacaccatcaagttgcttcatctttgcagcattagcaacagcagccgcacacgccgacgaatacggctcccaccattgcgcatactcaaccgtcacaccgggttcatggcgaggaagagtgaacttaacatcctgaggctccatcttgtatgttgcccaagcaacacttgaatttgagctggcacgggggacgttcccgggaacgtcctgatcgaagcccagctgccttgcgacacggtgcgggaggtagtgctcgacgcagcgcaggccgacaagctcgcaggggcgcaggcaatgcgcgaacgacaacaattccctactccgggcaatgtcccggccatgaatccagatgccaaccttgtcgagctgcaatgcgaagccactgcttccgtatggcctccactcaaactccattggtgacatgagcaccgcgtggatgtgcgctggctggagctccgttcgcgcgttgtgccaccgggcagcccatggcggtggcgcgccatggccgtcggcggtggcgtgagcagaggtcgccgccttgtcggggcgtagctccgggaagcgctcccaggcccagagctggacgacgtgcagcggcgcccaggccacgaacgggtggcgccacttggtgctggaggcgaggtggcacttgagcgcggtgaggtcgttgtagatgctggcgagcgcggcgggcgcgagcgccacgctctggccgcgcggcgagggggaagacctgcggccggaccgccttgaacggcggcgccgggagcacgtacagcgagagccacgtggccaggaacgcgccgtgctcgagcagcgattgcgcctccgcctccgtgtcttctccgtcgccgtcgccgccgtcgcgcccgaggaagtggtggagccacgtggaatacgtggagttcttacacttgctccggtgcagcgccgcccggacggcctcgagcgcggcgtcgtcgccggcgagcgtgcccggcagccgcgcggtgacgggcgcgccgagcagcggcagcccgccgagcacggccgcgtcctccagcgtcaccgtcgcctccccccacgggaaggcgaacgagctcgtcgccccacaccagaacgcggcgagctggagcaccaaccagccgtcccggcgcaccgggcacgcggcggcggtggcgagcacggcgtccaggatcccaacctcccgccacagcggctcgtgccgcggccggagcctctccacccaccgccgccacagggcggacgagcacggccacccacagaactcgacgcggtggccgtcgccaagaaccgggcccgcgcagggggcacagccggggagagcagcggcggtggcgcccgcgcgggggaggaggaagcacgccgatcgggcgacggcggcggccccggcgcgggagatgattgcggcggtggattcctcgaccagcggcgtttcctcgtcggcgggcattgcggtggtcggcggaggtgggttttggtgtggtttggggttttgagtgaagaagagtgaagaggagtgattggactggcaggagcttccttcctgcactcaagtgcgctgcagcctgcagacctgcagtagtagtcggtaagaacgtgcgaggtagtctagccgtgtttacttacaagataatttttcaaacttccaattttttcttcacatcaaggctatgtttagttcatactaaacttccccccaactcctaactttccactcctaactttccatcacatcacatcacatccaaaactttcctacacacataaactcctaacttttttctctaaactaccaacttttcccaaacttctccctaatttcaggaactaaacacatcccaaaacttttctacacacaaacttccaacttttccgtcacatcgtttcaatttcaactaaactttcaattttggtatgaactaaacacagcctttggcttaggctaagtttagtttcaaaatttttcttcaaactttcaacttttccatcacatcaaaacttttctacatacataaactttcaacttttccgtcacatcgctccaattttaaccaaactttcaattttggcgtgaactaaacacacccttatctagtattgccaaaaatttcagggtaactttgaaaccctgaattgagaaagcacgtaaatagaaaaaacataaaaatagaatgtcgtattttttggatttctataggattttgaaacatacgaaaagtctccaaactatcttatttttttaacttaaagtagtaccaggactttacctcacagtgtgattttcattaaaagcaaaaaaattacaattacaaggaaaaagaacagaaaaacaccagaaattacaaaagttgtaactaagcctgctagtggggtggcttgatttttccttgagtgaaatgggttggatgctaatttggatggtggtagttgaattcaagtgggttgatattaattttggattggagtgggttggcctatgaagaattgaggtttggactggagtggatacaggttggcctgtgaagacaatccatggactcagcccatgggttagcccccaaaagacacccaaaccctagactccactcccgaactcccgaattccgatagaaaacccttgcccgtgcagagtgcgccgcaaccgccgcgcgccgccagctccgctagccgcggcctcgagccgccaccgccacgagccgccaccactatgagccgccaccgccatgcgccgccaccgccgagcgctgctaccgtcaccggactcactcccggtctgcaaggaggagctgccgagagggaggtcgcttctactacgccgtgacccgctcgccgtcaccgccgcgcgccgccaccatctccagacttgctcccgttctgcaaggaggaggccgccgagagcccgagagggaggtcgcttcaggcttctacaaggaggaggtcgcttcaagaaaaggggaggtggcggcgggattgggtaggcgcagtcgctcggcatcctgctctccaccctcgataacctcgccatcgaccacccacgcatcgacctcgccatcgacggcgccaacgaggttttgacctttttttcacttcttttggattaattcagttccatgctgattgctgttcaggcttccattgctgctttcgacgtgggaaggtttgacttaatattaatcctattttggttgtcctgcaatcacttttacctttgctaacttccctcgcgagaaaaaaagttgtatcttcatgaagaaagtaggaaaaaaaaggaaactttccagattataaaaacttattactccctccgtttccctccgtttcacaatgtaagtcattctaatatttctcacattcatattgatgttaatgattctagacatatatatttatctagattcattaacatcaatatgaatgtgggaaatgctagaatgacttatattgtgaaatgtaggaagtagttgtcagttcttgattatgctgttagtggcatgaacttcaatgatagtcaaccatggaaaaaatttgcccccattgtactcctggatggttgggaggacaatctgccctctttttttttgtcatgcagattagcttgtagcattcgggagagtctatctttgtcattttctttttctgctgtgtagatttgcatctgaaaagtggataatttagcaagattataccatgatttgcagatattaatccctcccatatgtaatatatgtcattagtaaaaggaaacttaggcgtatgttggttcaaagcattatatatttataactagaggtttatgttggatctgaatgactatctcctaactctgttgattatcactattcttattacttttcgcacttatctctgtttatactgatattgtcatggactcatggtggcatggtgcttatcatttcactagtttttagcacaagcagtaaatgtaaatattaattctgcacaagtatattaattttctagtcttgtcaaacacaggtttattaaacatgtctatgcaaaattctgaaagttcatctgccaatagctctagccatgaattgccttcacaaacacgtaaaagagcaaaagtgtgggaacattttgagcaggagcttgtcatgatagatggccttccaaaagcacaatgcaaatattgttgattaatgttttcagcgactagaaaataaggaactagccatctcataaaccatattatttaatcttatccactagttgatggtgaagttagaaataggtttatatcaacaattaggaaaaaacctgtggaaaatttcgtgtttgatctaaaaaaactaaagagcttatgataaaatatttcatccatgctgagataccattccataaaattgaggatccctacttggatgattggatggcgtccatgcagccaacctttaaacttgtgggccgtcaatcaatccgtgacaagatttacaactattacaataggctgaaacaagaattgcatgctgaattagaaaatcttgattcgcgtgtatgcctaacatcggacatgtggacctcaaatcaaaacttaggatacatggttgtcacggcccattatgttgatgcagtattcaaaataaaaagaaaattataagtttgaagcctctgaagtattcacacactagttttgcaattgaagaagccatgatgaggtgtttgactgagtggggcttaagtagcaagctgttcaccttgactttagacaatgctagtaacaacaccgttgcttgtcaagaattagtgaaaactcttaaggatgagttggttttggaaggtaaacagtttcatgtgaggtgttgtgcacacatcttcaatttgttggttcaagatggaatgagggtgattcatgtggcaatagataagatccgtgagatcctaaagtacattgagcattcaccctcacgcattcaagcgtttaattcaattgcttctagtaaaagtcttcctccaaaatctggtttcgctcttgatgtaccaacccattggaactcgaccttcaagatgattagagaaatattgtcttacaaagctgtcttcaatagctatacctctgaaaattgtgaagttctaccaactgaccaagaatggttgcaggctgaatcaagagtgaagtgcatcagcggtccctaaacttgtgcggatgtgtcatctaggtccctaaactctcaaaatgtatttttatgtccctaaacttgtcttaggtgtcatataggtccaaacgggcaccgacccgctccatccgctgacgtggcatgccacggtagcgcctacgtatcagtggggactcacatgtcagtcatatttataatatgatatgataacaatatttacagaaagaaccttacatgttttaaacttactctaatcaaatcctgtacgtgctaatggagcggagcccacctgtcataggcacagggagaaagcagcagcagccgcagagttcgccggccggcgttccttcaagacgatgccgttgacgaacggcgattcttcggccgacacaaccacaagaagaaatgctgaggacttccttgtgatcctgttgaaggtggtctcgtcgctagaggtggccggaatcgatgccagtggtgtcgcgagcggcggtggtcttcaatacgcctgtgcatgtagagtcccagcccgatttagtgcaaaaaaatgcatgcatgcgagtctagcaggtccctgagtgctcactggaacttgattgcggcatggcgaggtctgggtaacagcggtaatggaaaagacagcccggcggtggtggataacgtcggcttcacggcgacggctcgcttgagcggtggaatgcttagagaaggtgcatgggtggttagtgaggtccctaaagagttgcatgcacgattaattagtccgtggctcaccggggagagaggaattggcgatggcactcggcgaccggagttggagaagatgacggcgatctccctcgtctgtgcacgattcttaaaatttcttgagggcttttggccatgatggtgaggcgatgactttggcgcgatggcttggcttgagatggaccatgtcgaccggaacagcgacgacgtcatggcggcggcgcctggtgcgagttccggagctctcatgggcaaggtcgcgtttccgttgctgcagtggataaaacgagatggggtcaaaaggagatttgctcggcatgatgtgggaagtttggaatgggaaagatttggcgatagagacgacttgtcggcaacagcgagcgtcatcttcttcacgattgacgacgagaatgtgggcgacggagaggcatagggctctctctcgtccgagtagttcggctccagaagaatgtagaagagaaggcgacacgtctgaggaagaaaagggaggagctcagcgttgccacgtcctggccacgcgtgatgcgtcgagcaccgccggcgtctctctttcctgctctctctctctctctcttggctcccagggcggtggagatgatgcacagagctgacatgtgggtcccaactgacccgtagcgttaccgtggacaccacgtcagcggatggagcagatcggagcccgtttggacctatatgataccaaagacaagttcggggacccaaaaatgcattttgagagtttaaggatccagatgacacacccacacaagtttaggtaccgctggtgcacttcactcctgaatcaatatgtgaatttcttaaggcttttgaagaggttactagaggtgtgtcagtgttggcagctgttaagtaccaaattaacgccgtcaatacctgcataagaccataaatataaaacatccaacatagtggtagggtttattcctaacaatttccatgagtgttggtgtatattcatatgcaggtgacaaacaacctaagttgagaagaaatatatatgaaggaggaggagaatcaaactcgtatccgaacttatggagttttggacacaaaaacccaattaaacacctccaaatgggccaaacatccataccaataaaatgaggggcccaaaatgagtgtccaggccgaaaaccggggccaacggagccagccagggttcggccgaaccctgacagaggccactggcctaggcccagtttgcgtttagtagcaaaccgctccccaatgatggttatgggcgttttcaccggtggaaaccgtcataaaatggacacttggctcatggaggatgaagatgcccattggatgccatggaggatctctacactcccaagcaaactcacactataaatacccctctcatccttcattccaacacacaccaaagcatgagctgaattacaagagactctattgtacttttttgtatactagattagggagagagtagagtagaggaagtcggagaaattccggagttgtcggtaatcctcttcttatttcttttattttgttaattacttctgttttaattgaatatcattctgagtaattaagatttattccgtgagagttacctcttagttagttttaatcaacgtacgaaacattgttcactatagtccattaaaatatagtgattgcttgagagagttataaacactaaagtagttattaactgcgcagacgtggtggctgggtagttaatttcttatgtttgcttcgtatcccaaagtaggtttgaggtaggtgtagaggtggtgacagaactcaagtacactaaagtcctctctatccaggtacgttgtagagccatatctgggagcagtgggctgaccagcgcctgaagcaccgcgttaggattaaatagaggtttttgtagatactgtctctcactagtaaatcctctctacctttagcctatcttaacttcatgtccttaatgaatctggagaagagctgacacacacgttctctgtggaaatcgataccttggaatactcctgggtgaagtgctacatcggtatcttctgtgcgcttgcggattctatctgtgactttaagaaataccaacagtcagctcataggacaccagctgcacacacattcttgccccatattctttgtatatgtcatgctttaagtgatcctgattggcaaaccagcgatgttttgacacgattggctggtcctatgcacactaagtttgcaaaatattgagatgaaaaattggcaaacaactccaatttggcacttgttattaccactgtgttagatccaagaaggaaaagagactatttagatttttttttttatgagaaagtgtctccccatgggtttaatgttgaaagtaaggtggactctattatagaggagatgaaatcatactttcgtgtatacgaaggaattgcaagaaaaaggagtgtatcctacatgtcacagtctaatgagggagtgttgtaggctcactagttttgggcaaaagaaagcttagagcatgaattcaccctcttcaagtcaaactggaaggttgcacgtactcacaagacaaagattgatacatatttagaagtgtgtgaggatgatagtgaggattttgatgttttggcatggtggaagaaaaatgccaagaagtttcctgtgttggcaattatggctcgagactttcttgcaattccacttagcactgtgccctcagagtctgctttcagcagtggaggaaggattcttggaaacacaagaagttcattgacaccagagatgctcgaggcacttgtttgtgcgaaagattagctgtataggtgctcgaggcacttgtttgtgctagactttcttacaattccacttagcaccgtgccctcagagtctgatttcagcagtggaggaaggattcttggagacacaagaagttcattcagagatgctcgaggcacttgtttgtgcgaaagattagctatataggtgctcgaggcacttgtttatgcgaaagattagctgtatagagccaaaaaacagggggattaaaggtataatatctgtcacatttgcttatttattggaccattgctgctgccttgatttaggaatattagcagttactcctagaacttttacattttagcagttatttaaaaaatgcataagtccctatgttatatgtatatgtgtgtgcttagacttgtgattgacttggtttgtctaaaggtagtacagcacctctagcttgctgcatgttgatgtttacgacaacactgtattgtaatgtgcagtgcattaattagttaacaattctataactatttgtcaagtgatggtcctctaccaggccaaatccttgcatgttttgtggtgtatatactttcagctctccttttgacaactccggttcttttgtggtgagccaactaaccattgtgaagaatatgtaatttgggtaggaggatttcttttggctaggggaagtatgtaattggcattatcaatagttcttttaaatagcatgaaaaatctatgtaattcacatttggcttttaaatagtgctggaaatctgtagtgctggaaacctcatgtatcgataaattagattagacattttttatgcttctctcgtgtggcaatatattgccaaatttttacggtgaggaactgattgttcttgttgtgataaatcataaatgagaataacttactacatttctttgatggtgttatgttctttcaggtatttgcttcctgtaatcaaagaactgtaacagtttccgtgatttgtggctcatgtgaggttcttcatgttgacaagtttagagaagaaactaagggaagtcaggttgtcagtagtaaactacatccaattttcctctgcaagtttgtctttttgatgctttgtcttgaattagttggtgaataatgagttaaaatttgaaatcaaatcctttaaaaaatttaatattaactaatatacatttgttggaacctggctgtgcaaccaacccattgggcagccatagccctaccttacttggagaaaatagttgacttggcttgcaagaatcgcactcttggaatagaaatattttatcatgatcttttttttatgtaacaaacatttgaaacttgcattatctaatacattatcctacttggccttgattcatgtcaatgcatatattgaatatagtaccaaactaccgaacataaaggccacttcctccagggtcattcaattgtcaaaatattttttctcaaaatgtgacaaagggcaaaggagatttgtaatagttgtccaaatttttcccttcacacaacctagtcatatgagactattgtaaggttagaaggcaagttagaaggagtgttactagcttatctttttataaatgaattaccacaaattatagtgagaaatagttgcagctaacaaattatttgggatccaagtcaaagaattaatcggagcatatagtgatcttgtctactctgctttgatatttgtaatttgctgatcttttttcagtataatatctgattgatctccatattagtctaagtcactattatatgttggcatctcacccatgcttaacatatttgtaattatattctccagctgattgactgatcagaagatggatactacttaacaagtgactccccaatacctcagggagagattgtcattggtggtcctaatgtaatttcaagaatgaagctaaaacgaatgaagtattctagctcctccgaactgcaaaagtagcaagtatttgcttgcccaatcatatgagttgtgtattcatgtaatattaagaaagttcagtaaagtctgattaatttaggctgtgctcagcgaagtgagcatagctcaactggttaggttccttgtggtggaaccagcccacccgggttcaaatcctagatttgacacgggtgctcgcatttacggctaattattctttcagtggtaggcgacgtacccgtcgacagcgaggcgcctgtggtgacttcgtcaatctcaagatatgccggcccagtcttccggaggtgctcataggagtagggtgtgcgtgtgtgcgttcataggggtgagtgtgcgcatgttgtgagcgcctgcgtttgtactgtgtttctcaaaaaaaaaaattaggctgtgctcagttaattttcatctggatttatttgcaaatttaatgagaagcatgacgtatatattattgtttgaccatttgtcttcttgctgcttttttcatacatcgttgttttgaattgttgtgctgcactgctgctgtgttggcgcagaccaaagaaaacaaggctacatgcatacttggcgggttggtcatgggtaggatccatgggttggcatacgggttcaacttatggattggactgttgttgaaattataagcatataatgatttaatttattccataaataaatcaagacattgcagatgtaaactagcatgaacgtatcattagatctacacatgtaaactaagcagtaaaatatgaacagatcaaatatgcgtaacatatcgaacacgtaccgaggtggcgaaaagatcgattgctcggcaagaactactcgcggctgtgggcgtcgacgaaggcgcgcagcacgcgagcggagagaaaggcgagccgtcacggacgaacagggagcagtcgcgcgaagcgcttccgaaaaaccttattgccgccttctcccggtgcaggacgtcgaatccagaggttctggagacctgctctcccgatcgccggtgcacgccgacgagcgggatggagtagtctacgagcgacggcgcagcacagagtaggaggcaaaccctagattgatttcgcgtatgttgtgtgaaggcggcggctcggtttatatagagataggtcgcttgatcagggcgcccgcagcaccagatttttcggaatgtttccaaaacaaaacaaatccgaatttccgcagcaaaacaaaactgcaaaaggaggctgcatctgcgcaagggtgaggagccaattttgcggaccattcaacgcgtacgtcgtgcacgcgcgccgcctgccaggcaaggcaagcgagcgcgcgcgtgtgatccccctcttctctccaccacacatgcttcaaggggctaggagggcatcctctcttttaaggaggtccccctctcctagaataaacaaggtggtactaaactccatatgcatgtcaacttatgaggtgggcttttgtgattttccaacgaattaatcttcgaatgggccttagcccgcctattaattccaacactggtttgggtgaaagcaacatgtgggctgggttgggtggggtttaaaaaatgattatgtggaatggtttggattgggtaaactaggtcgattgctttgggttggggtgaatgagggctagatttcaatccattggcagccttagttgtaaccaatcaaaacctatcgtttgattagcacatagaaaaatcgtagaaattttagacactaaaagagaaaaacatgaggtgatgagacctcatgcttattttctttcaaaattgtcctagcaaggttcattcctcgggaatttcaaaagaattgataggaaacaataaacaaaggattatataataaaatcctctagattttctatggtttttactttgtttcaaataggggtctaagggctcattctaaattactgttaccttctcgtcgcttccaagggctcaccgacagttgctgcctcactttcctcgggcaagctagcgagctttgccctcgtccaaggaaggaggggcttgtggtggaggtgggagggaaggagggccttgtggtggaggtgggagggtatttttggatgttgcatctctaaaacaaatcacaaagtagttagaatttttgagcgataaaatattctttctagtagtgaatatttttacatatatttttatcaggaactactccatggactatggtacctttatggaacagaaaatacgcgtgatattcacaatatctccataaacttgcatatccacaaaacgcccttgatatccgtgccagttgctaccacaaaacaggttatactgccatgtaaacaccgattatgttgccgtaaaacttcaacgctgccaccatgataaaccaatgatttttctgtaatacttcctcaaagatactaatgatacacaaaaatgctggtgatgcccataataacaccacgaaaacagcagtataccaacagatgagcaaggctcaccacataggggcagaaacactacaacttgcacatacattactgttgatcgcttcctgcttagctcagtactgttgcaaaactacagaccgtaagaagataatttctcaagatacaaaacttgcactgcctaaagcatatgaaaggaaaattagaattccagtttcctgtgaggattgctggcgatttggcttgtctcacatggtttgaaggtaggaaccaatactagctcgcttaatatcttacaccatcacagattcacagctattggggttcagattatgattgggtcctcaattcaacaagcaccaacagctatatctgattttgcacatggatacaaatacaggaggatccaacagaacagccaaatctgacgatgctgatctaacaacagttgcatcccagaagcaacagtgcaattaattttcttcattctcttacctcttccgcctcttgcttctcttcttgtcactctcatcagagctcgattctgactctgagctggagctgtctgaagcagatcctgaatcacttgatcccgactcagaagaggcgggtttctgttgttgcattatcagtcgaggcatattcttcaagtactctctcagggtctctgtgatacccccaagaccaatggaggtgaaaaaatttatggagaaccttgtattctttggatgatcctttgggaatattgaatcaaatgaatcttgcatgttgggatcattcagtttctcgttgagtagacgaataccaagatgttcagacaactcctgcataacaataaacatatacttcaattgtctactttgataaaagatgagttgacatagtaaataaaagcagaacattaacaacatacctggaagagtattttaatgaaaattcgagatgaagacgttgtgtcctcctcagtcaatctgatgtaggccaaaacgtgccaaggaagtgcatcagtacccaacagatgtgcaaaaaatttagcaacattccttagcttatttgtttcaagacgatgtatcatggaatactgctgcacaaaacacttctcaaagttctcctggtaaactttgttaatcatgcaaaatcgttggcccaataatccataatatcgaagataagttctctcctgactgcaacactcgagaagcatgatgcacaattccatctgtcaatgaaacagacagttggcttaggggaaaataatatgtctggcaaattcagcactgaagaactaaaagaaccaatctgattatgcaaattgaagagggattgtttgacatcaagtactgtattgtgaaaaaacaaaccatctggaagctttttgaccatcgatttttcatcctagcatatgttattatttagtagttaggtctgatcaatgcaataagtgtaaactagcagatgatttgaataagcttatcaactggacctgaaagtgtcatgggcaaggattatgaggagaagaatcgggatgaatagggatagattggattatagtagatgaaataacaaggaacggtcctgaacctaaacggcgcgacgctctctgtcgcactgagaaggcaggccgatgggcaataagataaatcttgatctaatgcctaactaacctaggataggatcccttcttatatagatggaggagtccttaatctaatcctaacaaaccctaatcctatccaatgggcctaggacgaccaacccaaagcccatgacattactcccctctttttgagcagctcgtcctcgagctgcagcggaccctgctagactcaacaaaacatcataacctaaactaagactcttaagccttttacatcttggcttattataaatatatatataactaatactattgcaaacaaccctactcttatattgtcatcaagaacatagacaggaggaccccatcctgaagccctgtatggaaatttaggcccacgccacaatccaaatctaaaagcccaacttgactgacccgtgtgataagcatatctaagccaacatgggctagctgctgatcgaagcccagtccaccagtctggcccatttaattggcgtagctgagggaaaacagaatccctatctccctctatcgtattcagtgccatccccaaaagaacgtgatgaccctgcttcacaccgtgactccaaggtaacagaagtcgccgttttctccaccgccgctgttgaaagtagcgatggaaacagctctgctgttcctgccgcttccaaaaaccgcgccgccatccctgctcctgccggaaaccgtgccatctcggttggaggtgacaacgccatcgacaggcccaacaactaggtcgaagaccccttggaggcggcttgggcagaggtggtgctgttgatgccacctttggctgctgcatgtgacgcatcctgctccgcaaacggcgcttgaagtcctgctgccgtgggcgcaggaacgtcatggcccgccggtcggatcgctcggcggctccgagaggcatggcctgctcggctgattgagccgccaaaacctggagttgcgccgccaagtccatcatcttctttgagatcttggcaaggccttcgctgatgttgggaaccgcagcgatctcggtacccatgggcacggaaccgaagctctaataccaagttgtcatgggcaaggattatgtggagaagaatcgggatgaatagggatagattggattatagtagatgaaataacaaggaacggtcctgaacctaaacagcgcgacgctctctgttgcactgagaaggcaggccgatgggcactaagataaatcttgatctaatgcctaactgacctaggataggatccctccttatatagatggaggagtccttaatctaatcctaacaaaccctaatcctatccaatgggcctaggacgaccaacccaaagcccatgacagaaagttacatgtacaattgaatccttattattgttccttaagaacccccaccatgtaaataacctaaattacaagaaaggagccaaatgaagcaaatggtacttataaaccatatgtaaatggaggcattaactacaaattgctgcattgtactaatgctaagaatttgacacaattttctagaaagacaattagcataataactacacagatggcaaataaaaccattgttgagacaataaagttcatgcattaccacaacaatttgttccaagttctaatataaagaaataagtcaacctacaatacttacctcttggccaggctcgagtttaatttttagaagcttgtgaccagcttcttcaaaatcaacactcgacataattgtcaaatatatggttcttcgaaggttaatgagattagtctcagtttgatccctaatctccatctgctcttcatcctcttcatcgtcagattcttcttcagcgtcctcatcagaagcatcatcagacccttcttcatcatcagaagattctgctcccaggatgcttctttttaggttctcatacgccttctcatcttcagcaaaattaggatttgccctgaaaacatctgcaggttggaaaaggtaagtgcaatagcacacagaagtcttaagacacatgaaatgcaggaaagtttcgagattcctatgggaattgaactggtgtctgaaactccaataaaagcgtcgtattccaaacaaaactaacacaagcttttatctcataaatgtagcaaagtgaatatgttcacagaagaaataaaagctcacttagattagtctctgggtctagctcatcttcaagggatatctcatgagtaaattggtcttcctgctccacaagatccaactctggacggatagcagggaatcccttcacatataagatacaggtcagaatttgttacaagcattcacgaagaatacctgaaaatattagtaacaatatgagcatacctgaaatttagcctttctaattgcaaacagtccttcaattaaaaattgcacacgcttgtctatttcaccttcatgaagaatacctcgaaatctttcgaaaatagctgcaaagattgagaaggcaaatccattgaaaacaataatggaagaagatgaaaaaaattgagcaatggtttgctttagttaatttttgggacaaataaaactacatttagcaacagcacaagtgttcaaattacacaattgtcacaggtaaacctgaattggactgtgttaggtagcatgacttcacctaacctattccttgtacatttttaaggttaacagcaattaaactcactgtttggtactgtacagttcacatgtccaatatcacacagatgaaatgaataccattcctaagtccaaaaaatatcgtgaaacactgttgtgctagccaacaggttcaacaagtcatgcagtcaaaataagcacttgtaataacaggtgatataaagaacctaccatgaagcccttgtggagacaagtcctgtagcattgccccacactctttaacaaaccccactgctacctgtcagacaagaaatatatccatacttcagatattgcacaaaatgaagttctgattaatacaaaggtactcaaaaacaagagtgcacctcaacactatcatcagttgggttctcaagcagcacggtaagaagctccagcgccacgagctcatgagcaacaacctggttaaccaagtgtgctatgaatttggttgctgcaagcaattgtggctgcaacaaccaagagctgttgtttaaaacattgcatatgcaaaaacataaaattaagcaatagataatcttatgaagtgttcgttttcaaacagtgctagaaaccttgactagaattcaggccagacatcactccaacatggcataaaactaaccaaggtcttccatactagttatgtttgagccagtagcagtatcttacattacatgtcaagctgaaaaggagaattgaggaaagttaccttgtcatttcgcttatatgccctcttgagctgaagcacaacacgaacaagaagcaggcggccaatctcagggaacttggtatttacaaccgcgacaagtgcagcaaacacatctgtgaagccaggcgaagccatctgcgacttgatgcacgattggcagaagagcccccttccacgaaccaggttctcggcgaacagctcgggcactatattctttatgttggtggcattcaccttgttcaccagaccattgatactcttcttgagagcatcccagctgagacgctggtactcgggactcgacttgtcctctacctccctcatcatctgcgccatgcggaaaggcgggatgtagattcctcctgtgcggccgggtatcaactccggcaagagcggcggtggcgggggcagcggcggagtcggctccttcctatcagggctcctgcgtcgctcctcgcgaccgcccctgtcccggcgcctctcatctctctgccgcctggagctctcgtcacgacggtggcgacggctacggccaccatcagaggactccgagctggggctccggcggcggtggcgcctccggtggcggtcgcctctctcgtcgtcggagtcggtggagcgcctcctccggcggcggccgccctccttgtcgtcgtcggaaacccgggacggcctcctcctgcggtcaccaccctcctcctccgcatcgggcaccctagcgcggcggggggagcggtcgccgccgttgtccccgccaggcttgggtgctcctcctccgttgctctcggcggggtcggaatcgcgggggcggcggggcggggaagccctagatttgccgcggtggcggtcggcgtcgcggtcggagggggagggggacggggacggggacggggaggcgcggcgcttgcggtcgtcgcggtggcgcggggagtcgtcgtcgtggcggcggcggcggcggggaggggagtcgtcgtggcggtggcggtggcggcggggaggggaggcggcgggcgagacggaggcggccatggagagggttgtgagattggtcgagggtttccgacgactgacgagagtccaaagggtgggggaaaaaagatgatttgattttgctcaagaccgaccactgaaccgggccgaaccgagatgtgggttttggctgtgttcggctggttttttattcagattggctaaaactatggagtcgtattttttttttcacttcggccgtgtttagtttctccttaaaaaaaattttaacgtatacggatacacatttaaaatatattaaactttcatttctagaaatggagatgagggcgtaatgcccttggtctaaaaaaaatttcaagtattaaacgtagactaataacaaaataaattacagattccgcctgtaaactgcgagacaaatttattaagcctaattaatctgtcattagcatttttttcgtccacatttaatgctccatacatgtgtcgaaacatttgatgtaacggaatttttgaaagtttgaagggaactaaacacagccttaactagaaaaaatgaccgtgccaaaaaccctatattgagacagccaaaacctaatttggcctaaaaacacccccttctccgagagatgcctaaaattttagttcccaaaattttagttctcattcttctccgcttagtctatattgtcatttagagagagttagcttgattgatccatatatgtgtcaacatacccttattcataattgactaacccttgcatgagatttcgatcacttaagtgtgatgtacattaataacatagtacactcttaccatatcttcacttgagattaaaaataagacaccttggaaatattttaaggtgaaatgcaacaacggtatatctttgcacttgcggattatatccttgatcgtaagaaaataccgactaatatgtctggtgccattgcctctacttaatgtcgtcaagaaatatcaacgggtagtataattttattattatttatcatcatctacagtgttgcatgagttgatgtgttttcatcatctctgccttcccatgacactatcctccatttctcttatttttggttatatcattttttaagatatttatatacaacatatggttctttataaagctgtaataaacgtctaaaatttaaagttctatctatagcgtgtttgtaagtcatatatagaaaataacataaaaccggcgggcagtggcgttgggggcgggctgcaccgcggcggtagggccctcgtcctcatgctcctctcccggcggtagcggccggcggcggcagcaacaccttcctttgctccccactgctgcctgcctcgccccgcgtcggcctcctcttcatgccgctcttgcccgccgccccggcctcgggacgccatcccgcctgcgccatcacgtgccggccgccgcgtccatccgccggcgcgccatctcctcctgtgctggctcaccccaacactgccgccacgccagatcgagcttgccccaacgccgccgccacaccggatcgagcaccgactacgagaccgcctcctcacgactgccgactagcaactccgtcgccgcgaccccctttccctccctctatcgctgccactctcaactcaccgcgcctcgcgtcgttcggcccgtggagaaggagcgaagagagaaggcagaaaggggaagaaaacgggagaaggaaggagaagatggaaaaggcaggggagagatgggaaaagtgacggcagaggcacagttataattttgtaaaattacaatgtcgctgttacaaacacacgaattgtaatgatattttttctgaatagccaaatttatagtggcatggatcaaattaacccttgatctaatgactttggttgcatatccctatttttgtctccatctgaatccaatggtgaatagtttctaaatgatggcttattccggctacatttttagttttacctttcaatagttaagataagttgtataaaacctttattgtagtttgtgacatacattttgtgatttaggagtataaaaacacattcttattcaaatccgagataaattgtactatatttaaaataagagtgaagtatataggtggtcctaaacttttgcaggtgcgtcatttagatcatatttttgggctcctaaagttgacttcatgccatacaggttcaaacgagctccaatccactccagagtgttgacatggcatatcatggtggtacctacgtgcctatgaattaaaaaaaattaattgacaataagttgatttcatgaaattctactttcttaggcatctataacacaaaatcacgcaaaaccctagttactagatgggtactccgcgcgttgctacgggagaattatgtgataatatagtacatattacttctaaaattttctttcttacctactatacgatttttttatgtgtttatatattttttacatttatcaattatccataggttataaatgattgggttgtatggtgtgtcttttggagggaagagatgtaatttataccctttatgaatcatccaaaagcttaaaaacaattgaggtgatgtgaagagatgcaatttacacccttgatgaatcatccaaagggtaaaaacaattgaggtgatgtggcttcatgagagaatagagaattagcattaactacagttactggggatgaactttatagatatataggatcatcaaagttccaagggcaagcgtcccagcctagggcatctctgcaggtgcaccaaacaaaaatagtcacagggcactcaaaaaggatatgatttgtggtttcagaaacatcacaaagaaaacactcttcagaaccaacccatcctttcaacttaagttcatatttttaaaaaaatagacttagacgaagttcatacttaataacattcaaacgatcagcaaagttctatacttaatccacccctagaatggacggcggcagagacacagacgaacacccgaaccttatgctggcatccagccctcattccgggccaggacgcggtggcgctgccacttcttgttctcctccctcaggctcgaggagttcgccttccccacggtgtggttcttgatatcctccatgctattccaccgggacgccatcttgccggggcagaccaggcacctgaagtagaagccgttgtagatgacgcgcagagcaccgccctgggggaccggccgacggtagccgcggcgccggtcatcttccgaatcggtctcgcagtcggacccggagtcgtcctcatcgtcatccaactccaactctggcaccatcttgtcgtcgtcgcctgccagggagccccgagtggctctgcggccctttctacctactatacgattttttttcatatgtttatatatattttacctttatcaattatccataggttataaatgattgggttgtatggtgtgtcttttggagggaggagatataatttataccctttatgaatcatccaaaagcttaaaaataattgaggtgatgcgaagagatgcaatttacacccttgatgaattatccaataggtaaaaacaattgaggtgatatagcttcatgggagaagagagaattagcattaactacacttagtggggatgaattttatagatatataggattcgtataatttgttttcaaataaccctattttaaggcaaaaggcttgtacaaatttctagatttgtataaatatctatattccatcattggatctgttcgacaggcgggtatctgccgctgctgctgctgtgtgtgtgcagcactattagtgctagctaaggcgcaggcgcggactgagcagctgaacaagcccattatattgtttgttacttaaattaaaaattgtatactctcaatgttaggtgccatcagtcatgtggggtttatataaactttgactataaaaagtttaattggtttcatttccattgatggaatttgaaattgacatgatgtagttaatatattgttctgtaaaaacatcattgaatgtcctcatcgcttttttataggtcctcatcacttatttacgagcagaaaaccagcgtggcgttcttatattttacctaaaaaaagtggtttcttatatttaccttggcttaattttgtcttctcttctttattaccaccctatcaatatattatatattgacccaccagtaaggttgtgttcctttgctacctttcccagctcatattaatccattttataaaaatagctaatactttattaatcatacgctaatgagtcagtacatgttacgtgacggagggattagttcccaacttactccaacgaactcagcctaagaatgacccaacctgtcattcttagcaagattccactcacaaacatgtagctcatttgtcgattgccgtctttttcttcacaataatcgaataaataaataaataaataaataaatatacatacatacatacatacagacacagacacacacacacacacacacacacacacccaccgtttgatcactcctcccatttataagatgcgttttgcatatcaactcattaccagggggtaaaaacagaaacagaataaaccgctttgatcaggccaagcagatctatggacagggaagcgaatacatgaaaacttgagatgccattagaacgtggaaatatacaacaaccgtcctgtactagattacactcagatccttgaccccaggcaacctaaattgccataaaagaaccaacttacatcacagagcatctctctctctccccctcctttcttcagcacccatgttaccactcggccagtgtacctctccctgcttcatcaaatggtttcagtgcagcatgggaggtaaatgaagtagtggagtgaccattgcgaagccttgaagggcgcagctcaggtgaaaatctcgttgaaagcgcaccgcgacacagtcaatatgataattcatggccacgcagtgatatgtacttcttaacccagatggctatatcttcggcgcaagcctgagccagtggtgttttcagcaagacgtccagcgtggcgaactcatggaccgcatccttgtactcgagaacaggggcatccacatttaccttgcggagctcctccgagtaagcgatcgcgcggtccttcatccagtccagctccgcaacactgtcaatgttggaggaatgagcttcaaagggggacctttaccgggaacaagagggtttgcagctggatgatccaagctgaattcaccctcaggcaagaagagtttccaggccagtaagcacgttgacttgtcatagaaataggagtttgccagcttcagttccgattgcgtgggactagtccccatgaaaaatggatacatcaaaacctgagcgacgaccttgatggggtcgaggagtttcccagcctcaacagcttttcgagccacatagtcagcaatgttcgctccgcagctgacaccaaggagaacacacctattaccatcaaagaggaaatgcatgtcagtaactggtatcagtagcacatttaccattaaacaaaatacagaacactgacacttagaagtcacatgtgcaccacaccactacaactaggatgcataagaaatgaaatgtctagaacaggagggatgtataatgtgaggcacacacaacacacagatcaacacgcaaacgaattacactgttacacaaaacaaaaaaggttaaacacacaaggtatcagagaccaggtggggatggggctattctgttgaattaaatagctagagaagaacagatgtagggaaatattagttcaagctacattttgtcgatttatcagaacaatgatcttacaattgttgtggtcatatgttttgccaatttatcagatcaatgaacttacagttgctgtggtcgactggtgggtacctttactgcaattattgtaattgtaaggactactcaccagcattcaacaccaatatcagcaggggatgggagaaagtagacgggttaggaatacaaaggttgacttatttcttgcatgccgaaactgatattatcaactccattgtaaaacactagcacacttcaattcctaaggcatataatgcatatattttcctgattacttttcccagctgagtacgaatctgaattggctccatcctgctttgtcttaccacaagttttcactgatatctggactgctttctaatttctaatcccaagattttagccaaacaaattataccctttagtttggctttcgtcggttaacatacatgatttcaaaggatgttcacaatggtggtactgatccgatcaaattgagcttgcattcgcagcccattgatcaccccagaaacataaaaaatgaaaattatccttcagagagcatgcggcaaaaaaatgtaacataaattattgtcatacttccatcatgaatactagaagcaacaactgaagatataagaaatcataaaatgtatcatggaaaagtataaacaatgcatctttgttgctaacatatttgggctagcagtcactatgctttgtacaatagtttgagtcttttgtaagggcaggttacataaaaagaaatctaaactaacctaatctccatcttgaagatcgtatgttgtttcttctcgccaattatctaacaacgtaatcatgatcaactcagactttaatccttcaacataattcactgaagcacttaatcatgatcaactcagactttaatccttcaacataattcactgaagcactgaatatgccaatgcctaaaaactatcctatataaagggaagcataacagctacacatttttctgtcatccccattaaacttcatgctacaacagaaagctgaatagttgatcaagatttaatctgacacagacatggtcaccatcaaacaaaatgtttttgagaagcgtgactgcatgagtactttaggttctcatatttcaaaatatagtacttttggcctcacatgcaatttatgcccacagatcaaaatgccaacaaaaaaaatatatatataacaaatattcatgcatacgaaacaatctggaacattactgaagatataatagataaacaatgcaatagtggagccacaaggcacttatgaaactctagaaatcatctcaccatgtcccaacaaaagaacaccatgtgccacacatctttcccaatgatgattcaccctttccaatactcatttttttatcccattattttgttcagcacttaagctcctattttttcctcatctctcatttcataaaaccccttccccttcaagtcatatagaacgcaatgggttagtttgattttctgtctccacctgctccttacacccagcaatccagtgccgctaaccatctcctcttattcttcctcaacctcctgatctccaagagcatgcagatgcaaactgatatttctcctccaaggttccaacccttttctccctcccctcgtctcctgactactactattaaccacttgatattgttacacacacattaattctgtcatggtcgacttcaaatttcttgaacacatgagaacccataatccattaagatgcaggcacaggacaaattttgaacatgtataccagaatgaccactgtgcagctcatgctaccaccatctacagagaaggcatctattaaatggttacgatctacagcgaagtacaggctacgatcgagaatagatctaaagccatccatttaaatggtttaacttaaaccactatatttacagtgtaggcttgagaagggaccaactgaattcgaccaacataaagaatcataggactggttgaaagaacaattctaaattcagtctccttattcctaagttgatattgtttactcctacattcaactgcccatcattgaacttatttgaaaaccaatcatgcctgagttggccatgtgtcagtggcagttgaatacagtctgcaaactatcatgtatgccacattatgcagcggcttgagcgttagttctatctcaggtttctcaaccaagaaaataagtatatgactaaatccaaagctccagcacagaattgatcagatctacaaacacaatcctcactagatctgtcaaaacaaaacctacattcccgaaagtttatcagttatcacacacattgcaaagttggacgacgcaaatccgcaagaaatgagattagctcactatagtaaagaccattcatccatcaaacgcaatcacttcatcataacctaacaagtcaccacaccaaatcttgcaatgctcaatgctgactctagaatctagattctagcaaccaggaacgaacaatactcatccacacggcaaccaaaaaacgaatcccaagaaatcaggccaagaaaccgcacctggatggatcggcgtgcgcagctagccacggctcgaccaacgccgcgccgaacgaatcggcccctccagagcccgcccccctcgccatcgtccgcccgcacgcggcgaggttggcctgcttggcgatccatttgagcaccgtgaccccgtcctcgaacgcggcggggtacctgctctccggcgcgagccggtacccgacggccaccacgatggcgtcgcagagccgcgcgacgcggcggcagaaggcgtcgttggcggcgctgtcggccgcgcccgtggcgaacgcgcccccgtggaactgcacgatcaccggcagcctcctcccggagcgcgccgtcggcaggtacccgccgtagcacggcgcggcggagggcgacaccccgctgaagctcgcgctggcgcggcgggagagctcctgccccaccgccgccgcggggctgcccccgtcgtgcgctggctgcgggaacgagttccgccgcagcggaggcggagcgttcgcggcggcggcgggggcggcgctgtggtgcgggttggggaggaagaggcggaggtggagggaggagagcgggtcggggtggaggtccttggtggcaacagcgtcagcgccggcggcggaggagaaggagggattggaaggcggcgaggggtggtggtggtcggcggcggcgcgggaggagacgccgaatgaggaggaggaggaggcggcggaggcggagagggaggagaggcggcggcggaggatgagcttgaagaggaggctgtagagctggattgcgacggggggcatggccgtctccggcggtgggcggcgtgggctcgccggcgggtgagtcagtcggcgtcggcgtcggcgtcagggtggtggtggtgccatgggagaggtggccttccgctttttctctcttttttggtgtttttattttggaatttggtgagcttaggtgtgttgatagggatgattaggctagggatgaagagagtggttagataattttggggggctttggcttggggaaccaaagagatgtgcaccaaagtcggcgcgtcctttgtgattgggtcaggttgttaaaattgagaagttttattactcattggatgaattgatggaatggtatcctagcctttctcccatttcacggtatctcattaccatgagaatcttctattataaacgcgatacgatactgtaataaactcatgtttaatactataatgaaggtgtatatattactggtttatgtgtccgtttgagaatataacttcgtgtagtaaaatgcaatgcatattatatgactgtgattagcacaattgtccttgatgtttgtgaagaaagaaggtgcaacacaatcaagaccatgtgttattatctattgatatctgttcatatagctttaatagaacaacgattatatacatggatatgataaatagcaaatgttggtactgaccgtttgtttgagaagatattatctgatcgatatctacttgattctctatcacattgactcgattatattatcattagcagttcaatattttatattatggatatacgaagagcgcatagaattatgggttataattgatcatatggtcttaaaattttgtataacattttaaaattattaggatagtaacctgaattaagcacaactatgaacccaattaattgtctcatatttaatgttagaatgatactcatatgctttacatgtgacaagtactccaaacataactaatataccagcagaaaacaccaaacatcattaaaacctatgacatcacccccttaccaatatcttgaggagataagcatgaaaacaaaaatatcctagacgtcggggcacaactgctgcctacgagaaagtgacatggaaagaaaaccaacgcttggtgactgtgactcatgtgggtagctttcggctgtgcactttgcaggtctcgaatctccaaccccctcccctgttggctccatccgtccaggtgtaatgtgaccatgcgacagcgtgtgagcgggacagcgcaaagccacgcgaagtgggcgttggtaagggtaattactccctacaatcctattttaaatgcatttatatgtccaatgttaaatttttcgtcttatttaaaaactataaaaaaatttaaaataaatcacgtatacattactatttatatttgatcatctaataatagtaaaatactatttaaaaaaattaaataaaacgacgatcaagcattaattaacaatatatggcatcatccgcggcatgagcaagttgctagtaaattaattagcagcataatctccgtggttaatcacgcttaccctccgtggggttaatggctggtaactaatgctgacttgttacctcacctgcctgcgtgcgcttttgctttgctttgttttgccaccgacgaggtggcgcatgtcggggtcggcgctcgctggcgggtggggcccaccaccaccaacggcaggacgttagggagccgcgctcatctgtgattatgttggccttgggattactccacggttgacgctcggctcatcggaatccgcattgcttttgtgggcgttttgccgtgtcatatcggaggtacgaacacacgtttaaagtattaaatataaattaataataaagcaaattacgtattccgcctgtaaactgcgagacgaaattattaaacctaattaatctatcattattaaaccttattaaacctaattattaaacctaattactatagcaccacattatcaaatcataaagcaattagacttaaaagattcatctcgtactatagcaccacattatcaaatcataaagcaattaggcttaaaagattcatctcgtaatttacacgcaatctatgtaattagttttttttctatttaatactccatgtatatattcaaacattcgatgtaatagggtgaaaagtttttgcgtgcgaactgccttagaaagaaaaatccatggaagttagaaatagttgttgttttacgtaagacttgtattagactttcaaaaactttgagtataaattttaaaaactatgaataatttctaaaatatttgccgtataaaatgaatactctattgtaacatacccaaattctagaccttaaaaatttcctatcaaaatagttggaagctaacttttctatttttgagagccaaaaatttccattttaaacaaaggtgaagttgatcaaactcttgcatgataaaattttagaacaaattaaaacctttgcatctctaacctaggacaaaaaaaaataaatttatgtgtaagcatgcatactctcatagccatgtttgacttgagtccttcatatgcatttggattgcatttggattttcgatttgcatatcataataggtctcatgaatattaattaagatctagataaacaactgaaccattagggcctagtgctagctagaggaagttaaaataggaaccatacaccttaaaatatatcaacaaggccaatgtcaagccccacaaaactatttggtcatccatctgaagactagtcatgaacctggtagtgaacaaataaattaactcatatagggtatattccaccttagttacctttataagcattctcttaattaaatactagagtaaacttatgcataaatagttaaggagcttatgacatgtgtaaggtaaactgtaattctaacatatcaatatcacctcaggttaatgagagtccaaatataacttttataaacatttacatgcatttaggaaaggaaaacacatatataaagataagtcttgcgaattatctaaaataattcgtgcaagataaaatcatgggaaaattcatgtaggctctacttaacatatacaactcactgtaattttggtataatttaataactaaatttggtacctcaaataaattagtcaaactaataaaaactagattaactgtagttcttaatcggctaaaaccatactttgtctaaaagtgcatttaactgcataaaagtgtataagtaaaataatttattcaaatactaggttatttatcatgaataaaaataatttttccagaatttatcttctctgtttaagtctcctaaaaattcgaactagtttccaaagaacccatattcctctaatttctgtgagtaatctatccataatttttgagtgcaactaaagaaaatggaaactaggtacatacacctacctccagtaaaatcaacactagttaatctgatcaacacattgagtattgaagctacaaaattagaggagaaaataattccggaaattcgtccaaaaaccaagctcacccatgtttctgcctacacatatcttttccacttagtttacttcgacctgggcccccttgtcagtccctccgacttgcccttcctctgtgcaacttccctagccgaccgagaaacactgagagggagagatcgaacgccgactggctctggacgccgcgcgacgcgtggccacgacgtgtcgacgccctaaaaacgccgagctccatctctgcctctcccagacgcgtcgccactcttcacccaccattccagtgccaatccatccgagggagagcatcctcgctgctcttctccactggttctccatcgccggccgtgaagaagacgatggccgcaatcgttgatgagccgcggtcgtttccccttctcttgcgttccatactctcctcaccatgccgaatatttctccttttgatttcatcctctctggtgcagccaatcgacgggaacgctgccgtgcacaccggagctctggagcgcgctcagcgcaccgccgcagcgacatcgtcgccgttgccatcaatctagatcaagccggagcgagccaccacgccaccagcttcacctcaacctcctctccatttaccctcaagaaacccatccaatggcgcagcgatcttggaggtcgacatcgtcttttccaactccgttcaaccgcttccatcatcgattccattctctctggtgagcgtcagtcaaattccatgcatgcatggcctctctagatagcctttgacctcttgcatgcaccgtattggtgactccccttacagatcgagcagcggacgtcatccctggagttgtgccatgccgccatggagcttcgccgtcgctgtgactctacagacatccccagccttgtctagcatctcggtgagcacccagaagcctatagaacatacatgcatgcacccaattaaccaatacatgattgtagaagcacatgcatcaccacccgaaaacatcctcttttcagactcgccgctggcgttactccgatgtccactgaccaagaaaagtagaggaatggaatcgcaatagcatgatcttcattttgtcttttgtcgcacccccaaacgagccatcgtttgtcgccggtgagctcgagatcgagctcagccatggctgttctgcctctgtgcgtgagaaaagaagtcagggaccttgtttcgagaatttaaacaactataaggtttaatgtgcaacttttcaactcactgacatatgggcctaggtctgcgtgttgattcttagaaacctcagagatctttttgtatattgatctctcactgacagtggaccccttggaaacaaaatctgaaattataaaagaacagtaactaaaacatgtaaaatccatataaaattaaatatagctcattttaagatgattcaaatttctgtgaaatcaccaaattgagaactttgatgttatggaataaaaacttgcactcacagtacaaatttagcctctaaaatttatccaagttaaatcacacataaagcatgcacaaacttataaaatgcatacaaaattcatttcaactcattttggagcaatctcagtttctacagatccaccaacttatgttctcctataaagcaaaatgaaatagtatacatactatacatcaaatgcctctaaaactgttacctttaaatgactagttttagataagctgaattttagaagttcatataaaattcatcttagatcctttttgagtaaacccaagttctgtagaatcaccaaaacatacacttccaagttataaaataaaattatatacttactgtatgataaaagcctctaaatacttatgtaagtaataaccatcatagagcaaccttaaattgtaaaatttgtagaaaattcatctttagtctaaatgaagtgaaccaaatatctatagaaccagcaaacagtgggcttcaacatagtaaaataaaatatggaaccttctgtacaggttatagctctaaactttaaatttataggataggtgctaatcacaaagtatcgattgagcaatatgtatatatataaatgtatatagaaatacactctagctataatgaaacccaaataaaacttgttagaccagtgaatgcatatttctatccccatccaccaaaacttaaggcacttagctcatataataatttctaggttgatataataaattgctaacatggactagagctcccctagtttataaaatatgaaccatgataataaagaccataagcctatgaactaaggttagattggttaactaaaatactcattttatacatcactagctagatgaggaaagttttggacctaaacctctaaagccatgaacctatagaacactatacacctataacacgttataacttgtaaaatacataaagaattcatattaactctaaaaattatgaaaccaaatgtgttagtcttagaaaatacatatattcaccccccacaaacatgaacttaataagaatcaccttacgacagcggttcataatagtacctaagtaaatcctacactataccgacgaaacttctaaaattcataattctcaaatgaaacgagataaaatagaaattctttcacctaaattcattttagaccagtacctattcactgtgctcaaatcatgcattttagagtattttggatttttcgcatatttcggtgtttaattgcataacgtgtactttgtatagatgattgcttaaacggtgaagaagtgatttaggtgctgacattttcctgattcaaggcaagtcccacctccctctctttgatcactttgaacctatgttttggaggttattgaaaatgtttgcaaatcttgcatgtcgattgtacactaataaattaaaattttgttaaacttgttagataaactcctattatttgcattatcaccttaactccacatatatccatattcctcattcctaaccttaggaacaatatgactataccactttatatatgagttttggtgacactaggttactataaagcttagccatgcttagaatggtcttccttgtcattatgggctcattacaaacatgaaaattgatttttaattaatctggacggaactttaatacttgtgattttgataaataaaatgatggaaaacatggattttaggtttgggcctcaagtggtgcacatatggtgattagttgtgtaccgatagggggagagtgtgcccaaaccgacctaaggacttcactcaatgttagttcatttcgtatacagtgcaaccacatgtgctagtatgggatagcccaagcttagtaaattatttatggtttagccttacattctggtaggccggtgtgtatgagttcgtataattcagaggagcttcctatttaccccgaagtggtagtttaggcgactaagcgtgtccaatacaacggtattgtgccacgtggtgggttcctgttgtgtccgccaccacggcgttaagtttaaggcgtgggcccgccacttaacggttctaggtcatataacgtgtatggcttaggatggagtaacacgtatcgtgctggtgtaaggctaaatcatgaattttggaaaagctttgttgcgggtaataaatcgggtacttatgtatcgcgtgccatgctgttgcatgattattatttcgcatcatgtgggtaaagtgtacagactctgcagagttaaaactaatcgattagccatgctcgcggtcaagagcgatgtgtggatatgtattgagtatagacttgtgtttattcttcaaaatgctgaaatttaccttcaaattgtgatgagatttgagaatgatctccttgctaccatggaaggcaatgaggtgcatatttatacatgattaatgcctaccttgatgcccaatatgtcaaatactagcttgctgaaatttatttgaaagtaaacctgatttagaaatgttttatgcaaataaaacttgctttatgctaaaaagaaccatattataccttccttgattatatgccttgcaagtagggtcttaggcttgtgttggtgcttgccagtacattattaaataataatgtactgactcttgctgtggaattaaccttttgcttgcaggatttagacttagcctttgagtgatgcgggtgatcgactgcttcttctaggacttgaacttaatgggggtaaacccctagtcggtatgcttgtgattgggtagacaagcttccactgttctatatatttatttggccggtcggccaatgtaactaaagtagatgtagtttataatcgctttcatcttatttgtgtttgctatgtataatcatgcttgagatgaaagtgtgaatctagtgcacatcctgggaactagattcacatgagtatgagttaagaatatttgagatgttgtagatctttagctatttttgtcaagtctcctgaatgtgtaacacatctggtcgtcgccttcgagtggtttgacgggcacatctcaggctgaagttgactggcaggctaaagacctagcaatgtctccaatattcttctctcgaggcgtcggatgtttcattatgtttgtttgatgacttgaattattcacttcatccctcaaatataatggaaggtccgtaaagcctacgacatctatgaatagaatgtacttcaccaaaatcatatacatttgttaatcgggatcgctaaaagctgtcacaagtttttttttttgcaaaatactttcaaatgtaattataatgtagttatattataactacattataatctatagataagttagatataaaatggcatatattgttttagtacatattatagttataatatagttatagtggaattatattataattatattatagttagatttgaaactttttccttaaaaaacttatggcagtttttagatagtccctctcttaatatattgtaatagaaaatattggtcaaagtttctatatagtataatgtaaatatttttggagaccgtgttatgattcaaaatgatagcggagagtaccactgtgtctttatcgttaaataattaggcttctttataaataaaatagtcgttgttgtcatgatttattctcaaacttccaacgctcatatttgtaaatttacatatatacatacatgatcaaatattatcgaaatatattttgcatcataaatataatgttcccatgcaattctcattcatgatatctaatcattttcttactgatcagagtaaaattatattgattaaccctgacaattatttgaaaacacagagattatcaaccttaagtccttaattccttggtctcctaaaataacattaaccttgacccacttcggttccataattcttgatattttagacatgaatgaagttaaacttttattatttggattattagtaacttaaaaacaaatatttagtttaaagacactaaaacatagatttttcatacaagaataatgtaatataaataaaaggttatttatttattatgtattataataaaaatataatcaaagatatatttaattttagagaccgtatcattgtctaaaacgtctacaactatggaatagtttctactgtaatactcctgtatctacaactatcaacaaatatataattttgttgaaataacttttaggattaactaagaaggtggcccgcacgatgcgtgggcatttattttgttgaaagataagattatagtttatttagaaattgtctcataggtaacaaacttaggatcgaacaatatccttttaaaatgattcgggtgttctattttcttaacatatctcaaaaaacattcatcaactcttgaatagaagatggattaagttagtacaactcttgcatcaaataaatattaaactaccgctagcttaattatcaagcatatcacttgtatacataccatggaaatatggctacaagcgaaaattgtgagatcaaggaactcaaaatgatcaatgatcttatgaaggcatatgacaaacaaattaagggtaaattaaaagttggattatccccctctatataagttcaacaatttcatattttctccatagttctgaataactttaaaaggttttggtgcatacaaattacctacaccatcgctttgcttggtattgcaaaatatcaacattgtttgaagctaatttctttagttttggcaagtttgattattttcttgaaacaatatttgtttaaaataagaccataattatataaatttaattagtatggggtagtttacttataaattttgaagtgttttgtagcaaaatttcatgtagtctagttatatcaataatatagttttgttcaataaattgaatattatttacagcaccagaattaataaaaatttatcaaaccatccatgactacttaaaaatttttggtttgtctaatttgtttatttcaaattcaaataatcacatattctccttctaaccggtgtgtttgtcattattcataataaaaaacacatcgatgttgtcactcaatcacatataaatgtaaaatatttgtcattattctcggaccgctcattcctcggtggtattcttcactcatccatcatcttaagatagttgtatacaacatattttgtctaattatttagtttacataaggggtgacaccacgctcctcctccctcatgcatgggacacagtgtccaaaatgttttttttccaaagcaagttcttaattaacccatgtaatttattagaatattacatgtgtaatatatgtgtatgtgacacatggtaatttttgtcctagcttcgccctgcttatatactataaaaagagataaattatattcaacccgcagtgcttgattcttcttctttctacattgcatcttcacgatttattttcatgttattaaaaaaaccaatcgttgtccattgataatttcatacgtcttcactttagcaaagcagtagcgctacaacatcatgatcaccttagctaccttaggtatacgatgctttgtcatacgtgtagaaggtaaagatgtcacatgtgttgtatagagagacaaagaggacttccgaggctgttttttttaacaaaagatagatctcatggtctaaataatatgtccaccggtttaactaaaaatcaacaaacaaatatttttattaggaaatagtctaaaataattgttacataatatcatataatggtgtaaactctatttttaaatattgtagatccaatttattaacatctgattgtaacgagttatatgctgatattcaattttttattaggaaatagtctaaaataattggtacataatatcatataatggtgtaaactctatttttaaatattgtagatccaatttattaacatctgattgtaacgagttatatgctgatattcaatgtttgtaaagcaactattatttatagtttattatcatgaataataataattattagtgtctcaactaaatacatggaaaatggaaagggaaaaagaggaaggttacatacctcctgggtggaaggaaaggtgtatacatagggggtggagaggtggaactgttgtttaatctaacggcttataatattggacccaccaatttaagtggaaataaacggatatatgttttgttttttttctcaaattttataggatttgttggcaacttgcgagagttttgaggaagtttaatcgaaatacatcgtatgatttatttgaggcacttatataaggataatattaactggagaacatctaccacattttctccctaaattttttcgtcggctttgcttttataattttgtaacctagtagttagctttatactatatcgtagttaagtaatacatagaagcaattatttatactgttattcatcaactgtaaagaatggtaggcttattttctttaataaaacatgtctactaaattaagtgttaaagtaaaattaggacttttttaattggatataggttattgttttctattaatggatgaattgcgtggacatgaaaatccactaaatgcattggtttatatagtctaatatgattggtgcagttcgagatgtggcacaggaatacaagaattgagaattttttatggtggattaattgttttttggattttaatatttgtacgttaaaattcagcaggtatcagtgagatggagtaacctgtcagttttgtatttttcttcagaactgatgaattaaacattggtgctaattacatctaaatagtaaaaagtacgtttagttctaataacaatgattaaaagaagcaatattaaacacatacgtgataattgctgatcttcgttctttctatcccataatgttttctaatctgtaaactcaaagtagcagtccgagaaacactttttttttgctttgacctatttcattattgtatcgtgtgataaaaaaaaattgagactatttttcagtacacagtacttattatcatgttccataactttgaaatttttaaaaatgtatcttactttttggcctaaagtggtttgccaattgctttgggattaaggcatgtattgtgttgccctgaagaaaatagtatttacataatagaacaatatattaaatgatatgtttgcaacaatcatacctctgcatctagtagaatcatccgcgtataccatagaactcatcagccattataggattaaccgcttcccatatcctaatcactcttactttaattatccacctatcatttttcttgttaacgcagtaatcaaattgcaaggtgccatgttatctgcaaatgcgtatatgcaatataatgtatacatttatgttatttaatagatgcaatatagtgtagccctaattaattaatacatgatagcactattgtgttcttctgtaggtacacgattaccttcttttgtcaaagatgaccagcctgaattgactaatgtcacaaaggtgtcgcacacgtcttatgctaagatgagtcgccagagccgtgtattgtagagattaaaatgccatctggtcgtggtgttcctaaaggaggtaaataatatgagattctacttaggagtaactaatcttgccggcctcatcgatttaaaatttgctaatctgctgaccggtgtgcatatgtatatgtagagataatctgagattacgttgacgtaagtagggtaactaatcttgcctactttattgattcaaagtaggaaactaaccttgagataaatgcgctccatgttatgatcacggtaaatacatgaactgcacgtgtgggtcctcaactcctatgcgtgggttcttattgtgccatgtcatgttgagagcgttttgagaaagccatgtggcagttcaagagtgtttgtaggaagtttaatggacttttagtatataataatagatagaagataatagatagatagacagatagatttaatacatgttatccccatatttctaaagtagtaaatattttaaaagttatttgtagttagagttttaaaagtttgacatcggtcttgtttaaagcaataattatttttaactggagtgagtacataacaaattcttcctgaattatctaaaagaaacaaattcttcctgaagttagtagtgtcattaggcttttatttgcattgaccggctggaagctgcttccattatattaaaaattattagaatttcttttactgatatttcgtattggacgtgacaacttcatcaatattttaccaaagctaactcagagcatccccagcagatagtctgtcatgtccttcatccacgaaatagcgtatggtgggagaaaatctagctccagcggatacactatccgggcatgcagggatagcgcatcccagagagttctcatgacacgaacacgcaactgccgctcccagccggattgagccatgaagagtgaaggagtgaaggtagagaggagagaggatgcgctggtggccaccttcgatggccactccaaccgtcggctacttgcacccatgctgctcccgtcatcggccacttgcgcccgccccttgcaccgcccgcacatcctcctccgtcccggctacttgtgccacccctccgttcaacagctcgtgccgcttctccgcctgcgccgccttgccatccactccgcccctttggcccacattggcccactaaccccacacccccccggccactcgcgccactgtttggcccatgccaacccgccgccctgacggtcggtcctcgtcctatcgacagtggacatacaagagagattgaaagagaaaggcgaggaaatatttttagagcggggaaaggtgaggaagttaatataaatgtatggtagttgaaagatattagtaaaatataggatattggtatatggaagatgtaatataaatgatacgttggaatgaaaagtaacatagagtaggaatcgttttggatgatcatctaaatgataatatggaggatgaaatttggatgagctgctgagatgttctaaaaccttgatattctgttggtgccaaaccaactgatgtcaatacagtactaaaacagacatatattggtaacacagatagacacccatgatttccttcgacctagctttttgcatgatgggagtttctagaaaaagtggctggttgatggtgtagtttatctgttcatgggcgatattgcactgattctgttgtcttgcaacaagcaaagaatatgttcagagtaagcctttcttcgtaccacaccataaatatatgcaataagggttgtgttttttctaacacttagctctatttaagttgaaatcgagagttaattacagaatagttataatgtattgtgttatgtcgtatttggattttatactatttgttgctctatttaagttggaatcgagagttaattacagaataattataatgtactgtgttatgtcatatttggattttgtactgtttgtttgtataggtaaaagaaatcattatgttataaatgtgagcacaatattaacgaatatcaatagaactcttacagagacaagggtgctataagggagtttaagaccctctttttttccctgattctatagttggatttttgtttgcacgctttccaagtttctaaatggtgtcatttttaaacaaccttttaactttctagaagtcaattcattcatttataccctcgaatagctatcacataaataagataattcatcaattttagcagttctaaaccctgagtagtatatattttttcatgctagtcatggtgatcattaaattagggatcaacggttaatcagagtcgtaagatgaatatgtacgaactactatcaacaactgtagattggtgtcaaaattaattgctactaattaaacatctaatggcttgctagccacataattaatttctctctacatgtatataaacatgcacgaagctagaacaaatattaccatatgccccatacatatatattaagcggttaatattctaattacatgtgttaagtcctttaaaatttcttaaaatgctctcaagctatcacgtggtgctctaataaattagaggaaatattagaaattctaaggaaaaaaaagcaaagtatccattacttgattttcggttaaatcggtacgcccaatattataaaccgctatattaaattaatcttagagcaaactaaatactacaaggtccgacctctcatccgctggcataggtaagcacctacgtacgtgggtacgtacgctttccgtcccttttttcatttttccctttctttttttccatgcatacacttccctccctttcctactatatcatgcgtcttcacgagacaatttatcacaataattttgagtatcttgctctcgcatttttcatttgtggccatataacacggtatgtatatgaatggcctgtatgatatctaactagcaatagtttattatttacttgagaaaaaatgattcaaaagtcgtaagtatttaatccatctcctactcaaagtttgtgaatggtttttaaagatatattaagaaaaatagaacccttaaattatcataaaatgacattatccgaactttagtttgcccttaatctatgagacaaaatttttgaacaacaataatcttacctttcaataatataagtacccgcgcatacgcgcgggccaccttcctagttataaaaaaattaaaaagataagtcacgcataaaatattaatcatgctttatcatctaacaacaatgaaaatactaattataaaaaaaattcatataagacagacagtcaaacgttggcacgaaaacccatttttttgggacggagggagtagagctgaagtcaacgaagtatctgtcatcggaaaatctgcagatgtgatgttttttgatgaatattagagcaccattgcttcttggtcttacgaacaagcttcgttgtcgatatattgttcttgacgagagccgtaggaagatcgatgatgttacactgaagaccggaaacatgatggatctgaatcggagaagagtgaacactggctacatcgtatctggagaatcgacctcttgagcctatctttgtcgaaactttgaagcaccaagtcctctatcctgcgtaccactgtcaatgggctatacccgagtatggtatttggagagtaatatatatatatatatgcaaaactgtagtaaaaggagacaggagacatatatttttatacaggttcggacccgtaccgacggataataatcatatttctattggccagagctgatgttatctttatatatcaatctcacatagacaatagataagaaaacctaatctaggctctgtcagtgcagcggcgtaaagctcgattaggtggtcgacagctccctagaacaggaacgcggcaaaatttgtaaaattatttcccattatcggttcaacgtttattgccagatcagttcctcttagaagatgagatactgtagttcagctctgttttgaccatcctatatatgagaccattcttgagaaaattatggaccgcagtgttgcttaggctgagttcttttcccgactcacctttcttttattccgcgcgtgtgcttttcaaactgctaaacggtgtatttttttgcaaaaagtttctatacaaaagtttcttaaaaaatcatattgatcattttttgaaaaaaaagctaatacttaattaatcacgtattaatgaactgctctgttttccaaattagctaatacttaattaatcacgtgttaatggactgctctgttttccgtgagcaggagatgggttccaacccatagcaacgatcgcagtattgtttagtaattaatctatgtcgattatctgtgttgtcaaatggacaactgcgtcacgtcgaaaggcgtgcttctctcgacagtggttggaagtaaaaacaattgtattgcttagtaaaattttttggatccccccattacatagcattaggtggctatttatagccctattacagattccccctttagtgtttaggtcttacagggaatttacatggttacccttgtgatagggacattattgagggcacactgtatcctttacatctatggcctcctattgggccatatggcttggcccatctgcttagcgaaaccttccgggagtacaacggcccgctgggccactttacggtgaggttcggcacttggcgaagtccgcgcccttatgctgaggctttcgccttatcgcctttgcccgtacagccttctgacgaagtccttgtctggcgaagcccgagtgtccgagccatggccttcgccatgagactttcgcctgtacggttcccttctcgattttcgccgcttgcctctggtctaagcttgtcgctcaagtcctcggtttcggcaggtcgggccgaaggcccttcgtggtatacctccaacaagcctctcacgggcaagggtgagtagggagcttcggccgagaccgtgtaagtcgtatggtataccacgaggcgccccctttcggctgatgctcctaccgaaacctatgttgtgttcctgcaaagtaaaaaacttgctctcgtgttaacgaaaagtttttgaggaaaatttccttcctgtgttcgccgatgaggggcgaagaggttaggctgctctttatattattatgaatagtaatggccccatgggccttaccattcttggtttcggccttttactgtttggcctcggtccgacgggaatttaccgtttcgtttacccctagacacgtgtcaggttctgattggtcggtagccgaactgtcacgcgacggggttatataataccccccgggttaccacttccccccctcttttcatttttaccgctgtcacgctccacgctctctgcctttgcttgcgctctagcgtttcgccacctccgtgctctcgcgcttgctcctttggactttcttgttctctttttcacctttcgattcctttttcgctacggattcgatggctcctcgcaaacccaccaaggctgggtcaaccggcaaagaccccggtagcctcggcgaagggtggtcttgctaccttggcaagtcccttgtcaaggagtctaacctagccgagttcgtcctctccggtgctcttgcagagggctaggcgacttgcgggggtgaagccgttgtcccttcgcctggcgacaggcgaatggttgtctttgccgccttcctcatcgttggacttcgcctttcgtgcaatgattttcttccgtccgtactggagatatacgaggtcaagcttccccagctcaatccatcggcgttcccgaagttggccgtcttcgcatggatgtgccgaacgtgcgggtttacccctaccgccgagttattcgtcatcttgttcacggcgtgcgcgacaaccaaggacgtgaacacgctggctgggccaaggaagacgattttcggttgtgtgaacttcaagcttcgaccggagcgttcggacgcctggccggtgcctgcgtcgatggcgaagtgggatcgcaactggatgtagaagtggttctacatcgacaacccataccccgccgaggacgacaaggcgaactggctctgtttttagcgccttgctgtctccatcgtcgctaaaccgaatatggaggtcgacggtacactcgagtcccagcttatccttcttcgcaaggttgcgcggcggccaagtacccgcgacctctgcgaggagttttgcctacttcagatctccccccttgcccgcgactggggggggggtctccgttaacgaggacgaagaggtgctcgggcttccccgccttgttcttcccgtcggcaccgaacatgagtttctatttcgcttcttcgacatcgttctgtcatgaagacatgtttcgactcgcttcgatttatccagttcgcacattggaggatgctgaggcggaggcgtcgaaaatggttgaaggtttaaccaccgccgaattcggttgcctgcttcaacgtcaagccgacgggagggcaaatcgcgttcacgccggcgaactggcctgttggtcgattccttccagggttgctgacgacgatgtatggacgtcaaggaagcacaagcgagccgttgcgaaaggccgccaggtgcgaacccagcatgtcaccaaggacgcggccgacaccgatgccgatgaggaggacaatgacgaaagggaggccgggtctgacgaagatggcggatcgcgcggttatacccccagtccaacctggctgaatgctgggacgggttctcatgcttcgcccacgggtcctcaggacgtcgccggcgcgaacgtgctcctggagatctccagctccgtggtgaaaccgggagtgattgacaggaagaagaataagggttggtgaaagtcgccgacggcttttctgacagcgaggtgtctttcgattggacgcttacttcgccggcgccacgacgtgttgccacccggaggagacaactgtcgccacctcccattggtgacgccgaagcgccgatgggtggcagtgcttcggccccagccgtggctctggttggggcgattgagtcagtggaagtgaacacttctggggccaggagagtcgaaacggtcccttcgacgagccatcagcgggaggggaaggcaccggcggttgagatgacagtgtctgacatgacactcaccgccccacacttcgtttccacggatttcgcctcccggccggagatcgcccccttcgttggcttgtgaggtagtgattgttgtcgacgtcgtggccagttgggtgaaggcggcggtcgaaggcgcccccagggtttgggacgacaaggtcgcgtctctgacttgaagggccttcgccgctactgccgctttcgccgcttccgcatcagtcgaagatataggtgccgaaggcaggagagagggtggcaccaccggatgcggcgccgctccggcttcgccctccgaggccgaaggctctgctccctcttcggctaccatctccccttcgctcccgccttccttccgcttgacaactctctccttgacgatcttcttcggtggtattagtggtttcgcttggaggtccccacggacggcgccagctgcgtcacgtcgaaaggcgtggttctctcaacagtggttagaagtaaaaacaattgtattgcttagtaaaaatttttggatcccccattacatggccttagggggctatttatagccctattacaggttccccctttagggtttaggtcttacaggggaatttacatggttacccttttgatagggacattattgggggcacactgtgtcctttacatgtatgggctcctattgggctatatggcttggcccatctgcttagggaaaccttctgggagtacaacggcccactgggccactttacggtgaggttcggcacttggcgaagtccgcgcccttatgccgaggctttcgccttatcgccttcgcccgtacaactttctaacgaagtccttgtctggcgaagcccgagtgttcgagccatggccttcgccatgagactttcacccgtacggttcccttctcgattttcgccgcttgcatctggtttaagcttgtcgcttaagtcctcggtttcggcaggtccgaccgaaggcccttcgtggtatacctccaacaatctggattcacacatctatactaactagcaaaatgcccgtgcttcgctacggtgtattaaaactgaaaatatttgtttttaaccgaattttttttacactgctttggtacttttgctcgctagaaaaagtctcaaatgatagagggaaatatagctcataataaattattattcaatagtgcgttgctacggagtaatttcaattaaaatcacaagaaataattttaggatttaatttgtgatatgagtccttttagagtaaggcattcttgatataaatttgccaataaacaacatgttgaaaacaatatatttcaacatcaactaaggttttatcgcaattaaaaaaagactaacttcctcttgttgggtaattgtattttgtcaggtaatttttatttttagtttttctatgaaaattagattggagatatattttgagagagacaaagtggacttgttgcttaaaaaaaaagactaaccataccaaatgtggcccaacaactcaatcgcacgctgttagtgcttcatgtgctgcgtgcggcccagtagtgctgcagcgcagagatggaggccagctcgatgcgggattgatccgagccactcgttttgatggatggttcggatcggtttagaatccattaaaacggccggtaccaaaaccctaaccctatttcagtttttcctctcctaactcccgatcctctcaggctgaaatggtgatgacgcaccacgatggatgaaatctgattgttatgtttaaggcccccttctaaactccaactctaaacttcaacttttttgtttttcgttaacacgtttccaaactactaaacggtgtattttttgaaaaatattatataaaagttttttaaaaaattcaaaggaacccatttttcaaatttataataattaataattaattaatcatgtattaattgcttgctcttccttttttttaaaaaattgcccatacgagcgtgacggtggacacgagcggagagcgagagagcggcgcgcctcgttacttccgcccgcccttatctcgttacttccgcccgcctcttttttcttttctccgcccgcccctatccccttctcatccggcgattccttccccctcccctcaccttctacgcacgccgtccccctccccctcccatggctccttcccagcaccctcttcctccgtcccctccccctccatgactccttcccagcaccctcttcctctgtcccctccccctccatggctccttccccatggccagcagcaccctcttcctctccgtctcctgtgtggtggtagcggtgccctcccctctgccggatccagtgggaggggaggcggcggcggcccggtttcccggagggacggtaggggagacggtggcggtggggcagcaccctcccctccgccggatccagtgggaggggaggcggtggtgagatggtggtggcccggcgtccggatccagcgggaggggaggggaggcggtggcagcccggcgtcccagcagcggcggcgccctcccctcctgatgtgcactagggttcccgatcttccgaaaggttctgagaaacaacgatttggacggagtcgcgacacaaatcgatccggcttcttgaacacgcacgctcttgagccccacaatcgcagcaccacgtctcctctagttatcacccatgttgaaacgcggatgacctcgccgagaaggctaatccctgtttaccaatcaaagaacacaaacaagaacgagatagaaaaacaaccaaaattgcagatgaatgattaagctcacgagttggggtcttacaaactgatctagcggcgaaactgttctcgacagattaatctaagcaaaacccaaaaacctaaagatggcggcgggtactgatatatagagtttagggtcgtgcaaacccctcttgacgcaaccctaatgggttccaacacgatacacgggccaaaggcccaaatacggtgacgcagcaccgggacagattctggacgtcaacttgttcggtcaattcccgttgactcggaaagaattttgacgtgggaccaaaaccattggaaaggctatcttcttagctttccatcaatataaagaacgctccaatccgagcacgtatgcgcagcggcggagctagaacaaaacgaagggggttccactcgcttgttttactctggtttgaatcaaatttagcttgatacgggtgcctaagtttaaaataacggggtatatatatggtgaaaatagataaagtataggtaaaaagttttttgaaccgggttcctgggcacccccctaactatactagctccgcccctgcgtatgcgacctgggcgcccgttttagtgcagattggtcctgaactccgaattgcaccagacgtcgacttggtttgggcctccaccttgacttgaacatccccgatgatcctccatggctgtaagtccttctcctagtgtctccttgtcccctccattgttccaaagcacaatataatcattaggtagcaatctattctcgaattcatacaaagaagaacataggaacgagctcacctctaaatttaattgtcgcgcacgagctcttgttatcggtccttgaatgaccgttggaggattgttgtgtgtatccgaggtagtgatgtccgcatcatcctccccctcttgaattgaagtcgtcctcgactcaagctcatcctcttctcccaagtgtggcttcaaatctgaaatgttaaacgtgggactgaccccaaactcgggaggcaactcaagtttatatgcattatcattaatcttctcaactattttaaaaggaccatcagcacgaggcatcaacttagactttatcaattccggaaatctatcctttcgctagtgcaaccaaactaaatcacccggttcaagcttaacctcttgcctacctttactaccagcaattctatacttttcagtcatcttttcaatgttgaacttggttgactcatgcattgacaaaataaattcagcgtgtgccttatcatcattatgaaccctctcactagtaggtaaaggcaaaatatcaattgaagcacaagggttgaaaccatacactacctgaaaaggacttaccttggtagtagaatgtattgtccgattgtatgcaaactccacatgaggcaaacattcttcccacatcttcaaatttttctttaaaatagccctcaacatggtacccaaagtgcagttgactacctccgtttgtccatctgtttgtggttgacatgttgtagaaaacaatagctttgtacccaacttgttccatagcgtgcgccagaaatgacttaagaattttgcatcacgatctgaaacaatagtaaaaggcataccatgcaagcgaacaatctcatggaaaaacagatcagcaatatgaacagcatcatcacttttatgatatggtatgaaatgtgccatcttagaaaaacgatccaccaccacaaaaatactatccctccccctcttagttctaggcaatcccaaaacaaagtccatagaaatatctgccaaaggaatagaaggtacaggaagaggcatatacaaaccatgtggattcaaacgagacttagggtgtgtttggttgggctgtagcttttgtaaaagcagttgtgggctttggcttttgtaaaagtagctttggaaaagcagctacgaggaagtcaaaagcctgtttggttgattaactgtggcttttggaaaaacttgtctcacttacgactggacctcgcctgtcagcctcacacagctcgttcagttcttcttcctcacggtccatttcggcggcgacggggaagagcatacgcgcgcggcagagttgctgccgtcctctcctccgcgcgccccaaccctaggcaagccggcgacgggcggggacgaggagggtggcgctggaggaggacgggatgcggcctgttggggacgagcaacgttggcgtcgggcggggacgagcagggcggcgccggacgaggacgaggctgctccgcgtcaatgaggtgctccacgtcgtcgaggagtttagcggcgtcgccatggacatccaggaggagtacggcggcgtcttggcgaggagaaggaggagcagcagcggaggcggctcgtcgaggagttaggcggcgtcttggcgagaagaaggagcagcggcggccagtcggggacgagcagcgtcggcgccggacgaggacgaggctgcgcggcgtcgggcggggtcgatgtcggacggggagaaggggcggtgtcgagcgaggaggagcaggggcgacgccggcgttggactgggagggtggtgccggtgtcgggcgaggagggcggtggccggccggtcggagggcaaatgcgctgctgcatccccgggcggggagggtggtgtcggcgtcgggcggggagggcggcggccggccagtcggagggcagatgcgccgctccatccccattgccgtgcgcgtgtgaagactgaaaacgagaggagacgagaatagatcgaaccgtttttctcataatggcagaggtgggtaattttttcccccaaaagcagatgaaagcagggggtagaggtgcttttgatttgtactacaccaaaagctggctttgggcaaaagtagttgtggcttttgggccttttggttagcttttggcttttgcaaaagcaaaagcaggttgaaaagcccaaccaaacacacccttagctttctgacaagtggtgcaacgtgccacgaacctctcaacatcctttcgcatccttggccaaaagaaatgcatggccaaaacatctttcgtcttcttagctccaaaatgtccgatcaaccctcctccatgcgcttcctgtatcaacaaaagacgaacggaaccaactggaatgcatagacggttagctctataaacaaatccaccattgatcacaaatttgttccaagtacgtccctctttgcaatttatcatcacttcattaaaatcaggatcaagcgcatattgttttttaattgattcaagtccaaaaatccgacaatcaagttgggacaagaaagtatagcggctagacaaagcatctgcaatcacattatctttccctttcttgtgtttgataacataagaaaaagattcaataaattcaacccattttgcatgtctatgattcaaattattttgagagcaaagatatttaagcgatttgtgatcggagtgaataacaaattctttaggccacaaataatgacgccacgtctctaaggaacgtacaagagcatacaattccttatcatacgtggaataattcaaaacaggaccatgcaacttctcgctaaagtatgcaacaggcttaccatcttgcatcaacacacctccaatgccaactccactagcatcacattctaactcaaaagtcttaccaaagtttggaagttgtagcaatggtgcgtgtgtaagcttgtccttcaaagtgtcaaatgactgctcctgtgtctttccccaatggaagaccacccctttcttcgtcaactcgttcaatggtgcagcaaaaatactgaaatctttgacgaaacggcggtagaatcctgcaagaccaagaaagctcctcagctgtgtgatggtttggggaaccggccaactctttatggcttcaattttcgactcatccacctcaattccctgtggagtaactacatatccaagaaaagagactcgttccgtgcaaaagatgcagttttcaaggttagcaaacaaacgtgcatcgtgtagagcattaaaaacagcacgtaaatgatccatgtgttcatcgaaagacttgctataaatcaatatgtcatcaaagtacactaccacaaatcgtccaataaaaggccttaaaacctcattcattaagcgcatgaatgtactaggtgcattagtcaaaccaaaaggcattactaaccactcatacaaaccaaatttagttttaaaagctgttttccattcatctccaagtttcattctaatttggtgatagccactacgcaagtcaatctttgtgaaaattatagagccacacaattcatcaagcatgtcgtctgacctaggaataggatgacgatatcggatagtaatattattaatggctctataatcaacacacattcgccaagaaccatctttcttaggaaccaaaattacaggaactacacagggactaaggctttgacgtacataccagcggtccaaaaggtcttgaacttgccgctgaatttccttagtctcctctgggttggttcgataagcagcacggtttggcaatgatgctcctggaatcaaatcaatttgatgctctatccctctcatgggtggcaatcctaggggtatctcagctggaaagacatcctcatactcctgcaaaaggttagtaacaacaggaggcatcgaactagcaatatcatctaaagaaaccaaggcttgtttgcatatcaagaaataacacatatcatcatctgaaatttcagcaatttcacatttcgttgcaatcataacaccacccttcaacttaattccctcaaccttagaactaggtgaaagcttatcctttttaggtggaaaaacagatttagccacttgctgattttcagattcatcaagtttcaaactagcagctcgctctttatcagcttctacaatttcagcaggggtcaaaggtagcaaagtaattttcttcccattatgcacaaaagtgtatttattactcctaccatggtgtgtagcatcattatcatgttcccaaggacggcccaacaaaagtgaacaagcttgcataggaaccacatcgcaatcaacagaatctgcatatgagccaatggaaaacgaaaccctacaaacctgtgttacctttgctcttccggaatcgtttaaccactaaatatggtaagggtgtggatgtgtacgtgtagtcaagccaagcttcttgacaaaatcataactcaccaagttgttgcagctacctccatcaatgatcacacgtgcacgacggttgttgatgacgaaaaaaatctgaaacaaattatggcgttgcaacctgtcatgctgctgtacctgcgtgctgagcacccgctgcacaatgatggttctgtagtccgttgtgtcatcacgaccaaagatttcgccatcctcatcctcaacttcttcttcctcctcttcctcttccatgtcagaggtggtgatgtagccatcttctgtagcaacataggcccgttgactagggcaatctttctgcacatgcccaaacccttggcaacggtggcactgaatgcgtcctgtcgaggcgacatatgaggcactcttggcgggtacctgcgtggaacctttacctgactctgctggtcgtggtggtggaaatggttttggtgccgcagaagctccggatgcagctggtcgcttgcccgctggctgggaggacgcccgaaaagagacggccttgggcaatcccgcagatggcgtcgtgcgcggagtgtatgtgcttgccttgctcttgccctgatggtcgcgcccctgtaattccttctctgcaggcatagcaaaccgaaacaactggttgacagagttaaattccttacaatcaacaatgttatgaatttcctccctcaaaccagaataaaaacgacaaatagcatcctcgaccccctccactatgccacagcgtctcacacccttttgtagctcaccatagtaatcctgtacagatttatccccttgttccaaacgcatcagtttcttgcgtaaatctctatgataagatggaggaacaaacctatcgcgcatagctaccttaagttcttcccaagtagtaggtaggaccccctcatcagataacccagcccaccacataatagcaaaatccttgaactcactactggcttgtctaactctatgttgttcgggtacaaggtgggcattatacttttgttctactgtcatctcccaatcaaggtatttctcagcatcataatatcccgaaaaagatggtatttttaacttaaccttagcataaggatcatcgagcacacgattattattattaccttgttggtggcgagtgccacccatacctatgcggtttgtgcgtaggcgacgtcatagccgtccttgccttgtagccggtgcgtcaatatagccactggaatcatacaccgtgtcttcaggatgagcatcgtcgtcaccactcaccacttcctcattggaaggtgtctccaacgcggcgacccgatcagttagcgtggatatccgcttgtccaacctctccatgtggttcaagaagccgattttagtgaaggcatcttggacagactttgcaacggcctccgtgatgtccttttgagtattttgttggagagttcgtagttgctcttggctgacacagtcagcaaaatcctagggactcttctcaccttcgttacctgacattgaaacaccaaaacagaaacaaaacggtgaaggttatccctaataatctactacgcaggtgtagtggtgcctctgaacgattctcagcaatatggagttcctaaccaagctcttataaggttcttaccagcaaagcaaaggatacctggaaggcgtagtcagcgattgcagggatcaagaacctgtgatgtccagaagtaatatgtggagctcggaaggccaaatatatgtatatgagtggtacacaatccaatgacagatagtaatgctgaataaaaatcccaagttacttgcccttagttgctagtctactcgtgtcctagacagtagtggtaacaattatagctcaagaaaaaaacactagtaagcagcaaaggacttgcaggcaagcttcggtgagtttcagcaaaaactacaaaaccgaactagcagataagcttaacggagcgcgtcgtgagctcaatgcactagtggaaatcaacttttctttttttttcttttatttttttgatatatttttctttttctagaacacgaaaataggcacacctccaagttacagctcaatcggagtaggtatctggcctatggatttttctgaaaccactataaataaggtgcaggaacttgtgagctcgaacagacaattttgcaaaccaaatttcagaattttggatttgccaaagccgccgaaggtggggagaaacggatgtaaaatttttttctcttatccgaaaagttaaattttgctctgatgccacttgatatgcactagggttcccgatcttccgaaaagttctgataaacaacgatttggacagagtcgcgacacaaatcgatccggcttcttgaacacgcacgctcttgagccccgcaatcgcagcaccacgtctcatctggttatcatccgtgtcgaaacgcggatgacctcgccgaaaaggctaatccctgtttgccaatcgaagagcacaaacaagaacgagatagaaaaacaaccaaaattgcagttgaatgattaagctcacgagttgcggtcttacaaaccgatctagcggcgaaactgttctcgacagattaatctaagcaaaacccaaaaacctaaagatggcggcgggtactcatatatagagtttagggtcgtgcaaacccctctcgacgcaaccctaatgggttccaacacgatacacgggccaaaggcccaaatactgtgacgcagcacctggacagattctggacgtcaaattgtttggtcaattcccgttgattcggaaagaatttgtatgtgggaccaaaaccattggaaaggttatcttcttagctttccatcgatataaagaacatcccaatccaagcacgtatgcgacctggacgcccgttttagtgcagactggtcctggactccgaattgcacctgacgtcgacttggtttgggcctccaccttaacttggacgtccccgatgatactctatggctgtaagtccttctccaagtgtctccttgtcccctccattgttcctaatcacaatataatcattaggtagcaatctattctcgaattcatacaaagaagaacataggaacgagctcacctctaaatttaattgtcgcgcacgagctcttgttatcggtccttgaatgaccgttggaggattgttgtgtgtatccgaggtagtgatgtccgcatcacctccgccggatccagcgggaggcggctgcggttcggcagcggcggcggcaccctccccttccggtttggtttttttatttgtgttcttgtagtagtgttttgtctaggatttggataaaatttgtgtgtatatgtttcagttttccctctcctattcaatttgtatgatggaattccggatgggattttggttgtgtgtatatgtttcagttttccctgtccgattcaatttgtatgatggaattccggatgggattttgagggcggacgatggggggggggggcacggacgaggtgacgattggaaaaatacaaatcttttaattagttaagattagatataaaaggtacattttgtttcttttctgcatgcacctaacaaagtgtacccataaaaatttgctaactgttcgatgctctcatctaactatcgatgttgcgagttagattaacacaaggattagtgcttgaatcagcacttggattaactcggacaagggactgatccgggtcgggctcaatagtttcgagcgccataggcgaactcggcgctataggcccttaaagctaaattacttttgcttgtaatatactccctccatccctaatgtttgacgccgccgttgacttttttaaacatgtttgaccgttcgtcttattaaaaaaattaagtaattattattatttttctatcatttgattcattgttaaatatatttttatgtatacatatagttttacacatttcacaaaaatttttgaataagacgaatggtcaaacatgtttaaaaaagtcaacggcgtcaaacctttaggaaaggaagggagaaggctacggcttggacgtccgagaaaactcaaaagatcagacgccctacctgctgtaattctgagcagatagcaaaccatgcgctatgcaccatctctttcctactgtatacatgtacactctttagcaatttttgaaatgatttttctcctaacctatctatccgatctatgatctaattatatcattgtattcattgtaattaaatctttataacaagatctcacatgagtatattacgttgaaaaaaacatattgaacatttttatactataaatgaaataattgagttataagtactgaaacaacatacctatttactgaaacatcaaaagaacactattgcaacatttgcaaataaactagtgaaacatttgaaaaaacttattgaagcacctagataataggatgtgcagcatttaataatccatttcaacataaaactttaaatgtgcaacaaagtcgaattaaaaattgagacatttgtttctcacgcgtgaaacattcgattttaacggttgaaacatttgtatttttttatcgaaatatagtcatatggtcttgttaagaagatttaattgttatgaatacaatggtataatcagattacggaccggataaatagtttaagagaaaaggaaattttaatgtttcaaatggttattggttgttggctttggatgaaaaaataactattctattgtgtgagtcctttacacatacgtaacaaaaaaaaagtttgctgatgtatgcttctattgagtactactccatttctacttagttaaatgtgaggatcccgtccgatatattcttccgggtcggacatctgaaataaagcatttccggaaaggagagagtatattttataaagcacatgtcctataaagtgacacaaataaatatttttaacattataaatacaaatcaagcagttgcaaattgtaatataaagcagttgcaaattgtagtatagtaatttattactgataaataatatcaacattataattgagaataaaagaaacaccgtagaacaaagtagtacgaatgaggtgcacaaattttcttagaaccaatgaaaggaagtagcatgaactttttctcttttcttttctgagcaccgaacaaatgcatttttttgtgtaccttgtaagtttgtaacacctaaaataataaaattgcgaagtaaactaaagagcaagaacaaagaaaatcatgcaaataagaaaaatccttaattcgtaacctaattttcttagaaccaataaagaaaagaaataagaaggctaactgttgtgtcgtgccgctggctgtgcatatgctccactgctggttgctttgctttgctatgagatgggatcagtcgatcgccaggcggcaggcctcgtcggcgtcgacgtcgcgtcgcggtcagggagcggagccgagaggagaaaacggcgcagcagcagatagaagacgaagcgacgcgttgtgccatggattgaatcaccgcatcaccttctggcctcagtatatctgtcgtttggttcaagtaaaccctcagtatatctgtacgtctgcagaggattctcgaaggaactcccattaatttagactggatgcttttcaataaagttttaatcataaaaggttgtgtaaattcaaactaagaagtaacctagcatgattattttactttggtaaaacatgaaaactacttcgggtaactaaaaagtaaatttggttgagaagcatgggttgtgcaaacccaacagatttgctccgtagctgcacaagccatggcggatagggcactgagacttggtgtgttggtggtggtcatcacgtacgcggaccaactgcgagagattctcgtcttgtttcatctcgggaacatggcatggatgtggtaagaagtgagctgctgctgaatgcagtgtcgagagctctgatatcgctagttcagaatgattgcatggcaacttctctcttccccatgcctcttattccgagtagaactttatatgcaactcatatgatatgtttgtgcacaacaccaagagctagcatggaacaagattggctagctagtcgagaatgtatatataatctctgcagctaaaccgaccggatgatagcgatttataataaccagctaataacaaagtgaacattcacagggttcacctgatagtgtctgttttattagataatatacctgatagtgtctgtatgtataatatatctacgtgaaatcgttgtgaatggcacttgtgctcacttcagaccaatctgccagtatatataaacacacgatttctaggccactattaaaaaagatttttctatacgagggctccaatatataggttgtagacggaccgtaactaatcgcgtctgcaaaaatcgccttccattttcgcatgcggctccttaaggctgcctgcacggaagaggggggggggggttggggtttctggagagagaaggcacatggtggctaggaggagatgggaggcgcggcagagtggcgacagtcgcagaccacctaggctttttgtggcagcgagctcggcgagcagcggcagggattgcgcggacggatcgaagcgccacggcgggtgtcggtgagggatggagaggatgcacgacatggcaatggatggatggatgcgtgtggcggcggaaagagggcgtcggttttgagaatttgtggcggctgcggtgatttgggcgtgagggcggaggcagggagcgcggcggggatgtgcgatggattgaacacgatagagatgccagataccgccttatccgtgatttcaccgcatgatgaaatcgtgcggtagagatgggtggacggtagtacagattataccatatttgcaaatagtcggtagggattcaataagatgatttgacctataggattggatgggtgcaactccgtctttttatcttagtatagatatatatgtctttctctctacaatcattatgcttttatttatcttctaattaacaagtgtatgtgtatgtggtatgcttttttttcttttttgataaaacgacggcaggagctctgccggaatttcattagaggatagaaaaagttcaggaggtacagggggacacaaagaggagcaaaaggagaacagggaaaaaaacagactcatagatcaaagaacattagaacattgtaaaaactaattaagggggttgaaaggctgagcgtcgaaggtctaggtcctcctttacaatcctcacgatgaaatcctcagaggatgagatgttttggaaaatccttctgtttctttccgtccagaagttccaccaagtggtgagaagagttcctttaactttagattgtaaggatttggggtgtagctgatctaggtcgatccaccaagctgcaatgtcatctggaggttgggttccttggatattttgccattgacatatcgagctccaaactttcctgaagaaagaacacccattgaaaagatggttggtgtcttcaaaggcgatctccacacaaactgcaaatccaattgcaaggccaatggcggcgcaggaggttgcggcgcaggaggttttgagccgtgagagttttctgaagaaggattagccacccgaaaaaacgcatctttagttcagctggactcctccaaaccgaactgaaatcaatcggggagaaagagccttggaacttgaaaagattggcgctttttgatgagtaggaacccgattcattcagattccactttatgtcatcagtggtatgttgctgaagctgaacgttttgaagcatacctccaagctgaacgacttcattgatttcctctatcgacgttatattccggaaagagagaagccaagaattatttgtaagctccgttttgaccgatctctgcttgcgcttagctaggttgaaacacatgggtgcaatatcttttggacatgaactttgcagccacttgtcctgccaaaaagctgttttttcaccgttgccaagagagattgttgtggcagcttgaaaaagtctcatgtcacagttatcacagggtatgtccattccaatccatggcttattttcctctttccatttgaaccataaccatcgaagtcgcagagcgcgagggaatttctccaactccagtatcccaaggccgcctaaaaatttcggtttgcaaactgtactccaatttactaagctactccctgggtttgttttgctaggatcctcacctttccataaaaatgacctatggaaacgatctattctcttgattacccatttgggggcttgaagggcagatagatgaaaggtcggcattgcacttaaaactgattgcaccaggattctcctaccttcagatgtgaagtatcgacctttccaacctgggagacgcgatccaatcttttcaatgagcggtaagaagtccactttcctgagttttcgaaaatgcaaacgtaaaccaaaatagcggcaaggaaagttttttgaagttcctgggaactaagagatgacctgagccaagaccatgttatcacatcgaatggggtaaatttctgtcttattgagatttgtatggaggcctgatgctttggcaaagatgttgagaactaatttgacagtgtcaatctcttgaggactgggtttgacgaacaaagcgacatcatcagcgtagagcgagcatcgaaacatgctaaaacgccctccaattggagtgagctacgaggcctcttccgttgcttggaaaagtttatgaaggggctcgatagcaaggataaaaagcaaaggagataggggatctccttgccggagtctgatgaggacataactagctcggatataaccatgactaccttatgtattaatcaaataaaggtgcatatgttctacattagatttacttgttatatatttgaacaaacgttgctacacaatgagttttgtgtgttttcgtttgcagagatacttgcttgggcgaaggaaaagaaaccgagcataactaatgcatggatgattaaagaagttgattggggaccaaactaagaccttctccaagtctacttctacctcaccacgtcacttttggaccatagaagacaagacataaagttgtacacgttttggattcggattcgggcctcctgacagcatcaacttcaaacggacctagccgctgatatagaaggaatttcggggcccatgagtacttgttggaaagcttatggagtctactttcagatggttttggtcccatgtcaaaattcctgccgagctgccgggaatctgcaaaacaagccatgtatctcatccagtccgaatctgacttgggttttgggccttataattgtgttgtgggcttagcccaagggggtgtgcgccctagggcaaccctaggacgtccctaatcacatttattcagtagccgtcatcgtttagagtcgggttttgcttagattaatctgtcaagaacagtttcgccgctagatcagtttgtggaaccccaaattcgtgtgcttaatcattcatatgcaatttggctgcaatctatcttgttcttgcttgtgttcttcgattcacatgcagggattagccttctcagcgaggtcaaccgggtttcagcacggttgataaccagaggatacgtggtgctgcgattgcggggctcaagagcgtacgtgttcaagaagccggatcaatttgtgtcgctactccgcccaaatcgaatgtttatcaatacatatcggaagatcgggacctaactccctcatcagagtcctcgtgcgtgcggtaatgaagcacctggggatccatttagaagaatttgggaagaggaggttgcaaggaggtttgatacccagtttctccatctagtaccaaaaccatacctctggaggacttctaacaggtaaggccaacccactgtatcgaacgcttttgtgatgtgcacctttaggaaaagcgcttctttgtgatttctatgcagaatatgcactaaattctgcacgaagaggaaattgtcgtgaattgcccttttcctgacgaaagcactttggttttgagagactaattcatttagtcggggagcaagcctatttgcaagcaatttagtccagccgctccttcttttttttgggaggaggcagatgtaagctgtgttcaactttttaagttgatttgtatttagggccatgaacgattttgcagctagcagcagatcttctttgattatttcccaagcatgtttgaaaaaagctccaatgtaaccatccggtcctggggccttttctgacggcacggagaacacaggatgtttgagttcctcttctgtaatatcatcctcttgatcatctaggtcgaaagaagggaaatttagggtagcccaattgagacaggattgcctttgtgatggagtgccaagtctgtctgagaagaaacgaaaaagagtgtcagccttttcctgagccgaaactgctatgccattttgagtctggagagtttgaatgaaattctttcgccttcgggagttttctttgatatggaaaaattttgaattaacatcgccttcctttagccatgttagtcttgatcgttgacgaatttgaatcttgtttaggacagccaaacctaggattctagcttttaggttgctgcgaagaacacattcatcatccgataagggccttgtttcctgtgcaacatccagttgaaaaacaacctcatttgccactgctaactgaagcttgatgtctccaacattttgccgattccatctcttgaggtctcgagctagccgttttagtttgatgtacaggatggcaagcggatttgcagctaggagagggcggttccaagaatcttcaacaacttctaaaaaccctggaatttttaaccagaaagcttcaaatctggaatttgggggtttacccctcatttcatttcctattaaaaagagtgccgcatgatccgaggtcgacgaagagagaggttgcaaagaggcgtttgaaaacatgatatcccagtcaggtatgacaaaggcacggtcaatttttgtttgagttgggttttggcccgctcctgcccaggtgaagcgccggcctgggagatgaagttcttttacctcaatcttgtcaattagccctttgaaacgctgcatcattctcctatttaggcgatcattatttttgtcagaaactttataaattagattgaagtctccaattagaagccaagccggcttcataaacgaggacatggcttcaatttctgctaggaaggctattttgtcagcttccaattgagggctgtataccaccgttattgaccattggaggccctcctcaaacattgtgattgttgctgacagagaaaattgtccctgtacagcttctgacaaagaaaaaaggtttgcattgcaggcaagaataatcccacctctagttccactggccggcaggaaagcataagattggacaaagttttgacctaggatacttaagatgtttctgtcagtaactgttgctaatttggtttcttgcaaacacacaatagaagcaccaactttatgaacaaaggctttaactacatcttgtttggcctgggcatttagccctctcacattccagttgaacaggtgtacattgtgttgagacataatgaaaacaagaagacaactagcattgacattatgggcagcgcgcagtgtacaaaccacaccgaaacacaaccagccatgctgggagaaacacaggtgcgacaattgtacacaactgtggcagctactgccaccaaaagaacttgacagccaaacaactggaactgctgaagtggaggacgaccgctggtacttgtggtcattgctgcgaggtgatacatagccacactcatcacctcatcatgtcttcttggaggaggggacatcacattggcaccaccgccgccttcttcttggcagtcttcaggtgaatgccttcgcatccacccttctcgaccaaggttgtgataatcttcatcgaggcaggggatataggcttcttgaaatgctgcacataaagtttttcgatgttttcatcaaaacgagtttgatcgtttaaaaagccaaagttttttgcaagaatttcttgtgcgaaatgttcaatcttggtcccgaatctgcgcttgcgtgctaggcgttcactatgcctttgaggggagtgaagggtcaccttattgcggcaagggcgacgggagctcacatcaggagtaggaaggatcgccggctggatgggagttgagaggcttgccgcgaactcctggaggttcttggcagcgcctaggaccccgtcagcagcgccagaacccagctgggtactggaagggatgaagacgggggaggcgatccttggcgatgaggtgtctggtgagtacagagaatgctggattgtggcctcatggagcatggggtcaagatgcttctccagcaactccagcacagcgacctgtccctgcgaaaaaatcaccggttcaggctgtacaaccaaggatgaggatggagaaaaaagagtggccaaggcatttgccccctcatcagggctgccgctgcggcgtggaattgcgctcttgcaaggcgaagggacttgtggagacgactgaatgcggggggatcttgtacctcttctagacagccgggggcggtcgtactgcacttggcgagcgagaacggtaggagcagctgctgccagcggagggcgctcgaacatgctggcgtccgcacgtgtcttggttgtaaacttgttgatctcttccacagacacggctacgactttacgaccgtccacagacacggctccaaagggaacggctcctacgctacccctgggagcgctgctctctgtcttcgtcttcatcatctggacctcttttgggatcaggctcccttctacaaggaaggggaaactcccgaaaacggacaccatcagtctctgcgccgtactgccagtcgtacgcgcgggccaccttgctgtgaaggtcttctagggtgtcgatgtgaacgaggatgtcgtaggtccacccttcctttggctcgtcaggcggagggttgtggtgaggttcaaggtctagaagagaaatgtctgtggggagcccttcttcatcagcattagtgatagagaaagtggaggaacgcgggatgaactttggtgcgtcagtccaaatccaaatgtcgaaggtgcggttgtagttctggcggcgagagtactcttcgacatagttgatggagcactttcttccaatgatcttggctgccgtttcttctgttcgagcatgcattgggatcccctcaatgcacactcttgctctgtatctgaagcgcgccggaacgccgtgaaggccttcctcccacgggcagaagagataaaccctccccgacttggtggcaagccggggctgcctcaggatggcatctctatcattctggctggaacaggtgatgaagaagtcttcggggtggaacttcgtaatttgaatgtctgagcgtctgatgcggaaggccgaatgaacatcatctgcaaacacattgggatccacattggagccctgatggccaacctgccaggcaacaatagagcgagcagagaatttctgcctcagtcgctcaatctcccccgtggccgaaataaccacaggctcttgagagggacgagcagagaggtcatccatggaggaaggggaggaaagagcagatcgcgggagcaacttaggggggaaacgaattggggcgagaggagggaaagattcaacggaggtttgggggagcggctgcgaggtagctgtggatttaaaggattttctctttaggcacgaggaagcacaatgaccaatgcccatacagaaccagcagcgaaggggctctctgcattcaataactcgatgatctgaccgaagacaacgaaagcatttaccttccatatgcttgaggaacctcgctcggcttaactgcaattgaaattggttggtgctatcgggagagtgagcagggctcctcctccatcgatttgctttgacttcttgccactctgaaccagagacatcaaggctacctctcggatgctgcactgcagaaaggatttgagctggcatctgaaccttgcgtccactcttgaggatacgaagatctttgggagctgctccttgggaacccacatctggatccgtcaggttgactgggttaaggcgctcagtgacggaagagcagggttgcgctgcagggaagttaaggcggccggcgagggaccggattttgggcggagacagctcctgttgggacttggaactagcagctaggggtatgggagcaggagcggccaggacctcagagtaaaggcggagtgctccaagcggcgctgtggctggcagatcttggagcgtggaggatttgctgggatcttgaggacgcagtgtgacgaaccttgagtccaatcgaggggaaagacaaatcgaagctgcagtagaggaatcaatgccggagatttgaatggtttctggtggatctgggtgggtggagaaaggggattttggcgagggggtttgggctgagagaggagggttgtggcggggaaccgggatggggaaggtttcgagggttggggatgctagcgaggcttggaagacgccgacgagatgctccggcgaggagcgaaatcgcctatggcgggggtgggtgtcggggctgagggaaggggacggagccatggggtttggtctaaaatgaaaaccatgtggtatgctttggatattcgtgtttacgctacattccaatattagttgtgtcacgtccttatggtcttgcttcatgcatatcagataaatttatgcaccaaagcaagtgttttataagttcaagcactatattgcagttaaatggcaagtccatgtaatgctaatgcaatttactccctaagtaaatatacattaagagttagctagttaaaaaacatcaattagtagttctagtcgtgtatgcagtactgtagtgtctacatgctcttttcccatcactagtttgctttgtctttggattgtggtttgagttgggttctccgaaaaagcgcagtggactgatagctggtttccccagcaaaaactatgcatgcaacatattgctttccataaaaaagcagggctgccctggcatttttaagtacagccatccatggcacacacctgattgtcccttgacaagagaggattctcataggaacttaattgatagcaagtggatatgtttatttcctaataatatatgaagtatattcttatacaaatatgaaacttttaatgaagaaagattgtacaaattaatcaaactaagaaatatcctatagctacatttactaattcacaatccacgaaaacttcgagtaattcaattatttgttattatttgcactacatgtttgctttcactgttttaaaaaaataggtgatcattcacccttctgattgactccatcttaattttatagcctctctttcagtctcttatgctttcgcagccttgccaacaatttccctaccggacaacatcagggaaccctggtcatcttggataatcaccccgaatgtaaatgcactttgtaactgcaggtaataccacgagagattaaagtgagtagttctcagcttattccattctactctcttcgtcccacaaaaaaccaatctaggattggatgggacattttccactacaacgaatctggacaggagcgtgtccagattcgttggactagggaatgtctcatccaatactagattagttttttatgggacgaaaagagtagattggaacatggcatccatagcagacaaaccgctggattccaaaaaatcaatgtaacaaaatagagaaaagaaatcacaggaaatggttgcactgtgggagtttaatcagtctcatgtgggcaatttggaagagacatagaaacagagattgctaattaagaatgatcttctatcaaaccaagctgatctaattcattacatttgttcttggatttcttcatggtcaatattgcagagctcacaggaaaaaaaaaagagaacagaatccaccactggaagtatggcttgaagaggagatggagaagtttgcagggaggaagagaatgaaatatacgctgtattttgctccaatttgttggccctgctacgtactggtggttctacctggatggtgattctggcatctaatggctaggtgcagcgttgttgctggggacttgaaattgaacaacaaagagaaccttgcaggtaggttaagcagtacaggattccagagggaaaacttcacacgaacttctttcttcctgatgtcactcattctgaacaagtttacgcaagtgatcttggggaatctcaaaagcatgactaaaagattaattggcttgttaagaaataatatagcggtaatatatctagctagaaagctatgcatagtaatttttttattgatatacatatgttagatgagaaagacgaggtggaataacgagagaataggtgtctcatgtgttcaacttataatagttgaatgcatgatcgaacaggtgtataattaatacggccgaaatgagtagagtgctgcaaggattgcagcatacaaatgtgtgcatttatgtgcaacaattttcatttggagctgaatttcttgaaactcttgcgcggcactcgggactcgggaggtaagcatgtttttgagaaaaaaaaaacaggtcgaatgaaaatgtggtctttcttattatcatagaaaagaatactagctcttcaataccccctcatggaaagtactgttagatagtcccgtgatttctcttgataaactaatgtgcataaaagatgaaaaatatattaatagtagtatttttggcatggcaaatctaccaacaccattttcacaaatcgctctaatcatttgagctacggctgataagcaaaaaaataaatgaacgaaaagaaaattattggtaaagcttttattctgtatttttgaggtttataaacgccatggtacgtagaaaaacgactacataaaaaaacctgctaaaatcaacacagaaatgatgtttctaagtttattttttttgctacggatgacaagctaacaaatacagtacttggtctatattttctaggcttacatgttcttcttaaggcactagaagcagtccatctattcgtccgaaacaatcaagtattacatgtgtatctcggcattcgagcttctgaatatatgatgagacatatattgcatttttctggttttggatatgtatcacggcatgctggcttgaggaggctgtcgtgtgattctccagagaaactagcattgacatgctccctgattccactcattcctagcaagttaacaattcaaaatagggaggaaaagcagatgcatgttagaacagacaaaagattatatgaggaaaaatgaggggtgggatatttaattacagagcatcagtagtatagggtacacaaaagtagtatggtacttgacccaatctaagctaaagagccctgataggaaattatttcggtcacaaattaaattatttttggatcaagtaatttttcttcagattgaaccaaaatatgttcaaatttcaacgttttgattaccacgatatagaacttgcctcttgtagtaatatcattagaataggattatatggaaaagggtttactaaggtcaatggttcagtgtattgatatccatggtgagttacatgaagtaaatccattgtgacccaaaattaaattaaatatccattgtgagtaacttaaagtaaaaaaaaaaaacatgcaggacatcccaatatcattgtttgcagaggattctccaaggaactccatatgttcaaatttagcctggatgcgtgtcaagataattttaatcataaaaggttgtgtgaattcaaactaagaattaaccaggcatgattattcacttactttcacaatacatgaaaactactccgagtaactaaaaaaaaagaaaaatggtcgaaaaacatgggtttgggcaaacccagtatatttcctctgttttctgccaaagccagaaatgaacatatgacaactgaacttgagatggatgctactgatcgagacgggtggtggtcatcacgtacggttacactgatcagccagacacatttccgtcttgtttcatctcaggaacatggtatggatgtggtcaggagtgagctgcagaatgtaggtgctctgtgctccgtattttttttttcttttttgccgtgggaaaggaatttcatttctggacacatgacaaattacaatcgttcaggatatctggattagacctgacacaaaattaaaaacaaagccataccagaagccaaataaataaatcttgacttctagctgtcctaagctagttcatgactaatcccgatttggtcccgctgagtcttcactatcttcacggtctggattctcctttcgcctgaacgaagcaactttgcttatttgataagacagggaagctctgagccatccacgtctatctcattaatcaggtgcctaatagcagccaggggcgacgctagagtcacttatcggggtcagtagaccccgacgattttttgcaaacatcttgtaccagcactaatttaccagctacgaccccagtcaaggaaactactagaccccggtggtccggtgatattgttctggtcaagctcaattagcaactaaacaatactaacaagtagtaaatagaaaattagctagcacttattatacaacagcccaatatacgtatgagatttgagcccagaaggctttgtattcctgctaaacaagtccacaaattgccttgttgtgctgctctgtattcctgctgcagtgcagtctggctcgaagcgcttcgcccaatcttcgccgattggcaagggtaacccactaaccccatcacaatttcttaattattatcatcacaaattggttgtaggctggtttctcaagtccaaaattttaggaaggtagggttctgaaatatgaaatttctccaaatttctgttacataaacataaatttattctttctagaaaagtggaaggtaagaaattagtgattttgatcatctacagcagcgtgggtattttgttttacatattaatcattccattttttaataaattaataggcaagcaaagtataatggagtgtgattcttgagaagaaaaatacccacttactagttcatgtggtactaattctcctttatcattggagataaccttctcggtaataaaagttgtgtagacaatactgcacgcaatcgtatcggtaataaatatatggattactccttgcgttttaaaatatactacagttccaaatgatgacgacgtggttgttcgttttcacaagatgaaggatcgtaactgtacacatgagaagtttgtaacatgtaaaacataaccactttactaaaaaaactttattttatcatattatatggtcgatagttttgttctaggattatcttaagattattataagctatagtcagttagtggtggccccgataactatttttcctggcttcgcccctgatagcagcacattctgtgatcggatttggctggtgcagaatgaagatttggcaatgtctctcttccccatgccactcattccgagtagaacttcgtattcaagtgatataatgttggtggaaaacgccaagagctagcaaatcaagaatgtatatatataatctgcagctaatcctaccggtcaagaagaactgaacattcatatattcacccgagggagtctgtatgtatatatctaggtgaaatcgtcatgaatggcgcttctcttcacttcagaccaatcttccagtatatatacacacagacgattgcttggtgtattataattacacaagaacccatacacatataagaaaacacaaataaacttttatctgtaatagcactgctcagacagattgtacaaatttgtaggtgagaaatatgaaagtcaatagttaagaggcacctaacccaactaacaggcaaaaagtcaggtgaatattacatggcccagcagctatatatgtgagagcgcgatagacttatggggggtggtggcagagaggttcgggtaacacttacagccaaaaactcgaaggtgtgtatagaatgggtgagttccatagagggcaaaaaacggggtgtggtgatgaaggattttggtgggaataccggttattgaaatgcgtgccagggtggagggcctcaaccaaaatgaagggagtagggtggcatgaaacaacaaagagcgaacttcgttgttgagagaacatagcgtgcgctcggccttagcattctgaggggaggtgtgagggcacgacattcgtagagagacgccgttggtgatcggaaaaaggtgcgaccgttggatttgtcaaactcacgaccgttgtcacactgaatgctccgaatgctagctgcaaatagagtcttcacaaaggcaaaaaaaccgtgataaattggcaaaggtgtcgggtttaaaacaaagcggaaaggtccatacataatgtgagaaatcatctaaaatgaccaaatagtatttaaaaccagacacactaggtataggggatgtccacaaatcacaatgaagaagctcaaagctggtcgtagccctagtaaaactgctagtaaaaggaagatgagtgtgactcctaagttggcaagcatgacataatgggtagcactcttcggaggaggaatgacggacgcctgagctaagcgagagagagcttcatgaccaagatgtccaagtcggtgatgccagaggttggtgtcgatggtggaagcaacaaaaggctggacggaggtggttgagggtagagagtccgccaatagggggtacaggtcactggaactattgcacctagcgatctcgatcctggtttggtaatccttcacagagaggcaaaaagattcaaggcaaatagaacaccaattatcacgagcaaaccggcgtgcatatattatgtcttcaataatggaaagagacaagagaatatcgttaagaacaaaggagcgatgcgagtaatgcaagtaagttgtgccagcggaggtaatgggaataagtgatccgttgccagcaacaatgtgtgaaggaaaattgggggcggggcggggggggagcatgagacgcactaaggataccggtattagaagtcatgtgggaagatgcacctgaatccatgtaccactcgttggttgtcaggggcatcaacgtggaggtgctgaaggagctcgcgagtgcctgcgggtcccactgggaggggccagcccaagcatgtggagatggcgtagccgtcggggagggagcggcgctagcccggcgtgctgaggagctccatgggccgcggtgttggcgacatagacaggcggcccaacgactcccgcgaaaggaggccggccgaatatgcctggaccgtgggcctggcctggccacatttgtgttgtgccgacccacgggttgtagggcgtcggccactgatgggcaaacacgaggggggtggactggtccggctaggtgacgtgctgtctgccgccacctctgctattgccgccgttgccaccgccgcgtttgcgacgacgattgtgggagttgccaccggagccgccgccgccttgggagttgttgccggtgcgggcgctggtggtggtgttgcctgaggttgcagtggccacaacaaaggcagtggtagaatcggtggccggccggtgtccctttgtgatctcctccaacaacagctgcgacctggcttggatgaagctagggaagggatgctgcataggaagaagaaattgcatgaccatatttagtgctaaggccattgatgagcatgcggtcggactgcggttcgccgaggtcagcgaggttgtccgccatagtattgagccgacgacaatactcgaaaatggagatatcgccttgcgtgaatccatggaactcggtggagaggttgatggcacgaagctcacaattttcaagaatttggaactccaaatcatgccaaatggagcgggtggtggcagtgggcgacatcacctcctgaagcaggtcgtgggagatggtgcgccagccgaggacgacacagtccatctgtgcccaatcggcatgattaggaagaggagcgtcatacaagacgtggtccgtcaaggcatatttgccaagaaccacgaggaagagaccgcggcagcgtgcatagttaccggtggcgaggtccaatgtcacggggatgagggccttgacattgagcatggcaaccgcttgagcgtggagggcggcatgggtgtcggcatccagaggaggtgccgaagccggggcgcggcgccagaaggtgggggtgcggcgggtgcaccagacgcgccggaggccgggatggcgagctaggcaaaaagcgccagtagttttggtggcaaggcaccgcagggcgtggtcgggagcggcggtgtggaccacgacgacgagtggatctcctcggcaggagaagcagaggctggccgcgggaggtgcttaacgagggcatcgcagacggcgaaggatgccttagtggccactgattcggcaactgactgcgtcgaggagtcgtcgatctgaagacccagcgacggttgatagttggcacgcacagcatcggcgacgatgttcgcgatggtagtgatgaggtcgtagtgcgaggaagaagacgacgtcgacatggcgacgaggcgctgcgcacagagaggagagggtttagggtagagagcggaagcggtagaacaaggaatttgataccatgagagtgcgatagactcgcaattgattggattgatatcggtgcggagtacatataggcgcgaggctttcgttatccacttaactggattatagaaacaaaacatgtacaagataatatttttctaacaatatgtaccctatgacccagcaacatgactcggagttcatctggtagcgtgctattcatcacggtaagaaagcaatgtatgatatagctagttactccgtgggaattggtatattttcctaaaaaaaaggtgatcaaatcaaatcagcatcggtcaaaccattttgtgatatctcactttcatacatgctcgttggtgtttgggacatataactgttttggaatcaatgccgtttgcccttaatctgtttttctatgatatatgttttatgtctgcaggacactatccccactactggggaaagcctctttgctaatggtttgcaacccttttagtcccgggttgcaaaccaggaccccgaatccggaattaaagataaatatctttagttccggttgaaataatcaggactaaagatacactaaagtttttttttctttagttgttatcaaccgggactaaagacgctaccatctttagtccatctttagtctggacaaaagttttttttcttttttttagtattttttgcttgcttgcatgttgatttccccaaatcaaagattcacagataatatcacaggttcacatcacagatcaaatacatcataaattctcaaaaataaatatattacaaaccacatattcacataccatcatccattcatccaagaacacattaatcatcaacatcacccatgagatctcatccacgaacacaatcatgaaatcaaaatcacaaattatgtacacaatcgcctcatgaacaaaatcacaaatccatgagtagcaacatctgctccgccatcaccacgaccgcctgccccttcgcctcatcctcttcgccactcctcttgttccgagccgccgcggcccggatccagccggattcgcccgcggccgctgctggagatgccgccaccaaatccgctgcaggagggagcgagggggagaggagggggagaggaggagggggcgagcgttgccggtgagggaggcggggggagaggatgagggggcggagggagccgccaccggcgacggaggcgaagggagcagagggagaggagggggctagggaggcgagaggggagaggaggagggggcaaagggagctgcctacgagggtgaggagatatggcggagggaggggacgggcgagagcgagagagagggagggagtttcacgtgtgcgcctgaggagataaggactagggaggggtaacatgcggctgcatttttcttttcaatctttcgtcctggttggtataaacaaaccgggactaaagtgttaatctttagtcttggttgctagcaccaaccaggactaaagataatgggccctgacacggcctgacgactttttaaaccggtactaaaaatgatccttagtcctagttcctatttgaaagtttttgcaccacctagcaaagattagttttccagtagtgtcctgtcaaaagttcactagatagaacctccctgatgttatgtgaaccttttcgttggtttttcaaaagccttataccatgatattctgataaatgaaatgagcaaaggaccatgagccacacgttgaaacttgaagttgaacagttcataaggataaaaaagcaagtgtaatacatatttacgcacaggaacacttcgtaatattaaaagagtacctagtgttaaaataacacagtacaaaatgtaaattcaacatatataaatggtattagtcacttctcaggtacatatattcaggtaaaatatatgtacctgataaattcaacatatataaatggtattagtcactcgtatttaatattcggattttacagttaatatatacccgccaaggataaaaattattaaagagagtaccagacaagaggtagttgtgtggttctatttgacattcagtgtattattcgagaattggtttggaaagccttgctagtaatgcactcaaatcgacattgagattgggacatagccacccaacgattagaccgaccgagggattggaagatctggaactttcctttggccaactacaagcagttgatcaatttcaccatttctttcattcccttttctttttttcttgagtttatgcacgagttgatgccattgctttatttaaaatcagaagcaccaatcatgcatgtaggtatactgttagagtggtggactagcagagatttattaggcatggctcgtatgtatttctcctaaattataagatcttgtccggttagtcaaacaaggcctaagatggaaaaatcaccaacttctatatggaagtgttcagagacgagaacactaatcggagccatcctttcgctcattcgcggaataagcgaaacgacatatttataaacgaaaagcaatttgtgaataaaacttttatatacatgttcttagcgatctaaaaacaaaaacataagcatttaagattgaaatttaagattgaaaatttaagattgaaaatttaaattttagctaataagcataagcagcgaaaagatgagccccatagcactgactgcgtcgacgtttcccatgcgcatggctcgttggccaagaattgcttgtggaatttgtgctgccaaaaacaaaagatgacaatgtcatcttgtggggagaaaaacttgaggaaattacgtgccgaaagcgttcctggtgcttcgcattcccatcaaaatagctcgtaaaatggaattttgtgtttgttttttattaattgggctataaactctatggctgaatagaaatgatatggtttttgacaaatcaccatcaaagtcttatgtggagatatttttcagggcaacgcattggcaccagccatgttgggctccactagtccactacaatggtgtaatgacaatataaagctaataaatgatggatgccgtaaggttaagtcaatggtcatgcagattttctccaattttgggtggagattcacaaataggattcaacggttgtgggatacaaaatcataaaaaatatgatgtgaatgatttacaatggggataattttattttaatatttgaggtttaaagttctttttaattcccgttgcaacgcacaagcattcagctattcaaataaaatcaatagagatcaaccactgcacagttatgcgtgttttcttattataaacatttctattaatctttcaatatatagaacctagacatgagggatggatttcgttgcgcttaaaaaaataaaaaatctgtcaaattataccacttcttgcacaccgcagagcaattctctggcttctatggctagagttagactctctgtttggattgattattgggacagtgaaattgaccatttgattgtactccaaacctaacttattgtttactttaagagaaagaacggcgttttatccttttccatgtcatcactcaggagaccacatgatgtgatcgcagcatgttagataggatgactggatgagttggttactaaaagcaaatgcctcactaattaaagagtcatctttccactactatgctgccaacatgatttggtccataggcaggcatagtacgaatctttcaccttttgaaagtggggagagtcctggtgccttttgataatcagtatcaatggttggatcaaagatggacgtaggagattcatcttttcagagataaactttcagctttcgatctgatccatcggttccttaggtctagcggctgagatgatggagcagtggcaagttgctgaaccaatattggtaccattgcacatattagtaaggcgaagacttgaccacattgtagcatcatcctttttgggtccttagctcagaagcaaggatagctttccatgattccatcactcattaatagctaggtacaaggagaagatggcaaactagagggatcaggagtagcaccagatcacatagaaggtgaggttccatggggaacatcctcaagtgcttcatcagttgcttcgacggagaagacgaagatggtggtagtggccatggtcgcttccccaacagctatcctccggtctcaagtctccattaccagcctctgcatttggatgaccttcaagtgccattatcgcctccaccaccatcaactaggcagcagcagccgccaccgcgaccggcgctctcaagactccattaccagcctctacgtttggctgaccttcaagtgccattatcacctccaccaccatcaactaggcagcagcagctgccaccgcgaccggcacgtcctcttggttaccatcatggagtcctctggccgacgatagagatcaccccatgcgatgacttcctcaacttagaattcacaactaaggtaatttaattataactcgttataacataaatgtttatcaatatacactacggtttggcacctaagaactctgatacttcaaattttgagaaacctatagtaaaacaacctaacatgtggcccattacacatacaaattttcgctgtaccaactgaactaattaaccatgtgttgctaattacagggttgtcacccgatgactttggagtgcatagttttatttagcaagtcataaagtttgacacataaatttttatttataactaaaaattatattcctcaaaataaatagctatcgtagtattctaaaccaatatactagtggaattttcattttatttaattactattgaacgactaaaaggttttcatagtaatgcagtaaaagaagctttaaattgccacttttacctgtgcataaaaggaataaaacgattgtgttgaacctactggtgaagtcataggcagtgtttggcaaatgtctaatggaaattatttcccacccatctttaaatcctaaccattcattctcccctatccatttaatcctaacccttcattcatttcccaatcccaatcccacccctcatttcccattatccaaacacacccatacagtatacgtcacttcagccttttaaaagttttgccctttttattccatacctttgagaattttcttctccccctttgtgaaccttatcttcttattttttttcttttcttttgggatatatttggttagggtatccacaatgtgaccaaaaagtagtccttataactctatatgggtacctttaccattgtgagaggtggcattaggaatagccatatgataagctacccatagctataaagaccacctgtatagattaaaatatactatctctctccttttgcttctttcatgtgagagaactatagcatttggaagtactttttttagtgtgggtcccatcttaatgtcaattgctatctatacacattgtgaaaataggaataacaaaagaccatttatgtgggtcccacctatatggactagttgatccatatacattgttgatgccctggttgaagatggtacggaaggggctgtacttttttcttcttttcatattttcttcttttcataatttttcatacttttttcttctttgtactatgtgccggtacctatgtgtcggtaccttcatagaaggaagatatcggaagataatatcataaattatattaccttttggcaatcttttcaaatgcatattttcgcaagatagggtatttccagcccttaattactcagggaagaaattgtgaaaacaacatagctctttgtttgcatagtggtaaaacatgccccaaagatatgtgatatctatatgttcaacaaatatcaaatgcacatcccactgtcattaagatacatgttggacaataacagaggatacatgagtggtgagtatcagaccaattaatgttaaatttcagaacatatgaacaaagtgtatcaagaattgcctaaggccgtgtttttttgcttattcaccggactatttttttaatgtttcaaaaatacgtttttttctaaaaacatttttcttctatattatttataccaattatttaagctatatggtaaatttacttttaaaaatatttaatttatcactatcaagcacataatgcgcagcaataatccacttaatagaccaactcaatttgggcttaagtaattaacagatcatctagtaaaagaaattatgaggtacgacttttttatgttgttgaagatacttcattttaaatatgatactgttgatttttggacacagcgtttattaaaaaactattctctctgtttcatattataagtccttttaacttttttcaaagtcatttatagagaaacgtaacaatattttcgacacaaaataaacatactattataatataatcaatattagatttaatgaaactattttgatgttgtaaatgctactatatctatcaatttcatcaaacttagtgtagtttgacttagaaaaagtcaaaacggcttgtaatatgaaacaaaggcagaatgtaaatattgtagttactttatttaccattaaaggtattataacaataactttgcatatttgcactaaaattatgaataaggtggctgacatatccaaatgtaatcatcgtcatgtattgagaaatagagggagtaaaactttatccataacttcttattataactttttgttataaaagttagaactactatagcacacccagtacattatataccttatacaacagaccagaacaaagtgagagtgatatatttacttgatatgtgtattcatgtactgggtacgtaaattaatctgctagtagggcgtgtgatacgttataccatgcccactgcttgtgttttagaaggacctttatgaaaatttatataatctaatagatttatgatattatgaaagtatttttcatgacaaattatacattccaattttaatcttttcaaactatgtaatttattatttatttatagtaccttttttaaaaaattaaaaaaaagtcaaatgcaacattcttgaccagacagcgtatttgttctaacaaagggcatcgataagaaatcaatcccaaacacatatactcagtctccaatttgactgagttcaaccatttcttccatatcaagtataaagttgattgatctacccacacatacaaaagaattgccaaaaaaacacataaaattaggtatctgttcaactattcaatgacagcatgcacacaagcgcacatgccccgcgagttggttactttctcttgaattgcagtaagtttaaataatacaaacactaaattattgagtataaaatctctatcttggggcatttgtaacacaattctaggttttataatttggttgatggaagcccagtttcatttcaaaacaagattactttttgtctatgtgatatctttgcctatagtatttctatatagcatatacttatagaaaatattggcaggtttgtgaagggccccagcatcacagtacaccatccaggaagacggaccttaataggtaggcatcagatcctaacatctttttttgtttgattattttttcaaaagctgaaacattggtgacacatacatatatagtaatacgtatctgagttgttttctaattgtttgagaaacaagccatccaacaatatttgttttgtagatctaaggccctattctaacttcataaatatacatatttttcctcgttttccgttagcccgtttttcaaactgctaaataacatattatatgcgaaaactttctatacagaaattgctttaaaatattggataaatccattatcaagtttgtaataattattaaaacttaattaatcgcgcgttaatagttttctcattttgtgtaccgcttttaagtatatctcaccaagctacatagccgatgaggcagcctttcagtggtggttgttgcccctctcttttttttttgacgtgaaacagcaggaggagaggctcctactgcgctctatatatatatatatatatatatatatgacactcatatggggcaccatggtgcccgggcaccatggtatctaatgtacanaatcactcaaattttcaaaattttcaaattgggagtatatacctagttataataattcaattcatatctatacctatcaacaaaacaactcaaaattaactttatttcacaatccatgaatacctacctaactaattatatgtatggatgctatatatctagaatcaaaatctaacaaaaacaagttcaaattcagtacaaacatgctttgaactagttaggggagtagttaatgttaatacctaagtaattgaaaaagtttcatactcatttgaattgggtatatactcaatttcaacaatggtgcccgggcaccatggagcaccaaacaaatttactatatatatatatatatatatatatatatatatatatatatatatatatatatatatatatatatatatatatatatatatatatatatatatattaa

SEQ ID NO: 26769 - DNA, 8474 bp, Oryza sativa
cgatgtgacggaaaagtgggaagttggtgtgtgtagggaagtttgatgtgatggaaaagttggaagtttgaaaaattattttgaaactaaacatgacgcaaataaattgtagcaaaatccttaatcatccaggatattctttggattctatttaatgtaagttggcataatagttcaacaaatcgattctatcaccatggaaaaaaatgtgtgtttggttcacagggcattcttgcattttatggctttccaattcctacaatctccaaagaggcatcagaaaatcatccatcatcaataccaaagggtgtgctgttcgtgctaaaaacattgccggtcagatttcacatgatatatcaccagtattgagtaaaataatgattctcacaaatctaaacatttatatcaggttaatgcaaagtgcatagtagatggtgatggctttactgcttatgtcgacacactggatcctatagaactgcgtcaggattgcaatgcaagctgtcaatcccgtaactctaagaagcaaaaattgtgggacaaaacagcagctgatctacaaataagtctcgaaaatactggacaaaagtaagtaaactgaactttccttctcttcatgttgcttggaagtcaataatttcttgtgaaacagtacatgttattgatctgggcagaacaaatgcatttgtgtttcagtactatgaaatactcctatggtaaccaatcagcgccagaacaaatgcacatttggctttccatattctgatacatattcagttatgattaagtgggatttaaacttctcagggaaatgaagagagaatatcaaagaaaccaaataaaagtacattagaaatgtgtttatttaactagaaaaaaatacccgtgcgtggcaaaggggaagattattttattcttattattgttatacggtttagctataagataaaattcactgtagtaatttatttggatatatattttttaagaaaaccatgagctgcaattaggattccgacttttatctcaagttagtatttttttaaagagatttcttatacgactcattttgtttttccaaaagcaaatgaacatcaaatccgactcatacacagatctgtatttccaaaagcgagcgaacataaaaactgactcaaacacaaatgaggtaccaaaataccggaaaaacatctttaatttttataatagtagagatttattattttttgaaaaaatacaacagcagaggcttctactgtgatgtatatagaagggcaaagagtttctttaagttttatagaagaacatagtatttcaagaagagactaggaaattatgtagaatatgctaagattgcatatagcttaacattataatattaacttaactaaaaatggtccctacaaagaaaaacataactaaaatgctactacaattgtgaaacaaatactggaacgtaataataaacaacctattctctctctggaaacgtatagaagcagagcaaatttagcactcacaatgatcatgcaaatagagtacatattgaattaattactattttccgtgcaactataaattaaaacttgcaagggttgcaaaccaactcttggtcgtctagtttatttaagtcttattatgctgttgatcttttttagttcacatagaaatttatacataaattcaaatcgctacgtacgagcaggaaaatgttctttgggggccgtgagatcctcgcaagaaaatacgaaataagactgaggtatactctatatgcacaacacaactcaacacagaaattaatcagatatacagtgttaaatttggcattcatattgacaggggcattgatgcaccggagataggcatgcagtatggaaaggagtcgcaggatgcactggtgaaactgatcgctaggaagtgtgtcacgcttcatgtttatgggcaggaccaatttaagcgcttcgtctgtgatatccattgtggtggtgtgttcatccaggtggacacaaagccatacaccattgtgtcattagtcattgattttagtagaacaattttgtttggatggaaacgatggtgaatgtggtgtaatctttaatttcaggagcaaatgctggtgaatggtcatgcctggcacttcaagaactatgacaaacggccacaatttgcaaaggtaagaaactatggagtatatttcagtatattctttaattgcgatattcatatatatattctgttatgtaaatattccgttttgaactttgaaaatgataaatattattagcaacataagactaataaattgttagtcatacttgcagtattgaagtaagggatcatattaccgcacaccgaatcagcacgatttctgattatgtttaacatagtatttctattcaatttatcatatattcctgtataatttttgtgacatcctggcccaattaggatgaggcatgtgttgtccatgtgagctgtgtgcgcatatttactaccacattgctagtttagcacgagtggaaccaacttataaggcatcttccctctaaccatattactctcgagttaaccctttttacacaaagcgatgacaaaagtgtacctggggtggtatgtttaagtgggcccgcccgtcgaatgggctggctaaatcggttctggatggagggttgttacaaatggtatcagagccaaccctcgcggttacgcgtacgggttagtgtacgggcatatggcgcatggttgttacaaatggtatcagagccgaccctcgcggttacgcgtacgggttagtgtgcggacatatggcgcatgtgggctctatatgtgaggcacatggcatggtatatggcgctagcattaacgtacggacgtgccctaagagtaccacattgctagtttagcacgagtggaaccaatttataaggcatctttcctctaaccatatcactcctgggttaacctttagagagggttttttacaattttctattcaaattcaatttatgttgaaatacaacagtttggtgcatcactgcaggttcttttctttccatgttgaatatttggaacataaaagagcgtagttatcttgtacttgataccatgcaagatccagttttaaacagtagttctccatattgaacttatcttttagaaaagaaatttaccatacagttgaaattccaatctcgtttgagaactctatagacatacgggtgtgtgtatttgtgtgcattttctgatgaaactgctttggttacttcttctccctcggattgtgaagtgggaaaaaatggcacgggatgcacgtcaagggctttgggcatatgataaccttgagaagccatgggaatggagaaagaacaagaggaaggcatcgcgacatcacaattcagatgtacgttgatggactctggtcacttggatgatgatcttatctgaaatgacataatttggaattggatctatggttactagacagttagccccagttgagtatgtataaaagtatgatgtactttgtatatagtaagattattaatctcgatctgtattatttataaactaatatttgagtgaagaatgtgtagatgaattatgatatgataccgcttttcaattaaagcggtgaaagggtctagtactttttaactagcttgccttgtttacgcaacatgtagctacataaatactacgggttaattcgttaggattgcagcaaaactcaacaaggccataagattggcacttctaaattagtagtggtttctattttgtagccaaaaaatttgcatgccaaattatttcttttagcccaatgttggaatgcaactctggcagtgaacaaaatgaagcaattgccagttcttgccaaaaaaaaaacttgtggagatggacatccctgcttttttttttgtatggcaagaggtgtccattgccaaaatgcaaccaaatgtcaataaaccaaacaagcccaataagaacaaccaaatggatataggatccaagaaataaccactactatggaaccggtcagctgtaacggccggaactatcatctatatcgcaaaagtgtgtggtcactgattattagtcagtgatgtgaaactctcatctgtgtcagggtagatgtcatcaccgatgatagatctctttatcgggccccaaatcccacccttcaccgatcggttctctaggccgtcacagatatgtcgtcggtgacgggctccacttgcaactcgacaaatgtgttgttgttccctttgttggattcgtttagagcccatcatggatgatcatcggtgactggttccaattgtgacccgacaaaggtgttgccgtcacctttgtcagaatcttttaaaacccgtcacagatgatcattggtgatggatgaggtttttcactcaaaagataaatttattttattggcttatctcacttctagtttgttttttcttttaaattttgtactaccatgtagaaaataaactagcaagcgggtttttatgcgggtagtgagactacccatttgcatcccacccaatcgttctctggaagtctgaaaatgaactccagccaacacatttgttaggaagcatatgagtggagagaagagggataacaacgaatcttgaaaagaaatgagcgaaaacactaacacgaggagtagaagtagccaaaaaaaaagttgttgatttcttttgtacactactacataaaaagggttaggtgtcggttgggaactcgccataggtgttgaatttctcaaatggcacctagcaagtggcacttttgaggttctaggaatgaaaaaagaatgccggctcgaatcgagtagatgcattaggcagctccccttcactccaaccagattacatagaacatttaattcatataatgaacatttaatccaagaacattaagaatataagagcatccaagaacacaagaacggaccgaacactaagaacactaagagtacaaagaacgggccaacatcggggagggcgccacccctgacaccgccaggtggtagagtgccgcagctaggtggggagggccatcgccatcgatgggtggggagaggcacgcgacagagagagaccaagaaagagaggtcaaagaccggggaaagcgaacaagtcctcctcaccttattcgttcgagagaataattacgaacggtcagctcggtttggtttttacaggtgttggtttttaaaaaacaaacacgtataatagattatcgatgttagttttgtaattaacaggtgtttagagagaaaattaaactttgttctctctgtccagggaagaaataaaacatgtgcgagtgtgccgatgtactaagtacacaaataaaatagacaaagaaaaatatattttattataattcttgtggaactacaaaatacaaaatccttagttatttagatattctccacggtcataggcaaggtgtatctgactttaagtgattgtgttctcctgattccaggggtgtcataaaacgcctggttaattactctcacaagttaaactcatgagaagcctccaattaagtcgtgctagtctcatcgtcatcgatcttcgcttcgcattctcctgtatgttggaaatatagtcattaatcggcatattttaatccaaaatgttaaagcaataatcatggcataagcagtgtagggcgatcttaacataaccagtagcatattatgcgcatcatgaatgtcaggaacaggaacatgaacataatagtaacgcatagaggcatcatgaagaacaggaacaagaacatagcgcacatagtatagcgatagcgctaacaatgcgaacaggagcagaagattataccccgagaatggccctccgctggatggtgaggcagaattgcctccgttgttgttgtcgttcacggcacctcctcctggcgcaccagctccggctcctgttggcggcgcaccacctccgccatctcctccagcagcggcggcgactccagacatcgcgatgagcagtcgtgcgggaggcactccccaaaaacctgatcacccgcctacccggtgcagatctcaggcgaaggtgtggtttcggaggcactgctccttccaatctctcgtgcacgcaagagatcagaagcgaggaagcgagagcaactcaggcggagaaggagaaactaacaccgggaaagaagcgatgaaaacggatcgcactcgcggcctccttatctatcaggagaaagaacgtggacgcgctgttgcggagggaatcgtgggaacgtgggttagtggctgcaaaaggatagtgacgtgacgtgacgtgacgcacgccgccagccagccacgccacgcctcgccctcgccctcggcccggcccggcccggcctggcccggcgcgcgcgcgcgcgcgtgtggcaatccgacccccacctcaactggtcaacaaggagtctccaataactccctatttaggttgagatattcctcgcttaaatcctgaggtggtattattatccttaacacttattatgggcctttgagatttaataggataagttgggcatagcccaattattctaacaatccccaccaaatttcaaggctcataagaaatgttctcaatgttgtgcctgtttgatataccagggttttggtggagactattaagttgaacttccacctaggaaatgagctacatcagaccacaactgaacaatggactatgccttgaattgtcagttttgtgtgatcaggtttcactcagaaccttgactggtactgggctgccgttcgcatcccctctgtttggagcatataagtcaaactccaggcctttcatgagtatctagagatcgcccaaacctcatagactgtgactagcagtcgaactcatataggtgtgttccttctaagatgttctgcaggtcaacatctctgcttggaaaagccactcggatcacattaaggcatgagccatcctaccatgcaggaaagaagagaagcacatcatgaaaatgagcccttttcaagggtctcttctctcagtcacacaatagtttgtttcgccatccaaattcacgggatctccgatcacaatgggtatcaagcccatttccctcgatgcactgtctatcacattacgtggtagccccttggtaaactgatctgccagatttctagccgtttggacatagtccaatgctatcactccggagtttttctgttttctgacagacttcagtcttcttttaacatgcctggatgacttcatgttgtccttcgaactgttcactttaataatcactgtttgattatcacagttcatcaggattgctggtactggtttttcaaccaccggcaagtccatcaggaactcacgaagccattcggcctcaactgtcgcagtatctagtgctgtaagttctgcttccattgttgacctcgttaagatggtctgcttgcaagacttccaggaaacagcgccacctccaagtgtgaacacatattcacttgtggcttttatctcatcagcatcagatatccagtttgagtcactatacccttctagtacttttggatacccggtatagtgaattccatagctcatagtgccctttagatagtgcattactctttccagagcctgccaatgatcatctcccggatttgagacaaaccggctcagcttgcttacagcaaatgagatgtcagtcctcgttgcgctagccaagtacatcaatgaaccaatgatttgagagtatctcagttgatcccttgctattcttcggtttttccttaatagcacgctgggatcataaggagtaggagctggcttgcagtcactatatccaaagcgactcaaaaccttgtccacatagtgggattgcacaagtgtaatcccaccctcatctcctctttgtagtttgatgttaagaataacatcagcctctcccaaatccttcatttcaaaactcttggacagatagtccttgacctcctcaatcacattaaggctggtcccaaagatcaatatgtcatcgacatataagcacaagatcaccccttctcccccaccatagcgatagtatacacatttgtcagcttcgttcacaacaaagcctgcagatgtaagcgtggtgtcaaacttctcatgccattgcttaggtgcttgcttgaggccatacaaggatttcaacagtttacacaccattccctcctgaccttctagtacatacccgtctgggtgatccatatagatctcctcctccagctctccgtttaggaaagctatcttaatgtccatctgatggacgagaagaccatgagaggctgccagagcaagtagtactcgaatcgtggtcaagcgagcaactggtgagtatgtgtcgaagaagtcctcgccttccttttgggtataacccttggcaacaagccttgccttgtacttttcgattgtaccatcaggcct

SEQ ID NO: 26770 - DNA, 2940 bp, Oryza sativa
atcccatcccgacgagtgtgtgcccacgcgttggaagagtaggcctccgaaaccacgcgttgctgcgacgtttgcacagacgggcgggcgatcaggtttttggggagcgcaaggcgcgactactcactgttcgtcaacatctacttcatcttcaccaacatgtcgaacactggagacaaggagaaggagactcccgtcaccaccaacggaggcaatactgcctcaaactccagcggaggaccattcttggggtataaccttattacattatttcaattagaagttttactgttaatgttcatcgcaatgtcaacattgtgtcattatgtgattgttgatgcttattcaacgttaagcatgctcatgttgattacattcaccactatcactggatcaaatcctattgtaaatatcatgattattatcttgttattttggattaaaatatgccgaattatgaccaaatttccaacaatccaaaaacctgataggtcattttcggtagttggctttgctgctgcactgaaaccacatgcctttgatggttcaaactataagagatggaaagcacgtgcactattgtggttgacagcgatgcagtgcttctatgtttcacggggcaaacgaagtgaaccacctctttctcctgaggaagaggctaagttcgaggcttcggattgcctgttccgtggagcattgatcagtgtactcgctgacaacatagtggacgtgtacatgcacatgccttctgggaaggacatgtgggatgcacttgaggccaagttcggagtttctgacgccggcagtgagctgtatgttatggagcagttctatgactacaagatggtcgatgaccgttctgtagttgaacaagctcatgagattcagatgctggctaaggaacttgagaacaacaactgtgagttgccggacaagtttgtggcaggtggcattattgccaaactaccatcttcttggtcggactttgccacttctctaaagcacaagagacaagagttcagtgttcctgatctcattggctctttgggtgttgaggagaaggcgagggcaaaggacgtccggggcaaaaaggttgagggaggttctagtgccaatatggtacagaagaagaaccctcatgcatcccacaacaacaagaaagtcaagcctgatgtcaaacccaaggctgcaaccaattttaagaaaaaaagcaagggaaaggcaaagggagactgctttgtgtgtggcaagtctgggcattgggccaaggactatcctgagcgcaaagacaggaagtctgccaacatgatcattagcgagggcggaggaacatcggggtacggtaaaatattacctacagttctctctgtttttcattcacctgattggtgggtggacactggtgctaatattcatgtatgtgctgacatttctctattttcttcttatcaggtcgggagaggttcctccttgttgatgggaaacgggtcgcttgcggctgttcatggtgttggtacggtcgatctgaagtttacttcgggaaagaccgtgcagctgaagaacgtgcagcatgtcccttcaataaagaagaatctagttagcggctctctattgtgtagagaaggttttagacttgtgtttgagtccaataaatgtgtcgtatctaaatatgggacttttgttggaaaaggttatgacagcggaggcttgttccgcttttctttgaatgacatgtgtaataatcataatgctgtgaaccatattagcgagaatgatgagtttaatgtgtgggcatttcgcgactctgtcatatgaatttcggttgtatgacgcgcttagctaacatgagtttaattccaaaattcactttggtaaaaggttccaagtgccatacttgtgttcaatcgaaacaaccttgcaagcctcacaaggcatctgaggcgaggaatttggcacctctagaacttgttcattccgatttgtgcgaaatgaacggcgtgttgactaaagggggaaagaaatatttcatgacactgatagatgattgcactagattttgctatgtgtatctattgaaaacaaaggatgaggcattgcatttctttaaaatctataaagctgaggtagaaaaccaacttgaaaggaaaatcaaacggttgaggtctgatagaggtggggagtattttcccaataagtttgcatccttttgcgaagagtttagaattattcatgagatgacgcctccctattcaccccaatcaaatggggtggccgaaagaaagaaccgtactctaactgagatggtgaatgccatgttagacactgcggggctttccaaggaatggtggggtgaggcagttttgactgcgtgtcatgtcctgaataaaattccaatgaagcataaggaagtaacaccattcgaggaatgggaaaggaagaaattaaatctctcatacctacgaacatggggctgtttggccaaggtaaatgtacctatagccaaaaagcggaaacttggaccaaaaactgttgattgtgtgtttcttgggtatgctatccccagtgtgggttatagatttttaatagtaaactctggagtacccgacatgcatgttggtacaattcttgagtccagagatgctacattctttgagaatgaatttcctatgaaatatacccctagcacttttagtaaagaaactgtcatgccccatgagcactttgcaccgatagaacccaatgatcaaacgcctgaggaaaatcctgaggaggacaacattgtagatactcgcaagagtaagagacaaagggttgcaaaatcctttggagatgactacattgtatacctcgtggatgacaccccaagaaccatagaagaggcatattcatctcctgacgctgactactggaaggaagcagtacgcagtgaaatggactcga

SEQ ID NO: 26771 - DNA, 11286 bp, Oryza sativa
ggaggagatctatatggatcaaccagacgggtatgtactagaaggtcaggagggaatggtgtgtaaactattgaaatccttgtatgggctcaagcaagcacctaagcaatggcatgagaagtttgacaccacgcttacatctgcaggctttggtgggaaccaagctgacaatgtgtatactatcgctatgggggggagaaagggtgatcttgtgcttatatgtcgatgacatactgatctttgggaccagccttaatctgattgaggaggtcaaagactatctgtccaagagttttgaaatgaaagatttgggagaggctgatgttattcttaacatcaaactacaaagaggagatgagggtgggattacacttgtgcaatcccactatgtggacaaggttttgagtcgctttggatatagtgactgcaagccagctcctactccttatgatcccagcgtgctattaaggaaaaaccgaagaatagcaagggatcagctgaaatactctcaaatcattggttcattgatgtacttggctagcgcaacgaggcctgacatctcatttgctgtaagcaagctgacccggtttgtctcaaatccgggagatgatcattggcaggctctggaaagagtaatgcgctatctaaagggtactatgagctatggaattcactataccgggtatccaaaagtactagaagggtatagtgactcaaactggatatctgatgctgatgagataaaagccacaagtggatatgtgttcacacttggaggtggcgctgtttcctggaagtcttgcaagcagaccatcttaacgaggtcaacaatggaagcagaacttacagcactagatactgcgacagttgaggccgagtggcttcgtgaactcctgatggatttgccggtggttgaaaaaccagtgccagctatcctaatgaactgcgataatcaaacagtgattattaaagtgaacagttcaaaggacaacatgaagtcatctagacacatcaagagaagactgaaatctgtcagaaagcagaaaaactccggagtgatagcattggactatgtccaaacggctagaaatctggcagatcagtttaccaaggggctaccacgtaatgtgatagacagtgcatcgagggaaatgggcttgatacccacctaaggttgcataatagtggaaacctgtccattatgatcggagatcccgtgaatttggatggtgaaacaaactattgtgtgactgagagaagagacccttgaaaagggctcattttcatgatgtgcttctcttctttcctgcatggtaggatggcttatgtcttaatgtgatccgagtggcttttccaagcagagatgttgacctgcagaacatcttaaaaggaacacacctatatgagttcgactgctagtcacagtctatgagatttgggtgatctctagatactcatgaaaggcctggagtatgacttataagctccaacccgagggaatactaatggttgcctagtttcagttatggaattgagtgaaacctaactgcacaagactgacaattcaaggcatagtccattgttcagttgtggtcaggtgtagctccttttctaggtgaaagttcaacttaacagtcttcaccgaaacactggtatataaaagctgctatggaatagagagcattctcatgagccttgaaatttggtggggattgttagatttaattgggtaattaatccatttaaatcaattaaatcaaataaattccaaggctcattatgctaggaattcatgtgaattcattcttctatgggatatcaatgggatgaagagttttgagaattaatccatttgattaaggaattggtaacttatatcaattagtcctaattgatggatggttgatggttgtgtagtggaggatggttcatggctagttgatgacaattagttgctctattcctcttcctattccattggtaacttacatcaattactcttaattgattgttggttgatggttgtgtagtggaggatggttcatgactagttgatgacaattagttgctccattcctcttcctattccatgactcttactcttcatcttccattcctcttataaaatgggaatggatttgatctcccgcgagaaaaagaagacacactttcatccattttaaaaagctgttgttgctacggtaatcccatcccgacgagtgtgtgcacacgcgttgggagagtaggcctccgaaaccacgcgttgctgcgacgtttgcacagacgggcgggcgatcaggtttttggggagcgcaaggcgcgactactcactgttcgtcaacatctacttcatcttcaccaacatgtcgaacactggagacaaggagaaggagactcccgtcaacaccaacggaggcaatactgcctcaaactccagcggaggaccattcttggggtataaccttattacattatttcaattagaagttttactgttaatgttcatcgcaatgtcaacattgtgtcattatgtgattgttgatgcttattcaacgttaagcatgctcatgttgattacattcaccactatcactggatcaaatcctattgtaaatatcatgattattatcttggttatttggaataaaaatatgccgaattatgaccaaatttccaacaaatgctaggcatgagaagtataggattttaggagtaatgatacaacatggatgccctgtaagtgtgaggaagcgggatacatggaccaattattgctagattcaggtggtagggataaagagatataaggtagcgatggaaactttctcgcatgccaagggtcatggggaggttgaagaggaacggctttttccccgtggaacccaccttattttctacaccacccataaatgtggtgtttgcaccactaataccacatgctagggtcctctttccgttaactttcattggagagaagtaaatattctctattgtaaatttgtaataatgtgtgatatcttaaaacacatttatcaaaccgttattggtgcttctacgacgaaagtttaatctaaacatgtgttatgacatccgtgatttgtattttaacatataataaggattaaatgctctgttcctacctggtaggaaccatttgagagtggtaagtagtttcaacccggtcacacgactacaaccgataaaaaagagttaaaactatattattttacatgatggttcctaccaggtttttatagaagaaacatcatttgtgaaccggggattgcaatcggtgattctttaagccgcacccacgttattcctgaccaacacgctaaaacaatatggagcgtgtgatagcttaccactgcttgcaacccaggcttacactaagtagcattgagtagggcatgtactccctccattttatattataagttttttttctagttaaatgtttttaagtttgtagaaaaatatagcaacattttcaatacaaaacaaacatgttatcaaaatatattcaatgttatatttaatgaaactaatttggtattagagatgttgctaaatttttctataaagttagtcaaacgtaaaaaagttttaccgagaaaaaaaatcatatgagacggagggagtgcaacgacaatcaatactatactcttagtcaaactatagggagggagtatagaaggaaaaaagaggatggagaagatacacaaaacaaggtgagccattagcgaatgattaattgagtattaactattttaaatttcaaaaaagaattaatatgatttcttaaaacaacttttctatagatttttttttgcaaaaaaacacatcgtttagtagttcgggaagcgtgtgcacgaagaactagacaaatctcctctctatgttcagctgccgaactcgttaacaagataagtttgctgatatggaagagagagaaacatcgttgttttttttaagaaacatcattgttatgcacaacaacggcttaatatcgactcatagtgtctataaaagaaaaatgatggaaaaagtgaaagaaatataagaaaaaaatttcagtatattaatggttagaatcttttatcattttaagttggtaagagaatagtctcagattggactaaagaggtcctatatcatgctctacttttaacatgccctttggttctaccttgaatcaatcttgggtcatatttaatcgtccataattgggaaacttggcagaacatggtttaataaaataaatgggaaaatttgaaccattccaaaatttgtgatatgccaccctgacccatatatcattgactcatgtgggtcatacatgtcattgagatacgggtggcatatctcaaattttgaaaaattagagtggtatggttccaacgaacccttaataaattcggtaggatgtccaattcggtaaatagaaagaaaaaaaaatctggcacttgagactcttgacgcgcgctaatttgttcggaaaataccacagctttccacagaacgttgaattgaaaggaccgaaatacccttcaattggggaagtttgttctccttcctcggacgctttctcctccaggaggagagggagggacgagcagcggcgagaagagatgcgcggccgatcgagggcaagaagagagagagagagagatgggattagggcatgggctggtatgtatgttgttgtcaagaaattgagtccacattggagtgtagtatggatcttggacaatcccttgatttgtgttcttcagatgaatttgtgctagtttgttttcttggtttggtgattttggttctgaatctggcattctgactctagggagtacaaagaaaaagaatccaaatgcaaccatctccatgtaatcaaatctagtgtgttttgcatcttctgatttgactactcccggcaatgcctaatcccctcctgttctttctgctagatgattgaccatcgacgacctgtgttagacgagtgacgagccagcgttgaatggagaaggggatggcaggctcaagctcaagctcgcggcgccggtggtatccagcaaagtagactatttttttgggtggtattttccgaattttgcatcctgcatcccacatgtgctatgttaaccgatttttccattcttttttatttatgtgatttaatttcgttggtctgttttaggtgctgagacaaggaaggtgttggttgtatatgacattgttggtgatgtgcttaaaaacttgacagtagtattgcttgcttacatgcattctcaaggtatagttgaattttattggttcagaacataggttcacagtttccatcccactagctaagaaaatgataaatctggagagctgtaaaaatgtttgacctccacattgaaaagtagtgggaatctggtcctctaggcaatcaaccttcaagaaatgaagtatacttcatttggtggtgctggtttcaactctcgaccagtttcaaatgccattggttgcaactattgagaatttgattcctctggcagaactaggaaagaagtcatctggccctttatctcccgttcttcctacaactaggctaatcacatcatcgcaaaaaaaaaaaaaactaggctaatcacatcagtacctatctcctctggacctatgagttcatctggtggtgcgacctcttttgctcacagccgggctgttacaaatctgaatgtagaagatggttactcaatcaagggcagcattccgaagtcaattctctggatatatggttgttcttctctttgtgatggtgtttcatagcaggtggattcattcttggcgctgttcataatcctatattgctggtagtttgtggtggtgatactttgtttctgtcgctgcaattgcgatttggaatattaatttactgaggaacaagaggcatgattttgttcatcagtcgctatcctgattctgatcttagaacagcaaaagatggacagtgcatgaaagttactggggtgtgactgtcagaaatattgattttgctccatcgttctgctgagcagttttgatttgtaggtttcacaaaatactttagatggtcatctgtagtaataatattgatattaattagaaacaagaacaaacttctaggcacatggatgctttgatcatataggttagtttcacaagcaggtaactctactaacctgtacttgacactaacatgatttcttctcataatatattttcttttgacagtaatcttgtggttatagaaacttggattgccttttagcaatatgctttatttttcacatcgttaacaactagcatatcttcacaggttgttacttatggaaattttcccgtcgagtcctcatttcaaagggttccaagatgtttgtacattggacttgcctgtatgagtacagcctacaggggatgggtatcaaaagctgctaatgctgagcattgcagattaatttaacttgggactcgggtcaatggaggtgagtttctcttcaactggaaatttgattattatcaagatgatgagatctcacagtgcgctagtgtttaatgccatgaggattttattgaagaatgcaaactgctataattcttcccaacataaaccctgcaatctcacattttccttgctatgattgtggcgacatgctgtcgatttctacatttctgatttccaatctggacggcgagcattggtcagaaaaggatatggggcacgggtaacctctaatgttgatgaatctgttgttactgacataaatccggataacaaggacgtcctgagatcctgaaacggctacgagaaaggaatgttttaagtgatgatcgtataatgttcctaaaaaaagggtactcttatttgttctgaattttggagttatatgaaatcatttcacatgcacatttacatgcagaattgcagatacatcaaggagggcagcagagtttgtattatgggggttgttcaaaggaacgacagtgtgttgatgattgttcatccatctgaacccatctcgactggcacgaagatacatcaaacatgctgagaaagagaatgcctgtcgaaatccctggatttattttgtgggatgttagagttgaaaaggatgtgcaaatgcaggttgtgattatgcattggttgtatagtgttttatgtatttttctctgttttttttctcttctgttgggctttggatacttgtaacatggatggctttagttttaccatggagctgtttggggattctcagtggaatagagttcacaagtttttgttgtgaagaattccagaagtgttataaattgttccagtttcaattttatgtgcatttcattgtaaaatttcattcccatgttatatatatttcatacataatataattccatgatctttgtacgatattaaaccaaaccattgagaaaatcgcatagtttcttttgcattttattgtgagcctaaggtgagtacattggtgatataaaagagcagacatcaggcaactttcattttattctctgtttatgacatcttctttttcttccataaggatcagatatgattgattggacgccatgtggagttagttgccaaccctcttaaagtttgatattcctgtgcgtccgttttgtgatatttttccagttcattcctatgtttggtttgaatgatatttattcctccatttaaatggagtttttgagttatttcctgtaaaactcttgcatttaaactaaagccaaaaagaagagtgaagctgaagtgtcttgtgagcctaagagatgtctcatgtcaatttcagagaagcatcatatggggagacgatggagaaaataattggtagtaataataaacaaagaaattaaggtacaacaaaattgagggaggaagggacatgaatctctgaattctctccctacaacagaccaagaatcactctctgtcacagtgtcactagcctgttgtcagctaatgctgatttccattagtataaaatgtaacaactcctactgggataaggatagctagtagattgttatccaatgagtgggaaaacaaaggaaaggatacaatataaaacatcgttaagtcgttataattgttaccattaacatacctaaaagtagagagggtatgtaacatatgtttaaataatgtttttagttgtgattttgatttcaagtatctccctagtagcttagaaactagggcccatttgatatggatgaaatgcggatgaaagctaatgaatgatatgtttataataaattaaatatgatttattgtaaacctaaccaatagattaggtggtacgttctcagtagtttacagattatagatgatctccgccacacttttcaaactcataaacgttatgttttcgcaaaaaaattcctccaataattttcttaaaattttttaaatcaacttatcaacttctaatatttaatttattcatttgtgccatcgactaattgttaaactcagtttccatctatcattatcctattttgagagggcacattgaacaagtggtctgagcaatattgatttagaaagttaatggacaaatcgtatttttagaaacatgacgtgaataatctgcaaataattcgtagcaattaatctacaaagaacagggctgcactcatagcttaaaaactagtagctttagcgatcgcaccatataaatagcattcaaataacattcgatccatgtatgacactatgtatatttggcgtattttgtgtaagaactaatgctaatatgttatgttattggtgtacggacaaatgcgttggatatatgcattcaaacgcttccgcaaatagctctagctcatatatcatagtcgccatcacctacgactagtataaaaaacgtgtattgagtgagcaatacgaatttgatatttagtgagtgaattgcattcgacatattacacatgagtagggagtggagctatgtgtatgtgagcctagtctatggaagaattgagctaatgcatatttcggaagctggaatacaagtggcaatacggcaaatggcataatgtccgaaattccctttttttaataatacatttaaaaccggtttctacgtccaacacggatgtacacagccaatgtactcactgcgctgcgtagccggtgtgctgccaagggcgttagcccataaataggtggtgaatgctgctgtggtgatcaatggacacaacaaattcatgagacaacaaactttggaagctccaagctgccatgttttcagtcaggaggattcctaagctcacatgtttttcgctgtgagcccaccagcaaccctccctctccctctctctctttctcatgcctttggttggtaccacctaatttggcatcaacttcaacaaactacacacgatcagaaactcacaatcaacattatgctgacaagatacacatgaatgcatccattatccctaaaaacagaaattaatagaaaaaaagaaaccatcaaatgatccccaattaactaacttcagttttggcctcttgtcatttgaggaccatgtatataaactctctaggctagggtcctagctaggtgcctaggtggtgatctgaattcatacatgatgtgcactttggtaagagactgagaggcagctctactaggtagcaagtcttgatcacttactgccttaatggtctttttattttttttgtatctttaagtacacggcacatggtgagttagtggggctcagtacaacacttaatgacgttgttagcgacggtattaagtgcaccacaatgcaagttttgtcctttgttttcttctcctcccttttattttttttttctgaaagtgaggttgtgctgcaagtagggagcagcatgtgccatggatgtacaatacaggctttaacacccaatgactcttgattatggtagatcctggaaagcaatgatgcaatcatgccctttcgtttttctttaaaggaacaactgatcatgttgtttagaatatcttatccgtgtatctgatatgaaatctatagtcaaaaggcaagaaatcaaatctctttttcgcgagggtgactcgtgtttcttgctacattcaacagagaatttggaccggacacacgcaatcagttcagatatgcaaacataccagtatcatgaggccacagggcaggtcagtgataacttttgtttttgacaagaaatggaaacagctccagtcatagactatataattttgatgcaattatgcaatacgaccatgacaactagaccttcaaatggactttagtgcattcttgctccgacttgaagcctgatttatccaacatggtttccacctgctcttggacgaacacttcagatccagcacttaaaacccaacattaatatcaaatcgcacatacataatcaaatagtgagtgccgtaggaagcaaccaaccagttacattcatatgctcacttgacagcagctctctcttatagatgaggcattcccagctataaatttagaatgtaatcaaatttgcttcgcaggccatgtccaccaaatgcacatacagttgaccttttaggtctcaacaagtcaaatatgacattacaacatgcagttttatatggaaacaaattcaagactggagatggaagtagatgtttttatctcagcgctttgcaaacattcttttttttttcttggcacaaagagccatccacagtccttgttggattccagctagtgttccattttctatggctgttgcagaacacaaacacaagcatccagcttctccctccatgttttattaccgtgaaccaaggctatggcacaagggctggtcgatacaataacactacagcttctgagtgaaatatacagattgcaacccaatcatagcagttgcaacagattatcttcatagtgcaaggggtggggtgattaattagcacttgggtccttgccgtcatccatatgtacattggtcatagcagagacgtgtaaccctgaacaaccttttcttgtagaagcctgcagaaaaagaatttcttttagccgaatcatagtttttggagcacatagtaaggacacaagcaaacaaacaggtgaattcccagaggaaacaaggctgtctgcgtgtagcctacatttttacaggctctgcaatcaaaaattgtacaaggcaccagagtttttaaaattttaagacaaatttacccattgacccaagttttaagttcaatgatagattcagataaaatccca

SEQ ID NO: 26772 - DNA, 11248 bp, Oryza sativa
ccctttgaaaataattaattagtcaggtgacaaattaagctaaatctcaaataaaaatggccaagaataataatcttcaacaaggttttgaaatgcatgcacatggaacaacagggaaaaaacataacaaattattggggagaaagatatgtcaactctatatactatttgttcagtgaaactgatatgttgtgttgatcagtgttggcacacagggtcaggaatatataatagaataatgccttgagaaaaaaaatcaacaagataaatattcatgcctagaatatataatagaaggtgatgtacttctgaagaatctatatagaccaaatggtatagacactggaagggaagaatgtaatatagaccacatggcatagacactgcaagggtacaatgtaaactctacagccattactaacacaatttaccaattcatgttttgtacggaatacacaagtaatgtcctgaagtaaacaaatcaactacaatggtttaatgtttgcctatgaactactgcacgtctgcaccttactataagttcaattcttagtttttaaatcaccatatagatttttgtgctatattttctagatgatggaactacaaagacctaaaagtgcaaaacagagtaattaacaaaagaggaacattgtttgccaacactgtttcaagacatgccatcacaattcatctttcatgtgcaagcgaataaagatctatagtgtatcatttgcacaagtgctatatggatatcaaatttagcttcatatttcccccctgccacacaatatttgcatgatatatccctagattacctagtaatttagggcgcacatgcaaatgagttggtgataaaataagagagatctccaaaagagaattacaaatatccatgtctagggtatttaattgtgatttaaagggtgattttaataagtgcaagccatcaaacctagaataacatatcaaagagtccatacaaatagtataatatggtgtcgtgagtcacaagagagtaactgcacatgcaagtacaaaagcaccgaggtaggcaatggataaatcgaacagaacaggcaccatggcacatgatgaagaatgtgccagtgttgaatgcccttactcttttgtattgtagagactcaaaacaacagacaggtaacaaacctaacagaaattaaaaattgcttctaaaaattattgtagcaagatattactacctccgtccagaaaagtaccgaggtaggcaatggataaattggacaaatagaacaggcatgatggcacatgactaaagaatgtgccaatgctgaatgcccttactcttttgtattgtagaaactcgaaacaacatacaggtaacaaacctaacagaattttaaaactgcttctaaaaattcttgtagcaagatatcgttctacccgtcccagaaatgtagctgtttctaggtatgcacctggacacaggttgtagttactagagcatagttatctgaattgtatagattggcatactacaacattgcaatttggtctaagaattcagctcaatagttgtagctaaataatgtaatccagttcaataggtggtagcttaaaaaatgatggtccacaatgaataccaaacacagaaaccgatgtggtgcgctaataatgttcttgaatcaaatccacaaaacaaaaatcaattaattctgcataacccgagctgggaatccaagatctcggccagccgaggccagcggctcaccttcgacgaagtaggaggccgacggccagccccgcgcggtgaaaaaggagagcgcctcctcctccgtcatgggcgcgtacacctccggctcgtacgcgagccctccggccaccacctccgcgtcggccccggacgccgccgccgcgatccggccgacgaggtccgcgaccccgtggggccgccgcatggggggaacccagaacgagcccccggggacgaaggggagccagtcgggcgccgcgcggcgcaccatgacgccgtggatcgcctcctccaggcgcctgaccccgaccacctccaccgacgcgggggaggaggcggggcccgaggtggaggcggaggagtcgtcgtcctcggcgaggtcgatctcgatgacctcgaccttggtggcgaggccgcggagagggaagaaggggcgccgccgccgccgcagccgggcgggctagggttagggttagggtttgcgcgaggaggcgagccatcgaggaggaggggggaatggagggatgcggagattgggacgaacgacgacgacgacgacgacgaagggcgaaggggatagggacgggggaggagagatgtcagatgccgcggagacgagaggagaatgggttagctcacgtgcgaggtgcgtgcgtatgtgggcccctggtgtcggtgtggcaggagcgtcggcacgttactgttggccaaaaggcctacggcccgacggcccggcccacggcatggagatttggcctggtccaggcacggcatggcccgattgttgttgggcctctgccggcccggcctgaccaatgggctgtgtctgggccttttcctcagcacgacgggcacgacaaccagggaagcaaaatagacttattccaaggcacggtccaaagaaatgaaggatgtaaaatgggcttattttaagccatataagtcacgctctaaagagatgagggaggtaaaatagatttattctaagacgagcgcgatgaattggtcgtgctttcaggccggatggcacggcccgcatcttatgacgaagagtatgacgggccgtgtcgtgcctaggctacaagcacaatatgtgggttggcttggcacgacacgacatgaagagtatgacgggttgtgtcggcctgacattttgccttgggttgtgctctagtcgtgtccgggcgaggccgtgttagatgacccatttgaccatctatatcaccggtggaggcggagtgtcggcagcgtcgtcctcggcgaggtcggtctcgatgacctcgaccttgatggcgaggccgcggagagggaagaggggcgccgccgctgggcgggctagggttaggttagggtttgcgcgaggaggcgagccatcgaggaggggaggaaagggggaatggtgggatgcggagattgggacgaacgatgacgacgatgagtcgtcgccgatgaaagggctaaggggatagagtatagaaagtttgtaaacgtatacattaaaaaccaaaaaaccgacctggaaagaaaaacgagagaaaaagacgcatatatgtggtttgttggtttttaatgtatacattttttatatatgtatacaaagtttgtatatatgtattaaaagtttgtatacatatgtataaaaaaaggaaaaaaaactaaaaagaaacggaaaaaaactaaaaagaaacggaaaaaactgaaaaagaaacggaaaaaaaagaggagagcgaaagaaaaaaaaacaaaaaagaacgagagagcgtgccgtccaccccaccccccaccccccactccgcgtgcgccacgtgtccggtcgcgcggggggaccgcgcgcgcaactagccgctaaatagtcatttcgctacacatgcacttcactctatatattatatacaagaccacaaaatcttatgtccaaactcaactcacacattaagtataaaaaaataaatttggatatgaatataatagtgatactatatatattcattcttgaatttgtttttttctcaatgtgtaggttcaatttaaatttaattttggtggaattgctagatgtgaagtgcggtgcgtgcccgagcgataagtgctcggcttcctcctgacttacctctcttgagaaatggctgagaagtgctaattaatccgtatcttgtttctcttactagatttaaacctctcttattatattcttactacttcctcagtttataatcatattataagattttctagcattacctatattcatatactacatgttaataagtgcccctttgatttgtaggaaaaatataggaattttggaggatttcaatcctatggaaaaaaaaatcctatgaaggtctttgaaacaaaggattgaatcctatccaatcctttaaaattcctatggaatgggtaatcctatgcacattttggaggaaagttagcaagaggtctaacctcttggaacatttcctctgagtctatctctctcatctgattcctgcgtttttcctgtggtccaatcaaacggccattcctgtgtttttcaaacctctgttttataattgtattcttgtcagaatcctgtgtttttcctattcctctattttttcattcctacgatttaaagggggcctgaatctagatactgtgtctagattcattaacatctatataaatgagaacaatgctagaaagtgttataacctgaaacggagatggtatattcttagatgtataggctattgcttccgtttctatgggcaaaaaaaaaatactatgttagtttatcaatgataataacaagtttaccttgtacttagatatataaatcaggacatatagtgccataattatgaaggtagtatattcacatgtcactaaaccagttttctcattattttcatgatagaaaaatctggatgttacattttactccctccatcccaaaatatagagcgtacctgctctggacacggagacgaaggatatatgtacttatcttgcccatcccaacgcgcgacgcttcgcttcacgcgcgccctcggccttcccagcgcgtagcccatcccacgtcctattttcgtgcacgtatcccatatcccacgtcctattttcacgcgtttatgagacttcttgatcgctcatgcttgcccgcgcgcgttaatttctggccccgcccgctgacaataaaaatttggaaagcatcaactaaaattagcaccatgcatgccagtttgatcggagatttggaaggcgccatcaaccaaattaaatttggaaggcatgaacgaaaattagcgccactttgagcttatcctataaatgtgggcaatggccattcacagttcacacttcacctctcttttttcttctctcgtaaaccctcacatggttcaacgtaatggctggttttgatctgaatcagcctatcaattgggatgaaattgacgatttagagggagttgtaccttatttgaactatgatttcgtttgggatcccggcaacgaaggtgctcattcatgatttgttttccttttctctcttttgtaatctgtcttttttcgatctgtacttgtttgatgatccaattttgtttcgaacgaacagatggagaaggttctggagaagagcgcagcgacggagatgacgacgccggcggcggagcggacgccggcgacggaacggaggccgtggatgcagctgaaaccacaggtactcactagtcgtttagctgtttgagctcaaagccatttgcatgcatggcctgtacaagctcaaagcctcaaagccatttgcatgcagccatgcacagtgccatgcaagcaaaccataataggcatcaacatgctaattaaagccgtatgtatgcatgacttatgttttttattttgtttactgttgcctcctttagtaagcacgtactaaggcgtcatgaactatatgtgcaggtataaatatcaggaagagaaggcactaccctcctgatatgaaacgaagcatatatgctttgtgtttagagagatcaactaatggcatcataaaggagggagtgaccaaatctgttgctaacgacatgcgggtggggaaactgtggagagttgtccaacgtgtatggcggccgcaaaaaaacttccctttaacgctaatgcactggtggagaaaccctttgtagtcccggttcgtaacccccctttagtcccggtttccaaaccgggagtaccaatccgggactaaagatcgagctgacctttttttttttgaatggccctgttgctgcatggtttatatatatatatatatatatatatatatatatatatatatatatatatatatatatatatataaaacccatgcatatatatgtttcaatacatatatatgcatacatatatatatgtatatatatatattatattatattatatgtatatacatgcataatatatatgtatttatacatatatatgttatgcaaatgcatatgtatatagatatatatatgaccaaaatatatttacattatagaaaatgtgtacacatgcatatagaaacatatgtagtcatgtattaattacaatccattatatgtcctagctagctacgatttcgacgtagtagtagtcgctgctagctcagaagctaaggaccggtgaattgtgtttccgtcgtagtagaattcacccttgggatcaaggatttcttcgttgatgaatcccatgagttgttcttgaaccgctgcgataaattccttgtgtgttgtcaggttatccctcatacgaataaactatatgaatgtatgaaattgattagtaattaaacaagaaatcgttacgtaatgaaattttgaatttatttgtacgtacatcgagctctcttgtggtgatgatttggtctgcaaggcagtggcaatactcacacacgtagtagccgcacaagttagttccctgcttttgctttgcgcactacaaataaatgacaaattaacggcgtgagatctaattaatatacagttgtatgtattaatttgaatcggagaaatataaatgtagagcatgtgtactcacaggaaatttgaacttccgcctaagtctttctctccatttgccgcggaccaaatgacggaaccgataccaagccctacatggagtttaaagctatgattcgtagtagcaattaacataacaagattttcttaattaacagaggaacttatgacggtacctgtctataagttcgaaaaccttgtcaaacgtagactcttttttatccattgagtcatatacgttgacggtgcaggccgacaggtcgaagagtaaaagcacccagtggaatctgcaatgtgcgtgggatgcattacatatgaaacacttagcaagttcgtacgggaatgaaatttggtatgtaggaagacagtaaaattgaactaactctgtgttgtacggcaacagtatgaacgtcttgtaatgctgcgccttcaggagatggacgagattgtcctctgtttcttgtggatattggtcgagcattgcgacgtttactctccgagggtcgatgaatccagtatcgaaaaccctttgccgtcgggccctttgaatctccattctacaacgataaaagggagtattttattttatatagtctacttatatacaaggacctaattaattaaaggagacgtatagtaagaaatctaattgaacgatatacttacaaaatccagcaactcataatagagacgtcgagggcgtccagctggtatagttcgtagattcccctgaaattgatccagagaatgtcatctccttgcaagaagtccgtgtccctgatcctcgctccgatcatctctctaccggtggcgctcatctccatgtacagctgatggaacttgtacatttgtgtgggtagggactgcagcagctcaggcttgacaagcggtttaccgagttcgtacatgtatttcacttccgccttttcgattggtgcgactcctagcaattgatccgtagttagaccggtgtcagtaataaattgttctatcgtcatttctttaccggtcaccaatggctcgatctcctggtttggttgctctccaagctgagggactggtttggactttccagaagatgctttcttcagcgttcgctcatagtccgatagcttgatggcctccttgacagatgcagacatacccctgaagaagttcttaacactggggtctataggaatcttcttttctggacttcgaggcttgaattgtctcttgacttctgatgcaacgtaagcgtcaagctcctcttgcgtgcaatcgtaccccgggtccttgttcttggcggcgtcaactttcgccttcttcgttgcccttgtgtgggcaggcgatggagctgggggggcccttgactttgaaggtgccggaagaggagcttgcggaggagtatgtgtaggagcccgaggaggagtcggtgcaggatcctgagaaggagtcggtgctggagcctagggtggagacggtgctggcggagcatgaggaggagacggtgcaggatcctgaggaggagatggcggagccggaggagatggtgcacgagacgccgcttgtcgcccagggaggatgatgtaccgcctgcgccatagaataatggcatggcttgtgtctcgtagatgcgtctcaccgtctcctccagggtaatccagctcgaggtcctcgtacgcgccttcgaccaactcaacttcgaccttcgagtatcctgctggaatcggcctgcagtggtaagtacctaaagggtccgttgggatggccatgcccgacgccaccttcatgttgtgagagattatttattagtaatcaacatatataagcagcaactagcggaatggctaaatcttacctttattgataagttcttgaaaggaatatgtagctcacatggtgtccgctgagtgatgtcatcaacgggacaggtcgattcgtcctgtgtttgcatggcgtccatgctctgtgatcctacctgccccgttgaggcgcagctgctacggtttcctgacgggctcaccattgcaggaggaatggtcagctggggatcatgggaccgatgtgcggccatgcgttcatcaaccttccttgccacctccttttgcatgttgagttcgtagctcgatacccggaactctaggtctgcaatcttcgcctcggtatctttcttgctcctcatccgactcctggacgtgtggatgtcctccttgaaaccaattttccaaggaatcacccctttcccttgtgttcgtcctggatgctctggagtctgcagggcaagtgtcagctcgtccctatctctgtctggtcggaacgtgccctgagaggaggcttccactgcatctgttagtcgtcgcgcagcctctcgtatctgatcgccgaagaccagtgagccatcagctgggttgagcgttccaccgtgagcatagtaccagaacttcgatcgttccggccaattggctgttgccggttcgatacccctctcaatcaagctagcctccatctcctcccacttcggcatcgcgatgctatagcctcctgaccccaagtggtgatggtacttcttcttggcggcattttctttgtttctttccatcatcgcctgcccttgttcacctgtcttatatgcaacgaactcgtcccagtgatcccttagctttgggaatgtgtcgaagttcggtgtctgccccttcagtatatacttctggtacagatctcccttcaagctctgaaactgttctgccattttcttcagagtccaccttttcactttgtcctctgtacccgcaggaagggtgaatgtctcgagcattgtggtccacagcatctctttctccgaatctgggacaaagctctcatgatctccgcgtgcccttgttcttcgccagtacaccgtactgacaggcacgttatcccgcacaacccaaccgctgtgacgtacatagttcttggcggcttcggccggggcactaggacgtccatcttcttccacttccgttatgatgtgccgaccctcaagctttttcgctgcacctcgttgcccgcgtgccctcttctgtccaacggagggttgactaccactagcctcctcctcctggttcccctccacatccctttccacgtgcccctgctggttcccctccgcatccctctccacgttcccttcctcgttcaagtactggtttggatccttgttcccctcttcttcattccagtactggctgcttccctccgcgattgtatcgtacaatatctgttcctcatcgcggtcagccatctgttgatacaagaaacatctgctaagtcacgagacatttatgttttaacaatctaagtcatgtatgctaagtgtaaatgtcgtacattagaaccctacacaaccttacgtggtaagtctaattacaaatcgtgatataagctaagtctaggtgacgtatattatacaaccctagctagtaaataattatatactaagtctaattacaaataaaattatcttatattaaaactcaaataatattacatgctaagactaaaatagtcatgtatatgctaagtgtttcgtgcgtaaatgctaagtctaattaagactacaatagtcaattgctacttgtcgcaccaattccgtagtcaataattacatactaagtctaattacaaataaagtaatcttatattaaaactcaaataatattacatgctaagactaaaatagtcatgtatgctaagtgtttcgtgcgtatatgctaagtctaattaagactacaatagtcaattgctacttgtcgcaccacttccgtagtcaataattacatactaagtctaattacaaataaagtaatcttatattaaaactcaaataatattacatgctaagactaaaatagtcatgtatgctaagtgtttcgtgcgtatatgctaagtctaattaagactacaatagtcaattgctaggagtcgcaccaattccgtagtcaataatgtcatactaagtctaatttgcaataaaataatcttatattaaaactcaaataatattagaacactacacaatcttatatgataagtctaattacaggtctaataatcttaattaattgcattacaaatataacaatcatttatattattacgtcacttgcctcctccaattccttctagggctagctcttccactcaggcttgacggacgactccgacaacacgtcttttctgcaagatacaaaaagatgtattaggataaatgcgaagtaacatatatatatatatatatatatatatatatatatatatatatatatatatatatatatattgcatttcacgttaacgttcgctcgttcacgttcgttcgcttgttctcattcacgttcgttccctcgttctcgcttgtcttcgttcgattgttctcgttctcgctctcgttcgttcgatcgttctcgttcttgttcacgttctcgcggcaacgtacgttgacgtgttcgttctc

SEQ ID NO: 26773 - DNA, 6183 bp, Oryza sativa
ggatctttactcctggttgttctcaacaaccgggagtaaatatcttttcccgctatttcgaaattctttttaaacccggttagggttaagaaccgggactaaagattatagcactgcatatgattttcgcttacatatgtgtttataaaatagaagttaatgcattaacattatttaaagtacaaagattaatgacaattacttcgaaaaattatttttgtctgtaataaattaagtggataaatcgtaataagcaaatatatgacttataattaataaaaattccaatatatatatatatatacttagcatatatatgaatgatattattatattggtaaaaactctaattaagatatatatgtacatactgcatgatttaaaattaataaaaattgtaatcatcatatatacttagcgtaggaattatattaaattaaatgctaaaaactctaattaacatatgtaaatgccacatgcatgatttaaaccttttaaaaattcgaatagtcatatataagtagcatatgaaagatagtaaattaaattgtgaaaaactctaatatatgaatgatagttttaaaaatatattaaatttaatacttttaaaaattctccagtcaattataattagcatatgaatgatagtaaattaaatgttaaaaactctaattaacatatgaaattgccacttgcgtgatttaaaacttttaaaaatcctctagtcaattataattagcatatgaatgctagtaaattaaatgttaaaaactctaattaacatacatatgaaattgccacctgtgtgatttaaaacttttaaaaattgtaagtatcacatataactagcatatacatgatttaaacttgttgaaacctctaataatcatgcgtaattaacatatgccatacatcaattgatttatatggataatcaatacatccaaaatagtttacatcgtgtacacaataattacggcattacatcggcggtgacggttgaccgcacgtactttctcctcactattgttccctccttgtgatcgctgcgtgagtaaggggtgtcttcatttgataggaggatgctagggtcaatcgtcaccgtgaaagggggttgcccatccaactgatcgtaatcctcgtcagtcttgtcctcaactccgacgattttcttttgcctgggagaaccacttgacgcttaggctcatcaggccctctgcccttctttcctttgctagacatgtccttcacgaaaaagacttgcgttacatcattggcaaggacaaaaggttcgtccgagtatccaaccttgttaaggtcaacagttgtcatcccactgtcataaatcattacgcctccactagtcaacctaacccattggcaccggaacagaggaaccttgagaggaccatagtcaagttcccatatgtcctcgatggcactgtaatacgtggcagttgttccatcgtgtcccatggcatcgacacgaacagcgctgttttggttcgtgctcttcatgtcttgggctctcgtgtagaatgtgtacccattgatctcatatccctggaatgtcgcaatcgacccagacggtcccctcgccaggaaggcaagttgttggttgatcgactcgttacccatgagatgttgtcgtagccacgcggggaaagtatcaatgtgataccgtgtaatccatgcatcggacttaccgatgttcctggcgcgaactagagccaagtgctcctcgatgtaaggagctaccaatgaagagtgttgcagaacagtgaaatgggctttacggaataaattgttgtctaccgtcattattgttttccttccgagagttccctttccccgtagtctcccttcatggcgtgattcaggtaccccgattgggcgaaggtcttggataaattctacgcaaaattcgatgacctcctctgttccataacccttggcgatgcttgcctctggacgagcacggttacgaacatacttcttcagaacgcccatgtacctctcgaaaggaaacatgttgtgtaggtacataggcccgagaatacggatctctttcacaaggtgacaaagcagatgcgtcattatattgaaaaatgaaggtgaaaatatcaactcaaaactgacgagacattgcaccacttcattctgaagggcttctaatctatccggatcgatgaccttctgcgaaattgcgttcatgaatgcacatagctttgttattgttgcccggacattgtctggaaggataccccttattacaactggtagcagttgtgtcatcaacacgtgacagtcatgagactttaggtttgtgaacttcttctccttcgtgcttattattcgcttgatattcgtggagtatccagacggtacctttatgctctccaagcattcaaacatactttccttctctgccttgctaagagtgtagctggctggactcaagtaatggcttcctttctcctttggttccgggtgaaggtcgccgcgttgttccatatgcttcagatcattacgtgcttccagtgtatctttcgactttccgtatacacctaggaagccaagaaggtttacgcaaaggttcttagtgaggtgcatcacgtcgattgcgtggcgtacgtccaagaattcccaatatggtaactcccaaaatatagagttctttttccacatcgccgcgtgaccatcttcgctctctatatgctggcttccaggcccctttccgaacactactttaagatctttaaccatagcaaacactgttttcccgctgcgatgtttaggcttcgtacggtggtcggccttatgttcgaagtgcttgcctttcttccgtaccgggtggtttgctgcaaggaatcgacgatgacccatgtatacaaccttcctacagtgcttaagatacgtactttctgtttcatccatacagtgagtgcaagccttgtaccccttgttggactgtccggataggttgctaagtgcaggccaatcgttgatggttacgagcagcagcgctcgtaggttaaactcatcctgtttgtcctcgtcccacacggggacacattccttcttccacaactgtttaagatcttcgaccagtggtcttaggtacacgtcgatgtcgttaccaggttgcttggggccttgaataataatcggcatcattatgtacttcctcttcatgcatagccaggggggagggtgtagatacacatcgtaacgggccaagtgctatggccgctgctcatctttccaaatggattcatgccatccgtactcaaaccaaaccgtatgtttcgtgcgtcctttccaaattctttaaattttctgtcgatgtttcgccactgcgaaccatcggcggggtgtctcagcatcccgtcctgttgacgctcttcagcgtgccatcgcaacattctagcattccccttgttcctgaacaaacgccttagccgtggtattatagggaaataccacatcaccttagcaggaattctcttctttgttagctgcccgtcaacttctcctggatcgtcccgtctaatcttgtatcgtagtgctttgcaaacagggcatgcttctaggttctcatactcctcaccgcgatataggatacaatcgttcggacatgcgtgaatcttatgaacttccagtcctaacgggcagactatcttcttagcctcgtacgttgtctcgggcaatttgtttccccctggaagaatgttcttgacgagtttcaataaatcgccaaatgccttgtcactaaccccattttttgccttccattgcaacaactccagagtggtatccaactttttgtgcccctgctcgcaacctgggtacaacgaagttctgtggtcctccaacatcttgtccaatttatgggcctccttttcactttcgcagtcctccctggcgtcctgcaacatctgaccaagatcatccgcaacgtcgttaccatcagcagctatttcctcctcgcccgtttgatttccttcaaatccaacatactgagcaaagtccggaatattggcgtcttccacttcatcttcttccatttcaacaccttgctctccgtgggatgtccaacaattatagcttggcatgaaccccgactcaaacaagtggaaatgaatagtcctggatgcaaaatactccttctgatttttacacttattgcatggacaacaaataaaacccctttgcctgttagcttcggccactctcaaaaaatagtgcacgccgtcaataaactctttggaccgccggtcagcgtacatccattgccgatccatctacatgagtcaaaaaaaccgtacacaaataattattcttacaataacgacagtcatacaataattataagatatctttattcatacaaaaatcataaaatattacaccaaataattcttaaaaactatttgtaaagttttaaactaattttaatgtgttttacttcttttaattttcattttagtttgttttctattatttaagattaactttcactagagttttccttctcaactattttataaaaccttgtttagcaaatgaactaaatttctatatattctttcttccccacacacattttctctctcatcaacttacaactaaatttttggagacaaaaaaagtgtgcaaaacataggtgcaaatgtagtatgacaaaaaaaaaacattggaggatgaagttgcaaaccttttaggcacctccgatttgtatgtaatcaccaaaataaatttaatagaaattttggcatgacctcccctcttttttgaagaaattttgaagcttgctcgggcagctggaggaggaagaagacatatatatataggggtgagactttagtcccggttggtagcaccaaccgggactaaagatcccggggggggggcctgacatgacctgacagcattcgaactgggactaaagatgatctttagtcccggttggtaacacaaaccgggactaaaaatcaaatatgcccgttacccttttgaaccgggactaaagatcatctttagccccggtttttattacatccgggaatattgtggaaatcggccgaccgacgaaagatggtttctccaccagtgaatggcatcgaagatgtgccggttagacagcgccatactatcaaagacctcgccaacgctttgcaaatgtcactacaaagaaaacaatttttcatagcgtcactataattttccctgacggttatatgctaaaaccgtcataaaaacataaggaggggtgggggtataggaccgccagtgaaaactgattttctctggtggccatgttaagacgtccgccataaaaaatactctatttttcgaggcggacctcttaagtatccgccagcgaaaaccaatattttcattggcggttactaaacagttccgccagcgaaaaaacagagcccgctaaaaaaatttgacgacatttaaaatctgcgcgggctgagatattttccctcacccacccatatagcaggccaaacgggcggcccggcccagcacgacacggcacgccgacggcacggcccactacggcacggcccgttaggcacggctcctgtagcgggccgtgccgtgccggcccacgtgccaaggccacggcccaagcacggcccaagaaggtgctgggccgtgccgggccggcacggctactgtagtggcacgtgggctggtagccggcccactagtacatgtggcccataaaaattgaaatttgaggggaaaaaaagaaaaaaggcagaaaaaacataatataaaggaaaaaatgataaatataggataaatgtgaggaaaatttaggaaatatatcataaaatatatggtacaaataggataaaatgtggaaaaaaataaaaaaatatgagaaatatatgggaaaaattagaaaatcgtaaaaaaaataaatgggccggtgggccgtgccatgcctgggccgtgccgtgccggcacgctacagtaaacgtgccgtgccgtgccagcccacgggctgaggcatcggcccaaacacggcacgggataacgggccgtgccggcacagcccacaagctggcgtgccgtgccgggcctgggccggctacagtactgccgtgctcgggccggcccggcttggcacggcccatttggccaggtatacccacccacccg

SEQ ID NO: 26774 - DNA, 5267 bp, Oryza sativa
ggccttcccatcccctcctctcccctctcccatatctgtccgatgggagaagcccgccgctggggaggacgggcgcggggaggacggatccgccccggcggcggctcgaggagcacggatccgccccggcggtggcgcggggagcacgaccgcggggcctcgacctcgtcacgaccgacgccgtcgggccgcgggcggtggtgctcggatttctgtgaatttatgtagatttgtgtgcatttgtgtggatttctgttgatcgtgaatggaaaatatcggttgatttgtgtgcaatgtgaatggaaaattctgactgtttttattgtaaattgttgatgtaaatttatgtgaatttgtgaatcgaggagtggatttgggaataatttgaaacggtgttgacggaggcaaacggagcggtgttgctctgtcattttttttaacttgggccactattttcgctggcggttgttataacacaaccgccagcaaaaattgtttttcgctggcggccggtataacacaaccgctagtgaaaatcgattttcgctggcggccgataaccgctagcaaagattttgatcttcactagcattccgccagcaaatctaaattggccgccacgaaagatggtttttgtagtagtgtgttgaaaagcacattgcataggcgtttgaaggaagggaggtttaagcgccatacaaatgccataaagttcaccttaactgaagataatatgaaggcccgtgtccgattttgcatacaaatgcttaatagccaaagcataccggattagttattgctttgctaacataccacaaaataaagtattatgcaagaagacaggaacagattgttgataagctaacatctcaattaagttattttttaggattttacaacttgttactgacggaggaagtagttcttactttgcgggcacacactagaaaaccaaagtacaagcaaagcgattataatatatactctgtacagaggataatgaaattgtaatgcaaagattaaaactacaaagtatagcatctgggtgaattttttttttggagtagtttccagaagtctgaagtgaaattcaaacttttttttttggcaggaaattagcctgtcaccatcatcaccaaaagacgaccatagagtgagtgttgactagagcacaaacctttaagcgcgtaaccaatggtgagaaagagtcaactgaaatgcctaagttattgaggtgaattttccatagcaattgcattgaactcatcatcatccttcaaataattcatccaacaactccttcaactgctcgggcgtggacttgggcggttgattgtgcattccccttgctgctcgctcctctagatacatgctatagtgtgtgacgactttctggacgatggcttgacgcagtctctgccgaaggtcagggtttggaaccttccaaaacttgtgatttgtgtaggttctttggaattctgactcaaacctatcaagtgacaagtatcttcgaaagccgaaaggtttgccggctcttgtctttccaagactaatagaagggttttcaatgaacaggcaactcagcagaggggaccaggagacatggaggtaagtatctatgtacctctgtgtcatgcttgtttctatcagggccgaagatggcaggtccatggattcaacgcggcgcaagacaagctgccaattgttgagcaagaatatgcaccgcaatcccgggtccgagatgagaagggatgcttcctcgagcttgctcctgaggcaggagatcatatcggtgattaggttcaccaccgcgttgaagccctcggtgtcggagatgaacaagcggaagtggtgatcctgtaggatgaatttgagcacgtctccgttgcaccaaacaagtgcgatgtagttcatcatcagctgcgtccggtgagacttgccagaaggtgtccatcaggaaggatgcccgaaccttctccatcattccccagatagcatcactcagcttggacctcttccgcgagaagatgccattgatggcgtcgtcaaatgccggccccggccgcgcctcattcttcccggagccggagccggaggacatcggatgcctctttgaagaaggcgaggacggttggcgaggcgtcggagaagcagtcgtagaggtacagcatccccgggagcatctccggctcccggtggcggcggcggtggtcgtcgttgagagcggctagtgtgatggcgtcgacgaaggccagcatcctgaggatgctcgcctccgcgaactgcacaacctcctgcacgcacacgaagtccggcagctccggtgccggtgacctgttgcctgccgatccctttgtgcgaagcaggaaggcatcgtcgtcgtcggtgccggcgagtgatgacgacgaccttctgtctcggagctcgagcagcgtcatggagaggacctgcaccatgattaggagagctctcatccaccgctccatcaacgccatcaaatcttcgacggaggaggagtctagatctctttgtccggcgtggaggagcagaacccactcgacgtccagctgcgagaaccacttgtggaggagagcttcgtcatggcggcggcggccgaacgcccggatgagtccttgcgtgtagttgtcgcggaccatctggtggagcccggatgacgccgccggagccggagaagctgaccagcggccgctgccgccgccccaaggggatgacatgcaagaagacgacaacgtcgagggcgccgggctcgaagccgtggagctatcgctggaccagcctaatttttctccggcagcgctgctgatctgcgggaagaagaggccgccgcccctcctcatcgaccaccgatgctgatggggccgcccctccaaatccatgaacgacgccaaggcctccatgaacgcgtactgtatacaagaatgaaatctgtgatcgatcgccgcgagcacgtgcctccccgggccgatctcgtcagtactatatactatactactgaggattttcctcgacctcgcctactctacctagccaattaatactacttgcctattaattacttatcggctatcgcctatcgcgtcgcgtgccaccgtaaacacgtcagtagccgcggaaccctccatcgcgacgtacgcgttaagtatcccgcactccgttaggaacagttcatggtaattagcctctcggtttgggtactgctacacgtggtgacgtgcatgctgattttcctcttagacattcatgtctttttctttcttcttataaagttttctctcaaattatttatctaatctacaatccgattacaccattgtgttcgttataattaaatcttcacagcaagatcttacatgattatattacgatgaaaaaatatttatatttgtaaattacttttattatatacgtaagttacttttatcatatagtatataagttacttttagatttgactaagttacttcttagacatataaaagtaaattcaataaagtctaaaagtaatttacatatattataaaagtatcttaaaacaaaacggaagtaactttgtaatgacattagaagtaaattcgttgcagggataaaaatataactttatctagatattaaaattaatcagcacagatcaacacgcgtaagtttaacaatttttaaaagtaacttcaatgttaattagaagtaacttttgcatggttcagaagtaactctctataaatctgtttaatcactgattgtttttttcctttcatttttgtttttttttatgtagaatgagaaaagaagataaaaccgttgatggattgtaaataacattgatagaataaataataagaattaaccatgtataagatgtaatagtttctttataacatgtaataaattacttttaaattaataaaatgagaatattttcaatatgaatattgttttgtcacatattttgagtggagtaaaatgatgcaaatagatcttaaaaacaatatgtgatttaaaagatataagttattaaagagattaaaaaaagatacatactattatactattggagtacaaaccagcagtcacgtccaatgaaaaaaggcaggcattaaagttactttctttttgttataagttacttctataatatatgtaaaatacttttaagctttattgaatttacttttatatgtcgaagaagtaatttagtgaaatctaaaagtaatttagatatattataaaaataatttataatttttcatcaaaatataatcatgtgagatcttgttataaatatttaattgttatgaacacaacggtgtaatcggatcgtagatcggatgagtagtttaagataaaattttatttgaagtataggtggatagagtctctcatagatggagtgacaaaccagctacacgtccatatcaaagtatgaccgaattaactagcttctctttcacaactactcggcgcatcttaatttggctgtgtttagatccaaagtttggatctaaacttcagtccttttccatcacatcaacctatcatacacacacaacttttcagtcacatcatctctaattttaaccaaattcaaactttgcgctgaactaaacacagcctttgtaggtcggtatgcatacacatatgaattggataggaaaacaaacaacacagcaaaattacagcgaacacaaaaagacttgcgcgttaagtatgacggaaaacaacagttgaaattaatatacatattaattgacagcggtcgcaagagaggaggataacaaagctaacagctaattgaaagggacatcactcgcgtaatgccacaaagtctcccagttaaacaaccttggaaaaggctagcttgctgcaacgaactcagcagaaaattacaaccatatatacgaaataaagggaaggatctcaggaagctccctgtcatgtaccatcgaagctgagaaattatatcttactatcaagttacaacccattaaatcttaaaattcaatataactcttcgaaagaagagtgtggtggcaaggttacagatcgatattacagctcgattacatacaactaggtggtggcaaggtttgatgccgccagtggcggagcgacatgccgcgcactggcacaggtggttccatagcttcaccgtcaagaaaatgagataagcggtagctttaccacgacttggcttggccatacaaagcctaggttcaagcccgtggttagatgtttgtgtttttttcaaaacc

SEQ ID NO: 26775 - DNA, 6500 bp, Oryza sativa
agggagcacatcgaacacctacgccataatgaacagtgtattttcctatttatcccgattttagtttattttccatataaatttgattctataatttctaaatcttgcataaatgaagtttactcaatatttgtgttatctcaactaatgaattcaccctatattaatattactcatattttatttgtataatttatttgaatttttaattagggttaattcttgttccattgcatttaaatctaattaatacaaatatggtcgcgatgatattttatttatttctatccttacataatctttattttaaattataatttatttatttctttgaccaaatctaatttcagggttgattcctaattaattttcccctatttgtgatcgatgagttccgaaatcaaaatctaataaaatcatcgaataaaattggcatgatgcaatttgtttaaaaagtttttgaaggcccatatttttagagtttagatttttgtcggtcgaattttcagggtgttacagaggtcgatctcgatgacctcaaccttggtggcgaggccgctgagagagaggaggggcgtcgccgccaaacgggctagggttagggttagggtttgcgcgaggaggcaagccatcgaggaggggggaatggagggatgcggagattgggacgaacgacgacgacgacggcaatgaaagggcgaaggggatagggacggggggagagacgagagatgtcagatgccgcggagatgagaggataatggggttagctcacgtgataggtgcgtgcgtatgtgggcccccggtgtcggtgtgacaggggcgtcgatcggcacatcattgttagccaaaaggcctacggcccgacccatggcatggagatttggcctggtctaggcacgacatagcctgattgttgttgggcttgtgccggcccgacctgaccaacgggctgtgcccgggcctcttcctcggcacgacgggcccaacaacagggaggcaaaataggcttattccaaggcacggtccaaagaaatgaaggatgtaaaatgggcttatttctagccatataagtcacggtctaaagagatgagggaggtaaaatagatttattctaagatgagcatgatgggctggtcgtgctttcaggccgaactgcatggcccgcatcttataaggccgtgcctgggtcacaagtacaacctgtgggttggcccagcacggcacaaagagtatgacgggccgtgtcagcctgacatttgccttggatcgtgctctagctagtcgtgtccgggcgacgttgtgcttggtggcccatttgacttggtgcattaggaatcattgggatcaggtgcagtgcatgcccatttgcccgtttacatattgatctatcttgttcatatttttttaatttttttcataaccatttagatgatatgtaataaacgggtggacgttcactcgagctgttaaaatagtttcccggtgcaatttaggcagccgatcaatctataacgcctacaacgtatcaaacggatgagactaaaggaaatatgcttcttctcgagatcatctgcttctcctatctattcctttttcttttgcatacttcgtcacttgaagcaataacaacttggccaagagaaccccgcggttcaattatgaaaacgggccgaactcatcacattgttcaattccatcaagattcaaggttgattggggtttacttgtgctcctcattggtcaaagcattctcattctacgctactgagttccgaatcgttcgttagtttcatgcgtaagagcaagtacaatagagcatagtccgcaggctataaaaagtaacacatcatccaaatacacatgtggaggagtaagaaaattggagagggagggtagggggcgctagcgccaggctgcgcaagaaacaatgtaaatcacgggtaagtggtaacggtgcaaatcaatgaaataagtaaaccaaaggaaaattttctttcctacaagttatagagagaaaacataagaaattttacatccactcaaacctccattttttctattcccatgttgaaattctcaaaacaaataggccctaaactgaattagagctattacctatctcgaggacctgatccactataaaagttcatgtttcccgtcctcttccaatctcgcgtataccttggtatcaatgcaccttacgtccttgaaataccgttgttggttacattacttcgacaaaaacatatgttcaacggtcagctgctttgggcctatttggtacatcttctattctgagatccttgtctcctatagttcctatagttaaagttgtaccaaacacttctgagattatatataatatgaaccagggttaatggattgactcgacaaaaaatggacaatgagaatggagcgacattccctccgctcagcccttggagtaggaggtataccaaaaggtcccttcgtctatttaaacatagatgtaatattatattatatattttaaaaattacaatgtaggttttatgatttctattgtaaatttaatttagaataaattttacgaaactacaaatactttgaccaaagtatcacaaaactagatatttaagaatgtgtatctaaaactacaaatttagcatgaaatttatcatagaactacaaattttagagtttatatccattgcactattgagattataaaagtttaattttgtgattaaactgatgttaaatctgtagttttctgatatgaaaccttaaatatgtaattttgtgaaaaatacaatttcaaatctttagtacatgtagttttagttttgtgaaatttactctttaatttataatttaaaaaaatgtctgaaaatgtggcgctataatttaataaaaatgcttacaatcggccgtccgatgtgaggcgcaaacgtcggacggacgcgcgagccgttcgatccgctaggaacgacacgagactagcaggtagcgaaccttatctcttcatcgctcattgtcgtccactcatttccctcaccctttcctccctcctccccttcttatctctctcttctccaagaaaccagagctgcttgcaagtccaagctcctaggtgatgcaagctccaaggggagagggaggtctggtcggcatgcgacggtagcgtggtcgacactggagtgggaggtctggccagcgtgcgatggcagcgtggtcgccgatgtcgcctaggcagcagcaagctcctaggtgatgcatgcagcgaccctacgcgtcaagctgaccaaccaggcgatggcaccacttcttctctcgcgttcaatgtgtcgccgtggaggccggcaccgtcatggacgtcgacgcctcaccaccgggagcatgtaggggagaagtacaagaacgggtgtgttgagatttttttcaatgtttcagatagtttagtttgatgtttctttgggttggatcgaatgttgcaattggattttagatggtgttccataactttgctccttgatgcaaaccaccaatggaaatttgttgtttcacatgtgtgaatgaaatgtttcggtcatgacttgaatatgtttcagcattttaacaatgtgaaacatttttttctagtggtgaaacattttcgtagtagcgctgaaagagcgcccaattttttattttttgatgtttcaccccatgtaccataatatagttagatttaaaatgttccagtgaggttgtcagtagtgtttcattcttttttttcgtcgtagttggatgtgtttcatgtttcattttgtaccgtgtagtaaaatgttttattgcgtgatttgattgtgtttcactattttttttaatgaaacatatttaggagaaaaatcgagcgcctgatttataggtgcttccgccggcgacagagagaaccgctggtggcagagtcgtgccgcgcagcgccaatcgcgccaccgagaagatcacttcgagctagcggtcaacgggtttattttgttcgggacgttgcaaccgcaaggcagggtgtcctgtgcacacttttaatcgacggctaacagcgtgcgcgcagatcagacggttcatatatacgtctgaattgacgcgtagcgctctccatagtttggtccttgtaatattgtgctttactaaaatttacaccatttacaaatatcaaatataactacaggtgtgtagtgcacatgcacatgaacatgcattgtatattgacttttctataattgtgaaagttagccatcgaatagtactataccgaaaaaaaaagaaaaatccatctgtcagtctcacatccggtcccacatgtcagtctcacgttgctgctctcgtaacaaacacggattacacgagctcttatatatatatttgactcccgaaatctcgacgcttacggcggcgcgcgactactattacggcgatcggatctgctcgccgccgccaccgccaccgccgccgctgacgacgacgacgacgacgactgagcgagccatggactatttcacggggacggggactatcgtggtctccgacgacagcctctacgccgccttcggctacggcgaccccttcggcttcgccccgcgcgcgaggcccccgatccgttccctgcccttcgccgccggcggctaccagtggtgcctctggttccaccccaccaccttcgccggcttcttcggcttcggcgtcgagctcctcaccgccggcgccaaggccagggcgtccttcgagttcggccccgtcgacgccgcctcccacaacgtcatcgtgcggatgccgcccttcctcttcgaccacccccaccaccccatggtcatcatggtctggcccaaggccatgctcgccgaggaggcgacactgttcgtccgcgaccacgccgtcgtgttccgggtcgacgtcaccgtcgtcccggacgagccgctgcctccggacgccggcgtcggcgacgacgacgtgctgccgccctcggacatgctggcccagctcggcaacgtctacgacaccaaggagggcgcggacgtgacgttctccgtcgacggcgagctcttcgccgcgcaccgggtcatcctcgccatgcgctcgccggtgttcagggcggcggtgtacggcgagatgagggagagcggccgcggcggcggaccgatcgccatcgacgacatgcgccccgacgtgttcgacgcgctgctccgctacatctacaccgacgccctccccgccgccgccgacgacgacgacatggaggcaacgtggagcgacctcctggtcgccgccgaccggtacggcgtggagaggctgaagctgatctgcgagcgcgcgctgcgcgggaggctcgacgccggcaacgtcgccgacatgctggcgctggccgaccggcagcactgcgagacgctcaaggatgcttgcatcaagttcatggcgacgtcggggaagatggaggaggtgaaggcgagccaggggtacgtgcagctccgtacttcttgccctttgctcttggtcgaggttttagagaagtcaagcaaattttgcaaaccttaattactaggacaactggacaattgtacagattaataaaggtagtgataagtggatacaatatgttataatgttggtcttttggccattatttttctatgccttacggaatacgtactttaatgaaaactgaatactccgtatgtaaaaaaaaaaatccaacctacgtaggaatatgacaatgtgacactacctaggacaacggatatgaacaaactgatccgcagctaggttggttttccttggaacggagagagtacatcactttcaacctctgcatgttctattctttcctctctcatcctacctcctttccccaaatcccccattccgttcttcctctgctaggcaagatgacaagatgtagactacgcatgattaccaccggcatcgagtgacctccaggaatgcctgattctcatttatatacagatggtggccgatagagaaacgggagccaaagaccaaatcggcgtctaccttgagctcatcaccaagggaaccaaggcgagagcctcctacaagctcagactactcaaccatgtcaccgcctgtccttgcttgtggtacacctgcccactcaaaatctatgactctatcgatgataacaaatctttcacctggggaaccaagaaattcgctgacaggagcaagctagaagtcgcatcggagtatctacaagacgttcgcctcgtaatcgagtgcgatgtcatgccattagtaaggatcgaagcgatcgcggaaatcatccgatcaccttcttctccttggtcgcaactgtcagaagacattggcaagctgctagagatggagaccggacggagccgacgtgagcttcaaggtcaacggtgaggccatcgacgcgcatagcatggtgctggtggcacgatcaccggtgttcaaagcggagctcaacaggctgattagaggcgagagagggctcaagataa

SEQ ID NO: 26776 - DNA, 17074 bp, Oryza sativa
tctcgcgcctcattggcccatggagctccactttgaacaccattgatcgtgtcgctagcaccataagacgggccaatgagagggaagagaaatatctcggtgaagaagagaggaaggagttgatcaagcatttgctcattaccgtggatcgctatgctatcgaggggttgaagacgatgctcgaagacggactctgcaaggtccttagcttaggcaacgtcaaggagatgtttgccctaactgatcagcatgattgcagcatattgaaggatgtgtgttttgaatttatcacctcctcatcggtccatggattgggcgatgtggctttgagtgaagggtatgagagcctacgagaatcttgtcttgctgccatagtagatgccttacagcgagtacaatagcaggctatatgggcagtcctaatcctccacctaggatggtgtctatagcattaactacattgctatgtaggacttttagcttatgtggcactatattaattgagagagagagagtgaagagaggaagaaactgggtcttatgcaagacacagcttcaacacgagaacctatgcattagacactatcaagttttgcattgggagagaataatgtcttcctaatagatgaagaataaatatgattggtagagaagagagatgatgtatttattaatggcccactttaagaaaccatgggttgtagagtagagtgtagtttctattgtgatgtcttattgacatggcaccatagacactgcttatgggcactatgggttgggactgctctaagtcagctctaagcacacatggaggagagaagagaaaagagagaagaaaagcgggctacagatttgtagccagctgcagcacgaactccaatacattttgtgtgtatgagaggtgggactatatattagtgatgtagtatatacttataggtaactattatatgaatgagctattagattggctatagatgaattggagcctattaaacttgccaccatacgtaagagacaatctgtacacaaactctagaggaaaatgatagtattaaattaaggggggttgtgatgatatggattaaattagagttagcaaccactggcctctattttatataaaacttgctcttttagagtacttcatatttctatttgagaacggtagtatcagctcaagaatcaagacagtctgtgttccttccacaaggttcccaacctcactcctccattttccgcgcgcacgcttttcaaacagcttaatgatatgttttttgcaaaaagtttctatacgaaagttgctttaaaaaatcaaattaatctattttttttaaaaaaatctaatacttaattaatcatgtactaatggaccgctccatttttcatgcggtggagttgagttcccaaccccaaggatcaaacacacagtcgtgcctatatttctgaagagcgacttcaactgaataagttgagaggaaaggtattgggataatgtgctgggggtagggatgaaaacggagcggatacaaacggataatgctcataccatattcgttttcatattttttgccggatacggaaacgaatacggatagctcgaatacggaaacaaatacggactatcttgaatacgaataagaatagaatatgatcggacacgaatacggaaacaaatttttctcggaacatgaaaacaaattcaacttctaatagaaacaaatatcaacatatataattagctcattttatataaaatgtagtataatttataaatatttttaaaattttaaataatattaataatgtggactaatgttaagagatgaactactattaaaatctaaaaaggtatattgaaggtcatagagttataaagaaatgagatatgtcttgtggcttctgcggatatccgaataacactgtttaccggatatccgaattattatccgtatccgacggaaaacctgataccatattcgtattcgtatccgagagaaaatatccgtatccgtatccgtatccgaactatccgagaattatccgatccgaaaggtatccgtattcgtttttatccggagcggacggaaactatctactccgttttcatccctagctgggggaaccgatcctagtataggctcttcttacggcttttctatccagtggatcgacatggctgttgttgtatgtgatacagtaccaagagcgatacatatagggtacagggttcactatattggtttagtgttttctactggggtcaccgaaatcctaaaattttaaaaattttggaatttcggtctgaaatttctgaaattttaaacaaaatttagttgtatttaataaatattatccaaattcatgaaaaaaaattgaaaaattcaaaaatttcggccaaattaatatcgtatcgggggtcaccgaaatgaccgaaatttccgaaatttctaaccctgatagggtattgcctcttctttgagtgcgtttatgagctacagtacccaaagcttgaacaaccaaaaccggtcagcatgtagatatctacctgctactggcatatttttgtttaggtaatggaatttattttagcctttgcttcagaaaaactacaaccctttattatagagtttgcaattcgaacgtgttacatatgtcagttgatgcatatatagcaagaaaactaattgggtcactatcctaaagacatagcatactttctatagttggcgaaaaccctacaggttgcatatacttattagcggatctagaaatatttttgaacccgagcaaacttcaatttactaaagaaattctattttaatttttttaattgtatgaaattttaatggattccccgctgacgagcctgggcggttgctcaggatcaccgggcgatagatccatccatacatatacatgtagtccttgctctaatcaaactaaaaactagatcgactatccaaaatcagtgcccgaccgttctatcaatctaaaactcacatcaccgccggcaccatcgaaccgaagcggaatgtattcatcgaagtataactgcattacaaattaaccgctcgtccaagcgtagtcgctaaatgtagacggtgaccatcaactggttaggttcttgttgtgaaaccaacccaccttccaaacatagtcgcaaaacgtgaggaacaatagatggcgaccattaaccggtcctattggttaggttccttgtagtggaaccaattcacattggttcaagttctagacgtgatacatgtactcacatttatgattatttatttttcagtggtagacgacgtagcgtgctgcgttttttggtcgccgatggctgctgctctcgctattgtgcgatgcgaacttgcgaagctaaatgataggcgatcgaagaaaggcgaggcatcggcgttgggtgtgttgcctatatctgatctctctcgatctctcgttaatgggctgaaaaggcagaccattttttactaatgggcttaccagtgagagagaaattggggctgtcggcccaaatctaataggggtggggggtgtgtttgcccacctcgccccccctagcttcgccactcgaaggtgaaggggacgtggtgtctccatccacgggacgatcgcccctcgccgttattaattctagctgagctcgagctctaacgacctcgatctcggcggcactgggcagattacactagtggagaaaccatctttcatgagttggtcaaaaatcacaatagttctggttgctcaaaaaaccgagactaaataacatttttagtcccggttcataagtccaatggcactttatgatatttaatctggttggtaacactaaccgggactaaatatcgatcaatagctgttaggccatgtccgccccctaaccggaattaaaaatcatatctttagttccggttgatatcaacaatcgggactagatatctttctcccacgtcctacctcgagatgcaaatcccacgtctttatctctctcccacggcacgattgaccctagaaaaatgagagagactgagagacctagccacgtccttatctctcttgtctctttctcttctatcgctcgctctctatccgtcgatcccctcctctctcgccttcaaactaaaatatccttatttgaaaatacaaggaaaaaaaatccaaactaccaaactactaaactcttagactcctaaattactaaactacaactaatgaattccacaggcaaaacctcgagtgtatactagcctagaaaaactcgtcgttgccggtgacctcgctatcttcttgtcttcttgttagtaactgcttcaagtttgactaaatttgtagaaaaaaaataataacattttcaacccaagacaaatttattatgaaaatatattcaattatcgatttaatgaaactaatttggtattataaatattactatatttatctataaacttagtcaaacttgaagtagtttgactataaccaaagtcaaaacttcttataacctaaaacagagggagtagatgatagcgatggacggatgagattatatgagacggcagatgaacggatgagatgtgatgggatgatttgactcgtaggattgctaggggtgaactcctcctttttatattagtatagattgataggatcacaattctcaagttaacaacgctggataaatcacttgcaactcaccggcttgcgacattgaatttaaatatactggccaagagggcatgcgttgcaacggaaaacaaattgagtttatagcttattaactcaatcaatcgcatatttaattcaaatagtacttttatgattttccttattaaataagtaggtgattttaaaatttttgggagagccaacaatgaaaagagaaagaacttattggagggtggcgtaataatgtaatttgtgggacccaaatatgagctgtaggcgtagtgtggtagaacagataccactacctctaacattacatttatttaatgtaacataggttgttgttgactttatttaataagacttttaaaatttttaccatcaataattctcaaatatttagcttgcagaaataaaaataaaaagtagaatttttatagttacttttacaatatacctcttgaaatttttttcattcaattcatacattttccctatgttttatacaactgtatttctatgaaaatattttcttttacaattgcgtgtttcaaaagaaacctttatcattgtgttagattttgttgttatcatcacatttatcaatatcacaaattcaattgcaaactaaaaaaaaaatcacaccagtaatacatagcaaatcccttaaacatatggcgctattgaataattcatgcaaaattttgaaaccttgatcactaataattctcaaatatttagcttaaaaaaacatattgatagattttcataagaacttttgttaggctaccttttcttggtagaaaaaacatatgattcttggaggattttaaatcctttatggaaaatttctaggaaaagctctatggccccatcgtttggcttatttaggaaataagccaaacggcatatttacaaactaaaaataatttataaataacgtgttcttagcgattcaaaagtaaatgctgaaaaataaactttattgaaaaaaatcccaaaattaacatcaaatttaaggttgaaaatttaaattttcattgataagcataagcgtaataaaaaaaatgaggctactaatctcttggattatttttttcaaagtttacctcaatcatgtgcttcctatatttttccaacggtctatgatcttttctccttttgcatttttatgtgttatgcagttacatttctttcaaaatcttgtgtattttttttctcatttatgcttttttttcatccttcatttcaaagtaagtgttcatagggtgagcacgtgcgtttttgtactgattgaatccaacgctaatccccgcgcaaccaactccagcgagcgaggcaaaggaggcatgcggcggcgcgcattggactagcggagagataaagagagaagagaggggcttgggtaagagacggcgatggtggcagccgcagtctcggtgcaaatccagcgacggggtcgagctcaccacccggcggagaaaggtggagctaggggggagtgcgggttacaacctcaaaatccaacaggcgcgctactgcgggagctagaaggaagcgggggttgcaaccttcaaatccgaggaccacatcgcggccggagcttgaggggagggtgggtcccttgcagcctacgggggttgggacgggtgatgttttccaactgatcacctttgtggggcaagggcccaggggagggggtgtcgaaacatgatttggccaataataaacgggggtagcgcagagaccttaaaagtggaaggatgtgaagacaaaggatttagacaggttcaggccctctcaatgagaggtaataccctactcgtgtttagggatttgaatccgccgagtgtgtattgatctgacgatcaggttgtttcatatatgccccctagagggcctcctgcccaccttatataggatggggggcaggattacaagatagaaaccttaaccaatacggtatcggtttcctaaatcaggactttaggccgttccgtaatatacaaggaaacgtaacacccaagtcatgatctgttacatattacatagatataagttatcccctataactagtcggataaccataccgtgtgggtatggggtacccataatctccacagtagcccctgagaccttcacagtcggaaagataaccttctctcgaactagattactccaaagccgagtgcttcaatcatcttcgccatggtctcccgagtacttttaccaaatctgaagactgtggagggctgaaaaatatagtcaggtgcatcgactagatgcacctaataggtgtaacccccgactatgtggttaatcgaacaaaccaaacatatagtcaaggaataaataatccaaccaaccgagtggtttttgataattatagtcaaccaagtgacttgataccaatatatagcatatgcggtgtgaatccccgaataatatgattcaagtgatataccgactgcttggcaaaatatgatgcgtacaacctaaagttgacaacatctttgaaagttcacatagcaaaacaattataaagaagcttgaatgctgtgaataaagaaatttccaaagtattgggcatacgccatgcgcacactgctttaacagatgtgcttaagtccctaaaagacacatggtttcaccacacctggaaatatatggcatatatggtataacatccgagtaagtaaactcataaaggatttaccaaccgcctgaaaaatgaccataatatataatcagcctaagccataatattggtcaataaaaatgcacacttacgtggcaaaaagcaatgatattgtatccaatcaattgcttgataaacccaaacagcaccttgactatataaaaaagccagcggggcagctatataaagctttactgtttgacaccttttaagatgcattgtaccaactcctaaaaagtcgagtaactgcggtataaaaggattttaaggtattgggcacttgatcacgcgcactttggcctaagcgaaaagtgcctaagtccctaaaagaacgtgacaggccacacctgaaaatatgggctgcagacatattaggcctagaccaaaaaatatgccttcgacaccctttaaaggatgacgcatgtaacatgctctcgagtaataaatcttccgggtgatatagaccaggtgtagctcatatgaatagcttctgatctgagtgattatcccttatgagatactccaaaatatatataataattgaatcccgactgacgcaagtattcggttgatagcccttacggggaataataattggtccagtctttgagcatagaaaatagactcatgactatgaatccatgtggaatgtatccggaacaagtccaaattggagatataatcctcacgcttgagttgatgagcccctgagcatatagcttgtccttctgtcatagtcaaaattgtctattggcaatagctgacgcagtcggcatggagatgaaatgaccaacatgaagacgaaattgctcatcagaagtaacggaagatgtcagtggtagtaaagatgccaccaatcaaatgtaatgaagttgcataaccatggaggcgaagaaaccagtcggcaacagtcaggtcagctagcagtgaagatgtaggcgcccaacaacaacgaaagaacagtcggtggtgacaaaagcaaaccgacgatgaagacgtagacgcgcatcaacggtgatggcgaaatccaccaatcatgaagatgaaggaaataatcggcggcgacaaacgcatccgacggtaatgatgattagcggcaacagagatagccgactatgatgacgaagtttcccatcaacggcagcagagtaggctatgttgatgaggcttgacaagatgttgatgaagatgacgatgtcggtgatccagtcaatagcgatgtagcagccgatgataacgatgagatcctctatcggcagttgcgtagtaggccaaccgtgaagacaaataattggaggagagttgatgttgttgcccaactcgtctaaaccgaaatatttgaagttgttgaagtagaatgtctgttccgaagcaaagatgaagataatgactcctggagttgactcattggctgattaattgatttcttcagcttgacataaaatttgtcaaattttgagccttatatttgtgtagcccccgactctttggttagttgggaaacaactgaacatagagtcgagaattatagcttcttgtcgtcgagtagtcattgcttgattgaagatatgtgttgaaggtgtccaagtagaaatcctgaatattggagagtcacttgttgtagtaaaatatcatggcattgcatgccgagatgtcgaggttcacaaagacgtcgtggttggtgaagtagtaaaacttgcgaaatagcagcaatagagtttgccagtgccgaagataataaagatgaagtcgctccaccatgatgacaaagttgcatcgccgtgatgaagtgaacacgagtcggcggcaacagaagcaaactggtagcgaagacgcgcagttgtgaagataaaagcactagtcggcggcggcataaccagtcgacaacggaagacgatgatgtccatcagtagtggtagctgtataaaccagacgttgaggtgagggcactagtcagcagcagacgagacgaccggcggtgaagaagataaggccaatcaatactggcagaatcatgcagccatggaagtgaagaaaccagtcggcagccatggcaaacgtaggcagcttgtgttgaagatactgatgcctattagtagtgacagcgatgtagccagccgtgaagaagatagcatcagttggcgttataacaggccagccgtgcaggcggtgacaccagtcagcggcggatgcggcggccggtcggtgaagacgtagacgcccaacaacggcagcataataggccagccgtgtaggcggaaacaccagtcggcggcggtcgaggcggccggtcggtgaagacgtagacgcccaacaacgacggcataataagtcagccgtgcaggcggaagcaccagtcggcggcggacgaggcggccggtcggtgaagacgtagacgcccaacaacggcggcataaaggccagccgtgcaggcggaaacaccagtcggcggcggcgaaggcaagccggtcggtgaagacgtagacgcccaacaacggcggcataataggccagccgtgcaggcggaaacaccagtcggcggcggcgaaggcaagccggtcggtgaagacgtagacgcccaacaacggcggcataaaggccagccgtgcaggcggaaacaccagtcggcagcggcgaaggcaagccggtcggtgaagacgtagacgcccaacaacggcggcataataagtcagccgtgcaggcggaagcaccagtcggcggcggacaaggcggccggtcggtgaagacgtagacgcccgacaacggcggcataaaggccagccgtgcaggcggaagcaccagtcggcggcggcgaaggcaagccggtcggtgaagacgtagacgcccaacaacgacggcataataggccagccgtgcaggcggaaacaccagtcggcggcggtcgaggcgagccggtggtggtgttctgactgatccattcctggagcgtaagagataagcttaaagccatgaatcccttttatgcacatctggatctggatcctgcggaacaaacatataggatgagtagtatctgatataaatataatactcgagaaaaaatcaagtatttaaaatatttataaatatgtatttctcctcttgtcaattttgatttccccgagcagatgactcattacgtttaaacactctgcccgactagtcatagccaccaagcactgggagtcggcctaggcatttcccaaacatgcatatgagtgacatgagttcgtcattaatggaacaaagtttcacggatcagaatttactacttaggtacttttgcaattattaagagcagaaaataaatttatctcatctctatgcttttgatttattccgaataatacttagcaccttgcgttactcggtccatccaacgagcccccgggtgctaggaatcggcccaaaggcaaccatccattggcaaaccaaacggaaagcataggaagatagaactccataactcgataggtacttttgtactcagattatgtcgcaagcaatcaagataaatattatgaaaaatatgatataacatctgtagcccccgactcactactcaatggaagaccaattggtgtagtgaggcagaggaaaaggaaaaatatcatataaagaataaaataaatgatgacttagctttgtaatattccccttggtgatggcagaagtggccaatgtgggaacaaagtcgtccatcaataacaatgaagacaccagtcggcggcgacgaaggcggtcgacggtgaaagcgaagatgcccactaacggcggcataataggccagccgtgtaagcggaaacaccagtcgacggcaacgaaggtgagccaacggtgaagatgtagacatccaacaacggcggcaaaataggccagccgtgcaggcgaaaacaccagtcggcgaaggccagccggtcggtaaagacgtggacgcccatgaacggtggtgtgaccaaccgaccgtataggcagggacaccagtcggcggcgacggaggcaggccggcggtgtagatgacgatgcccatcaacggtggtgtgaccaaccgaccgtataggcgagggcaccagtcggcggcgacggaggcaggccggcggtgaagtcgtagacgcccaacagcggcggcataataggccagccgtgtaggcggaggcaccagtcggcggcgacggaggcaggccggcggtgaagtcgtagacgcccaacagcggcggcataataggccagccgtgtaggcggaggcaccaatcggcggcgacggaggcaggccggcggtgaggacgtaaacgcccaacagcggcggcataataggccagccgtgtaggcggaggccccagtcggcggcgacggaggcaggccggcggtgaagtcgtagacgcccaacagcgggggcataataggccagccgtgtaggcggaggcaccagtcggcggcgacggaggcggccagccgtgtaggcggaggcaccactcggcggcgacggaggcaagccggcggtgaagtcgtagacgcccaacagcggcggcataataggccagccgtgtaggcggaggcaccagtcggcggcgacggaggcaggccggtggtgaagacgtagacgcccaacaacggtggtgtaccaaccaaccatataggcgaagacaccagtcggcggcgacggaggcaggccggcggtgaagtcgttgttgttatcagcaatggcggtggcgaagacaagccggcagagtggactcgcggccgatcgaccggaaagctgagacgcctcgagtccatgaccagcatcaatcgcctcaatagtgccgcgtagttatatgcgaacaacaacaaaaaatagcaagagattaatctgagattaaaaatcaatatgataaataatgataaaaatcagattgagtttccccctgactgatttggatcaagtcagagaagaggagcttgaagaagtggtcgacggaaaggaagtgaaaactcccaaagcgaaaacgaagtcggcgactcatgaaattgattccatcgcgctcgttgataggaaactcggcgcaacccctacctggcgcgccaactgtcgaaacatgatttcggcaataataaaacggggtagcgcacgagacctaaaagtggatggatgtggagacaaaggatttagacaggttcaggccctctcaatgagaggtaataccctactcctgtttggggatttgaatccgccgagtgtgtattgatctgacgatcaggttgtctcatatatgccccctagagggcctcctgcccaccttatataggatggggggcaggattacaagatagaaaccttaaccaatacggtatcggttttctaaatcaggactttaggccgttccgtaatatacaaggaaacgtaacacccaagtcatgatctgttacatattacatagatataagttatcccctataactagtcggataaccatgccgtgtgggtatggggtacccataatctccacagcgggggctgggtcgttccagcccgaaccgtcccattgtcattcctacttgggatctcgagtacaccggttttgtaagttgagaaacgtgttatatctagtattacgggaataacgtaatttgaagtttgcattaagatgagggaccttaagtgaacttattcctcatcgtttggagcgcaggctgggcctggcccacatagaacgagacccgagcctgagtcggattccgactccgactactaggatagggtttgcatcctctataaatcggagcccgccgctgcttcctcttcttcccacaattccccaagcatccgtacgcctcgacgtctccaagcaagggcggcaaggcgaatcgcggcggccggtcaggcggagcagcagcgcatcgagcacatggagaccaaggagggtgcgacgacgaccctgatgcccgcggctaaagctttcgccggggccggaggaggtggagacaacgtcgagaagaagcctcctgtagtgagcaagaaggtgccgatgccgcaggtcttgctcgactacatcctctcatggacgaggatgggaccatggccgagctccgacgaccactcggagttcctcctctcgccggagcatcgcaaccaggacgacgacgatggcttcgccgcgttcgaggccaaggtccgtgcgcagcgcgaggagctgtccgccttcctcgacaagaaggacgatgagttcgccgtgttccaggccaaggtccgtgacgaggtcgacgagaacggctgctacatggtcgatggcacctacttcgccgatctggaagcagcccaggctctctccaatgaactatttgccaagctgaacatgagtggcatcctgttcgaggaggactgactgagatgcatgccatcctgattgacaacagtcaacaggcttcttaactgtcatggtagtagtgggcacgactaattgacaacaggcttaatcgtaattgtttaatcaattatctcttgtttatattaactagaaaaaatacccgtgcattgcgacaaattagtttgatagcgcatgtcgatggtactttcttcctgtgcccattcaatatttattaagcttgcatgtacaaatgttcagtttcatatatcgaatgcaatgtattagggcacattaattatatctttgagcatgattctgttttgccattacctttatctcaagtcgtaagcatggcgcgacgtctcctcccctcccggtgtgcaaccacatctccttctgttaatttttcatatatatatatatatatatatatatatatatatatatatatatatatatatatatatatatatatatatatatattttctactggtttgctgaaatgcaaattagtatttttgttttaggattgttatacttaccctcgcaatatggtagataattggataggcaatatggtagacaagcagttttgtgcaacttatccttattgattgtggttattgttccaaatctgcagtgatgtaagaggaaacaatctcacagggaccattacagtgagcatatatagggagctgcactagctttgagattttgtatgttcgatcttgctaatatttcagtgatatttcattgttcatgagtttcagacaccatgacgcgaacttcttatatgcattgtagggacatttcatataaccaaaagtccaaaactctggagaaataccttacaaaagtctttcttcgagtagccacactataagaattccttagttattgcaaatcttctagcttgttatgtgatttttcgttcgtatcttctcaatgttatagatgcttacttacagcctctatgttgtgcgctttctattcgtgttacataggtcacttcaagaaatagaatgaccggaaaaattccagatgtgattggccttatgcgggttcttgctgttctatgagtagaccacaacattttaatccataggttcagtagtttctgtatgattagataatgaattcttatattcaaattttgattctcagagacctgagtgagaacgagctggtaggttctactccctccttccctaaatatctgatgccgttgacttttttaaacatgtttgaccgttcgtcttattcaaaaacttttgtaaaatgtgtaaaactatatgtatacttaaaagtatatttaacaataaatcaaataatagaaaaagaattaataattacttaaaattttttgaataaaacgaacggtcaaacatttttaaaaaagtcaccgacgtcaaatattttgagatggagggagtatttcttcaatactgggcgatctatcctagattgccaaaactgttagtatcatcggatagacttgctttttccctgagattgttttcttatcttgagcaaacttactggagtcataccgccggagcttggaacatgagtaaatttaaaattatgctgttaccatttgtgagcaaaatgagccgcaacatgttctgttaatttattatacaaccattttgctgcgccgtacaccccaatataccttcgttatatgattcttacttctagtaacaacaatctccatcgaaacaaccattgcccatatttacactacacatcaccaaattcagcaggtgttatgagccccggcgtaagatcgaataggatatggtaatttagcgacgagcagaggatgagaaacagagaaaggagatctgaactgacttaattgatttctcccaaagttggcctctaaataggcttacaaatcttaactgaaatgtctaacaaattatgagtgaaaagaggaaataacaaatctaatccaaactgaatatatccccggactgtagctgtccggcaaaacgacttgcgccggcttccgcgctccgctgtccacgccggctttcgtagacgataccgaccatgacagctagggatggcaattgtgcccgtttgcccgtttacccgcgggtaaaaaccctattagggttgggtttgttctccattttatacccatgggtatcttattggttcaaaaactatgcccgatgggtaaatgggcatgggtatgggtaatcactacccatgcccgctttacccgtttacccgcgaaatctaacttacatgtaggctaggagtaaaatccactagaatacataagccacgttctttgttttctacggtttcccttttatttcccttattatttctctcctcttactctatcgccgccagaggagagacacgacaccgaggcggagaatatttgatgttttaagttcgattcgaagttagtagcttgtagactttttgttccactgcttttgttgtggcgggtaaacgggcacgcccgtgggcataaggcgcccgcgggcaatgggcatgggcaaccatccttacccgtcatgtagtaatgggtatacccacgggcacaaataatctcacgggcatgggtatgggtaggcactacccgtgcccgtcacgcccgattgccatccctaatgacagcatgcaaaaaatatcagacacccaaatgatgaagaactcccttcttccttcctttttggcaaagacaagaggcacaatttgctgttcttcacatagaagggtaatgtatcaaccctgattgattgcatacacacacggtgtgctgaaacttcttcaatgtgccatcacacctgatatatatattcagataaaatcatgatgatggtgactacggtggctttatttcatcattgccttgccgatggcctttacccatagcttcttcctccaagtgctctttcagaccttctttgtaggactcgacatagttcttcagtgcatctgtgtagtttgaggcgcgagccatgtacatccgttgtaacgcattcttggctttctctgctccgccctttaatgcgccgacaaggtcttcaaccgtagtaggctcgcttcttccctcctcggtgttgatgtcaggttactctttggccttcttgtagttgtagtcatttggtctgatatcagggccaatgtctctgacccaagaagccccatacagcctggttgcctccttcagaatgcaccacttgtctttccaggagagctttggccgcttcatgcccatcggtactgcagtgttctctcctttgtgtggtccgacaatagattaacctgcaccacaatgaaatgttgtcaagcattaaattttttttagctcccgggctgca

SEQ ID NO: 26777 - DNA, 9971 bp, Oryza sativa
ctgcaccccatacttatgtccttgaccaacatcgtatctcccataaatacgaatctctacattatcctcggtccattcaagaactttcacttaggaccttagttcatctagagtcgggcgggtggaaaacaaaatggtcttcaatgacatatcctcaaactcaacatgtgcaccaacataaggttccaccactctaccaccatagcaaacacgaacaagtctatccatctacacaaaaaaataaaacatgactttacaacaaaaattacatcatccttgctaaacgtagtccaaaccgataaattataacaaaatcataatttaaattgtcccaaagctactacttcacaaaaaatatttaatccacatccaaaggtaccaactagattactagtgtattaaacatctaagtattacaaatactccgtcatacaacatatcctaattctaattaactttaataaatttctataatgctaccaaattcgtctcctccctcatataattcatacctaaaaaaaatctttcatgtctcaagtcaatttttccatccatcaatccaaccaaacaacctaaaaatccaaattaccacatatatagttcaaaaaagagtggcaccaatgagtacattgcacacatgtagcactataatcagcaaatccccaaattgaatgctgaaaatcacaaatttgggcaaaagagggttgtagggttaccctccgatttacaaatttcaccatttaaaacggaaaaaaagaggggggaatggaggagtataccttgctcttcgatttccacaaaaaatcccgtgaaaaaagcctccaatttgagtggctttgaggaggagaggtgaggggggagagagatggagagcgcactgctctggcttgggctgggaagagttgcaaatggctggggggaggagaaaggggtggggcccgcgtgggttaagggcacggcccacccagtgggagcgcgccaggacgactggagcccccctcctgccacgtcagccggctcgcctacagggtgtcaccgcggcacgggcacgacgccagtgtacctggcacgccatgttggagggcagcgccagcctctctagcgcaccaaaaaggaccattcctgaaatatgtttttctagaggtctatttctacaataagttttccataaggagcaaaatataaaaaattcagtccatctcttatccatagctgatatttgcaatgaaatttcacatgtcacctaaattactctgtgttttagtggtgctttctgcatgccaagtaaaagtactcactattgtgctcatgagaaaaggattttatatatatatatatatatatatatatatatatatatatatatatatatatatataggacactcatatggggcaccatggtgcccgggcaccatggtttcaaatgcacaaaattactcaaatttttcaaaatttttaaattgtgagtatatacctagttataagaattcgattcatacatatatctatcaacaaaacaactcaaatttaactttatttcacaattcatgattacatacctaactaattatatgtatagatgctatatacctagaatcaaaatctaacaaaaacaagttcaaattcagtttaaacttgctttgaactagttagtaaagtagttaatgttaatacctaaataattgaaaaagtttcatactcatttgaattggttatatactcaatttcaacaatggtgcccgggccccatggagcaccaaacaaatttactatatatatatatgtatatatatatatatatatatatatatatatatatatatattgcacaggacaaatataacacgaggatataacatttcagcctttaagcatagtactcatgacaagctcgagggtactaaccgtggtacgatgtattgttcgagacctcctgctgggtagatgctcagcaacgtacaccttagatgatagacagctaggtcgattgcagtagaatcgatagtggaccactaaactgtaccaaaagccacatagttcatatttagaaatagattataatgctgacttaaaattaaatacttgctttaataatttcagagatttcccaagatatcgatctaggtacaaagtgctagaacatttcagtggttgcacagcaggagacaaaaaacccctcctcatgcacatttccagctcagcttaacattttaaccaaatccttatgtaggaataaaacaggtaaccattctcacatgactgactttcttgaaacaaatcaacatcctataaagaactatattcatccatgagcataccttatatgcaaacaaaattgatccatgaagacaaccaaattaccaacacattatatatatgccgggcagacatataacaaatactgtagatagggatgaaactatgataagttgtatatcatacactatatgtatataggaataaatatatctataagacagcagcagtagcagcacatgacctttgtatagtactagtataagtgtataactaactgacagtatatatgaggcaagacatgaatgtcaatatagaggcccctcttgcttgtttcccttcttctgtgatctcttctctatctctggtccccatgaatttgacattctactactagtacctactagtaagcttcactactctgtgcctgctctgatccatcttgttgctttgcattgccattgcccctgtttcttgctagctagccatggagacagagagctaatctatagtactacaccctaattaagtacatgttgaattttccgatgcacaatacagcaaatgcaatttggcaatacataggccaaccagtgcagtgtacttatatgtagacaaattgagtaaatcacagggcagacatacatgagccaaaaaaaaaaaaaacaagtcacagtcacagatcttgtataactgggagaattttacctgaacaaggggattttctcggtgcttcctggatctcgataccgagggcagtgctgaagaagaagaagaggcggtacaagaagaggtgcactaaactgcaccataaagccaaatagttcacattcagaaatatattataatgctgacttaaaattaaatacttgattaataatttcaaggatttcccaagatatgaatctatctacagagtgctagaacatttcagtggatgcacagcaggagaccaaaaaaaaaaaaaatcctcacgcgcatttctagctcaacataacatctaaccaaatccttatgtaggagtacaataagttaacatgcttacatgactgactttcttgaaaaaaaaatcaacttcctataaagaattatattcgtccatgagcatagcttatatacaagcgaaattgatccatgaagacaaccaaattaccaacgcattatatgcagggcagacatataacaaatcaatatatagcttgcatataaggtgcactgtacttatttgcagacacacaagatagaagtttcctcatgtgtataactttggctaacacaagtagttagcactaatgcttcagaataattgctgccatgatgcacatattcaaggagtgtagatgaaatctccaaattgtaaaggtctcataattgaggcaataaaatacagctgtccttacaagacagtaaacattgcgaaaactacatgaatatatatgtagacaggtgtaaaaaaaaatcaggttaaatttttgtagcattgtatctctgaatcatgttcacctactccttctatcctaaaaaaaaacaaaaaaaaccaacgaaatttctaggtttgaatattagaatagttggttctatcaggacagagggagtatgtagctacatattcagaacaaaaagcatcctatgtagtgtactgacatgccaactactgcagtggtacttataggcagacatatagtagcttataggcaggattgtaaaaaattaaaataaagtcacactcacagatctggcataaccaggatattttgacctgaacaagggggtgtccttggtggtcttgatgggtgctgaagaaagagaggatgagaagaggagggggaggcggcggaggaggcaggggtgaggagtcggcggcggcgtgcgggcggagttgacggcggcggccggcggaaggagttgatggcggtgcgggtggaatgggttttggcccatgaaattttcctgtgttgacgccgcggcccacgaaaactctcatgccaaaatttttgcgaattccagcaatttgatttattttctggcataaacaatctagagcagatcaaatgactagttaattattattactccctccgttccgtttcgtattataagtaatttaattttttcaaagcttttttagtttgatcaaatttacagaaaaaattagcaacatctacgataccaaattgatttttaaaatttaatattgaatatatttgataatatgtttgttttgtattgtgttagtatatttttctacaaatttagttcaatttaaagaattttgacaagaaaaaagctaaacgacttataatatgaaacgggggagtagtaatcattgcccgtagtgaatttccggcagatataatgacatttgtatccatccctggctcttgttatatttccagcaaataattcaacaacaaatcaatttttttttgttcgcgccaattaattgctaggtatactgagctatggtgtagtgatatcggttgcttacataagttctgtatgtaattattgctagagcatgatgaggtggcatgtttacatattgagctttagaattagtgggttataaatttatactaagataggataggattcttgatgctagaggggtagatatagctgttgtcagacattacacagagagttgtacatcaattaagtcaacctttcacaacaatgaagccatgcatgctattgtttgcggttttatcatagaggagccatgatttttgcaaatgctcatgataccctcttttagctagtagtagacctatttttagtttaatttgcgatactctagttactaattgaaataagaaattagtgcgacatgctggcggtatatggcattatttgtagagaaattttatagtttttaggaagtaccaaagaggtatatttagaaagctccgtacatgaggtatgggaacatactcaattttctggataatgcttctcgtcgaacgtccgaagcaaggagaaaaatcggacaacatcctctgacacacatacacatctccaaccatataacatgcacctttaacgatatttaaaacgaattttctcttaaattatttatctaatgtacaatccgatcataccgttgtattcattataattaaatctttacaacaagatgtcgcatgattatatttcgataaaatataatcatatgtttcaatccattaacactttttgtttcatacgtgatagggacatgtttcaatatgtgtctttagcgtgtttcacaaaattcacaaaataactgttagctagtttcaaaacgatttttctcttaaactaattattcaatctacgatccgatcacaccgttgtattctttgtaattaaattttataacaagatatcacatgattatattttgatgaaagaaaaacatatgtttcaatccattaacattggttgtttcatttgtgatagcgatatgtttcaacgtgtatcttcatcatgtttcataatttttttaaatgtttcagttactgatttttggtttcaccctatataacttgatgtttcactcgttagttaactggaacatttaactgaccgattcttttttgcatgctgcatacgtaggtggtgtaatgacgtgtaaacagttgggcgtccgatatttgatgaaatatcggacgtccgacgcagagtcgtctcccaattttccactgtaaaatatggtgctcccaaatacttgttgttgtcctaattaagatactcgattctacgattctctatagatggaacctacgattttcatgtatacgattttgtaataccgattccaattcaacatcgcgagttaacaaccttgtttttggcacaacagaaaaaaaaagaaataactatataactttcgacaaaaaaaatccctttgaaatctttcgaatgtaactgtagtgtaactatagtacagttacactgtaatactatagtataactcatatgtgacttgtatataactctgtcaagaaactagctagtatgacttggttggctagcaccgagagggccttcaggtgcaaggtcaagggttccagcgttgtatatcattgcgtcactcgcgtcagtcatgggtgcagtgcttgccggtgccggcttaggcttaattagtttggtaccctatgttcccaacacaactccctcgtgttctgtgcgcacgttttttcaaactcctaaacgatacgttttttgcaaaaagtttctagataaaagtttcttaaaaaaaatcatatttatctattttttaaaaaataaactaatattaattaatcacacgctaatacaatgctccgttttctatgcataggatatgtgttcccaacacaggctaccgaacacagccttagagtgagccggcgcatgagcagagcaggcaaccaggatagctgcccattgcaagtttgatttttgaacaccaaagaagctaaggaatacatggccggtcctaaacttgtgtggtggtgtcacttaggtctgtgaatttgaaaattgcacatttagatccgtgaacttggtttaatgtaccaccctggtccaaacgttctttgactgcgttcgactgctaacatggcatgccacatagacaatacttttgctttcaacaccctccatatcataacacatcgcatatatctccttgtagctatacagtgacactagaatccccaaaaaaaatcctcaagtcgttcttccctctcattcttctccttgcatgtatagaaaatacggcccctgttagcaattgccattgctctgcgctccaaaatgactttatccttgcacaacgggcacttgatcaacaacaccttttcccaacgacttcaaaacgaggacgagcttggagaatctatggggatgcctagcatgcaagacgcattacgctgcctcccgccgctaatccggtcgcactatgccaccgctaaccccgttgcattccgttgtatcctgctgctaatctcaccgccgaggacgccacagccgctacctcttagcctccttccgctaatctcaccgtcgaaaccctagccgattttagtgatattgaaatgcactggttagggcaagttatgtgcgaaggtatatatggagggggctgatcacaaaagtgttgcctagtggtatgccactttggcggtcaaacgtggtcaaagaatggttggaccgagctagggtggtacattaaaccaagttcacggatctaaagatgcaatttttaagttcatggacctaagtgacaccaccccacaagtttaagtaccggccatgtatttcactctttattttattttattttattttgtgttctctgtaagctttggcgtgtctgtgtttcgctagtcaaattgcatcaagagtaaccttaaaaccatagtaccacattactttttatcataggcacggctcttgtcaatgcctatttagtgatatagtcacatgatgtaccgaaaacttagtattgtgtttactatcgactctgttgattagccatacctcttttttttccgtcctccgccggccactggttcagcattgcattcagaatgatttcagagtacatctgaaggtgtgtgtgcagtgttctgagaaggaaactgtgcaatgctccgatgatgaaactgactttatgttgagatatggtggatttttttaatgtgggtagcgggattgcccatttacatcctaatgttgtccttgatgaggttatttcttctcggggttttctggacaagatacttttttcaattaatattgagcgattatttcttaatttgaatatataaacagattttgtcatgcactacctttgtgttaattagtggtgtaggagtatccggagggctttcagtatagaacagcagaatctattgtcagttatattgctacagcacatggacgtcttcagaacataagttgaagagttaatgcaaatgacactacagtagaatcgttagtctgcacacatgcatgcgggttaacatcaattcttgaaaagttgtaatgcctatttaacactcttaataatttgaaaaagaaaaggttatcaagaaaaaatatagatctcgtcgagttatacaattttgttatacagaaaatttaatttctccatccaagatattttggaaaattcaaaaattcgttttcaaaatatatttgaaaacttgtaatgcatattcagacatttaaatgatataataaaaaaatgaactataaagttagagatcaggttgagctcacaactttaatatcatatcactatccgagatcatttgaaaaattaaaaagtcgtttttcaaaatagatctaaaaacttgaacacatattcatacatgaaaacaattataaataaaaacattatcaactataaaaagttatagatcttgatgaactctacaattttaataaagtttatcttcatctaactgtcacaccccaatctgataccgccgtacgacggcacctgacaggagcgtgtcgtagggaaaacggcgcgaaccgcttcctacgaaaccgcgatctcggtaccagtcccaggacatagtgctcgtacccacggtgacaaatatgaatcatagcaatccttaaaataaatagaggacttatttaccttaacttaggttgcaactcaaacagcccgagaatacaaccgacgacacggacgaggcgaacaccaacaacaacagcagcagcggaaccaacggtctaacacccaataccacaggcgacggctgggaaccaggacgaaaccctaatcttcacttcacctcatcttcaacttcagggcggaggaacaatatatatttatatagagcaagggtgagtactttcgtactcagcaagtcacgggaatttaggtgtttaatgcaagcttggaagagaggcaaggttgttttgcaaatcctttgtttgaaatcatttttgaaatcactaagtgatttacttcttgttaggtttgggtcgaaaagagacttgcgtctcaaatcgacttaagaggtgcttttctacaactcaataggtaatgtaccgacctcccgggtcagatcattacttctcggcttcctagagccattccacttgattaatcggctcccagagcctttttcattttcagcagcacaacaatccgcttccactcgggaagcctagactatgatgcccatagacatcccgaatcacacagattcgtttcttgaccactcaggtcatccatctgccacataggctgattctggttacgattcccacaccacaacaacttttcacaaagcacaggcaaacaaatctacgcaacgggaaccacctcacatccgcccatgaccgtgggcacggcttttcgaacagttagttaacctctgcagaggggtacactttacccacaagacacgaacttactccagacactggccggtgtcagaggttcgcgacaaagcctttcccaagccgacctagggatacctcatgccacatagaaggatcaaatcctcacataaatataggccattttaggcgttcacaaatcaaactccaaccacctcgatcggtaattcagcaagcttctcgttcttgcattaccaggaacccggtttgtccgaccctgcccgggcgttcccaactattggcatgcaaggtttccttgaatggattagttactaagccagggtgtcccattccaccttgtggttgcactttgatatgttc

SEQ ID NO: 26778 - DNA, 6870 bp, Oryza sativa
aattaggtggagggctcaccgatggcgacggacggcgtcggggcaagaggaggaggagtggatcctttccaccggcgcggattagggcgccggggtcggaggagggccggcgggaacggcgtccggcggtggctgtgagagcggcacggcgcaggcgcggagggcgaagctagcggctgcggcggcgctgggaatcaaggaggggagggaggccgatggccggggaggcacggtggaagtggccggtcgcggcgcacggccgagcgcggcaaaacggaggaatggaacgcggcgggctatgtcgagcagcggcgggcgcgatgcggcgagagggggggagaagaagggtggcgtcttcagtactatttcgggtaaggacggggaagaagcagacggcaagctcaccgacgagagaggagcagcgttggcgacgcggagggagccgtggagaggtggtcgcgacggcggggcgggggcgagcagctggcggccggcatcaatgtcgcgggtgtttcgagcgaggcgaagacgaaacaagaggggagggcacgggctttataggcgaggaggagaggtcggtttggaggagggaaaccgacattggttgtcaagggagctcggctggtgttcacgggcggcagcggtggtttcctgggcagtgcaaaagcggcgacggcggtggatcggacggcgaagattgaaacgcgagcgcgggctggcagcgtggagcggtcaaggtgggggcggcgagctggcgtggtcaaggtggtggcaggcggtgacgccgatggtggtcgggcaaaaggaaaaaggtggagaagaaagggagctctgctccttgctatttcgggataaaggaaagggagagggagcgaggccgagggctctgcctccctcccttggacgcatgcgcacaggcggggctgggcgacgcgcggtcacgggtggcgtcagggctgacgcggcggcgaccgagcggttggcctcgagcgagcgcgcgcgcgcgggaacgagcggcacggccgaaaatcaaatggcgacagcgggaaaaatcggcgatggcggcagcgctggcgtgggagagagagagatcgaacgagagagagagagaaacatagagagagaggaagaagacgagagagcgagagaaacagagagagcgagcgacggctctctcttggctcgcatgcgtgcaacgcacgtgtgggggggggaagatgatgggctgggaggggagatgggccgggggaggaaaatcggtccatccaaaaatacagggaggtaaagtagacttttacagagaaaaccgatttggatagaattgtagagatttagggtttggattcgaattcaaatttgatattcgaactcgagggtttagggatgtatcaagggaaactcaaggagaagccatggaaaagattcaaaaggaatacttgggtatttgttctcgggaacatagggtggagtcaaggaaatgatttggatgagaatcgattctctcgaaatcgggagaaagatttggcaacgagttcaaggaagggagagattgacttccggaattgggatttggatgagagggaggagtcgccaacgggattaaaaaaaggggatttgaatctaaattttgatacttgtacacaagggttcaaggagacgagtaaggaaacaaagtgggagtttgatactttcgggatgagagggaacaacaggattaaattgggatccttggcacaacttagactctcacacaaagaacgaaaattttcgcaattaggattttgccgagttagtttttaacgactcgcgaaaagcggagcgttacagatcgaccccgagattcgaaggtggaccacgcacacgaaaccaaaaagggatcttcagactccttcacagcttcagactctgctagtctttcttcaacttattgttgcatacttgccacaaaacggtctggtaacttgattcacttagcatttttcatcttactgtggctctgctcttgcctgtgaaacctgttcttctcctgctccttcaacttgctcgagattcacaacttttccatttgtttctacttgcacatggttcagacgaccttgtccaacgggcggtgaggttagcaggacagatccactgtttggtgacttcgaaccttttgatccaggtatgttgggaaggattgtcgttggttgaactggctttgtcttgactttgtgaaggcactttatcttggctttctgagggcaatcccacgaatagtgtcccatctcatggcagatgaaacattcgactcctgccttatgaccacgtctttttgaaggtgtagggcatggtacggagttgcttccttcatggctattactattgatcattgtggcttgctgaccaggttctgacatagtcgaacgagacgtagaaccggaaccatttgaatgctgagatgctttctgatagtattgtgctggcgagtttgtttttcgacacaaaccttcttttgcttgaatctctagggacattactttgcgtctcttgtattcttgcatctcttgttctgcatcttctagtaacaaggacttatcgaccatttgctgaaacgtcggaaagtcgtgagccaaaagtttcactcgcagtttcgcatccattccttttaaaaatcttctgatcttctttttatcagtgtctacatcttctggggcatatcgggccaatctattgaagcgactcaaatactcgttgatgcaagaggatccttgcttgatatttgcaaattcttccttcttcaaatcaattatgctttcagggatgtgtgctgagcgaaaggctcctgcaaactctgtccagacgatggtactagcatctgtatgggtagcacagtagttatcccaccaatctgcggcaggtcctctcaactgatgtgcggcgtaaagggtcttctcatacggagtacactataccagatttaatctcctttccacatctttgatccaatcgtcagcttcaataggctcagttgtttgagagaactccggtgggcgagatctcaagaaatcattcaattttgagcggccattatcttgaaccatatggggttgacactcttgagtgtgttgttgttgcatagcaattatattctgaatcactccttgtaatatatgggtctgcatggccatgagttggtgaaggtccactggtgggggtcggttacctcttgagacatcattaactgatccggaagcagccatatgatcactctcagcttcttgctcatctgtctggttaactggttgatcgggaatttctgactgaactagctcttcttcaacaccaaagcgattgggagcaagggtctgacgggtagaacgacgagccatctgcttcaaagcggctgagatctgactgaaccagaaatgggacaagaaaaggagaaaaacaaaaacactacatcaaaatggttttcgaaatcacagaagacataggtggtgtgttccagccggtaacccaactggtctaacacctaaacacggactaccaaacaaaactcacacacgcactagttcaccacaactcctaccgtgcgggtgacggtactaaggttagcctaccaacaagggcttaactaagactcctagaggcttgagcacacctttcttcaactgggcgtgaagacaggtttactctaggataaaagtcaaaacactcgactaacttctacctttttggacacaaagggatttttcgcaaaactagagcaaaaggggacaacgacaccttagctttcacaaatagttttttttttctttgtactcaaataatgccttcctattaaggggtttcgatcctagggccaacctatgctctgatacaatctcggtcacaccccaatctgataccgccgtacgacggcacctgacaggagcgtgtcatagggaaaatggcgcgaaccgcttcctacgaaaccgcgatctcggtaccagtcccaggacatagtgctggtacccacggtgacaaatatgaatcatagcaatccttaaaataaatagaggacttatttaccttaacttaggttgcaactcagacagcccgagaatacaaccgacgacacggacgaggcgaacaccaacaacaacagcagcagcggaaccaacggtctaacacccaacaccacaggcgacgactgggaaccaggacgaaaccctaatcttcacttcacctcatcttcaacttcagggcggaggaactatatatatttatatagagcaagggtgagtactttcgtactcagcaagtcacgggaatttaggtgtttaatgcaagcttggaagagaggcaaggttgttttgcaaatcctttgtttgaaatcatttttgaaatcactaagtgatttacttcttgttaggtttgggtcgaaaagagacttgcgtctcaaatcgacttaagaggtgcttttctacaactcaataggtaatgtaccgacctcccgggtcagatcattacttctcggcttcccagagccattccacttgattaatcggctcccagagcctttttcattttctcggactcccagagtccagctgcccagcagcacaacaatccgcttccactcgggaagcctagactatgatgcccatagacatcccgaatcacacagattcgtttcttgaccactcaggtcatccatctgcacataggctgattctggttacgattcccacaccacaacaacttttcacaaagcacaggcaaacaaatctacgcaacgggaaccacctcacatccgcccatgaccgtgggcacggctgttcgaacaattagttaacctctgcagaggggtacactttacccacaagacacgaacttactccaaacactggccggtgtcagaggttcgcgacaaagcctttcccaagccgacccagggatacctcatgccacatagaaggatcaaatcctcacataaatataggccattttaggcgttcacaaatcaaactccaaccacctcgatcggtaattcagcaagcttctcgttcttgcattaccaggaacccggtttgtccgaccccgccccggcgttcccaactattggcatgcgaggtttccctgaatcgactagttacttagccagggtgtcccattccaccttgtggttgcactttgattatgttcgatgagtttcccacaggaatcggtccttatatgcgaatacgggacagtgccacataggcacaacccccgcatcgcgagttttcacaattcattttattttcaaacacaccgacaccacatgtcgggttttgaaggcttcacaaacccatttcccaagttttcgacaaacaacggtgtatgtgggatatttggtatacgcgctcagagagcacgattaccgaggtaccacaagggtggagcgacaaggaatcagggtagtacgacctacggaaattagtgcgactactgggtaggtccgtcggtttggcacgcaaaccgaggccaagcaagttaagtgtgtgattctaataatgcaagttgcaaacaaaataataatgacttttcaattataggggcaattgatcaagggtgacttgccttgctcaaggtcttcacgaagcttcacgaatcttcgagaaaacccgcgatcgacgaaaattcgataaccgcaactatacgcaaacaatcgaaaacctaaacaaaggaccaaaagaaagatcctatttagactaattagtagtgccattaaatagatctcaattttacggaattactggaagtggaacggaggcgatcggagctacggatcgagggatatgaattttggaggtctaaatggattttctggacaaggaaatgttttgtcagaatttatggaaataatattctcaagaatattattgacagtcactgaccaaggaaaatgattcatggaattttggaataaggaattgatttctgaaagagggaaaaatgatttattgaatttatagaaaagagaaatatttgtggaatattggaaaagacattctcaagaatatctttgactcattgacaagtggggtcaacaagaaggtaatagagaataaaattgagagggagcaaatttggacttttagtttatgagtgatggatactgggcttgggcgaagggagtatatgtggacttttgtttgctttaaggggccgaggggaaggtgcgctgatgggccaagcccacaagcacgggagagagggggaggagtggggcgactgactgggcgccggcttgacccggtcaagtggggccgatggctgaggtggcgcgaacgtggacgtcacgtcggatggggaagggagaggaggccgggcagctcatcggacggcccacggcgcgcggcgggatccggcgaacggcggcgagccggaaggggcggctagcactggcggcaggagaaggagaaggggaactcattccacggctcggatcaggaagaggacgcgcgacgacggccggcggcggtggccaatctcgccggcacgccgacgtggccgcgcgcgagaagagcgaagggtgcgcgggctcgggcttagccgaaccggtatggtgttgcgacgcgcacgcggtgacgcgggacccgatggtcaccggcggcgcactcacggcgacgttatgcggcggcggaagcggcgacacggcgtggagacaaaggagaaggccgatggccttggggcagcaagggggaggtcaaggggatccccgggagcgtggcggcgagaggaatcgacgctagaggagccgacgacggtggattgcggcggcggcaatcaccggagagcaaaaggggaaaacacgacgagacgacgagggttcgattcaaagggatgggagcatctccgggg

SEQ ID NO: 26779 - DNA, 5628 bp, Oryza sativa
ggggggggaaaataatgggttggaaggacattggccgggggaggaaaatcggtccatccaaaatacaggaaggtaaagtagactttaacagagaaacccgatttggatagaattgtagaaatttagggtttggatttgaattcaaatttgatattcgaactcgagggtttagggatgtatcaagggaaactcaaggagaagtcatggaaaagattcaaaaggaatacttgggtatttgttctcgggaacatagggtggagtcaaggaaatgatttggatgagaatcgattctctcgaaatcgggagaaagatttggcaacgagttcaaggaagggagtgattgacttcaggaattgggatttggatgagagggaggagtcgccaacgggattaaaaaaaggggatttgaatctaaattttgatacttgtacacaagggttcaaggagacgagtaaggaaacaaagtgggagtttgatactttcgggaatgggaacaattatttggggaggattcaagggaagggattgactttcggaatttgattccagagactcgaatcggaagaggaatttttgaggtggaggattttgatttcgatgagagggaacaacgggattaaattgggatccttggcacaacttagactctcacacaaagaacgaaaattttcgcaattaggattttgccgagttagtttttaacgactcgcgaaaagcggagcgttacactaactctataaaaaatcaatttaaaaaaccaaaatgtatgccttgcaatgcgctgatttaggccatatttgttaatgctattactaatatgtaggtatgtcatttcacctaaaaatatatgcaggtatgtcacgcatttgtgatagacattagggacacttttatggaaacccatgtgtggtaatggatttcattcatatccctgtagctctgatgccaccgccaccgccacgccgcccaacactagctttcatgtaaacccacactatctacccccctcctcactagcagcggagctagctcctgggcaggttgggcggccgcccaggctccgccaccagcatctccaatgtaaatagcttttgatgcctgaaagaattagtcgattactgaaaaaggctagtactcgtcgggcttcatgacatctctggctctgccactgcctctcaccagcacctaatcttgaaaatctctggtggttcttgcaagagtttcaaagacgccagctttgagaggaactcgttgctgccgagtgcgcttcgtggaagttgcctctaacgtctcatgctgccatgtccctgtctttctcatgcctccccataggctggaggtagagggcttgtgctggccctcagatctgtgaccgatggcttggatcaatcaactgaatgatagcaaatatgaattaaataatagcctcaagaagtcaacaactaacttaatttgatccaagttagcatacaatagaaactttaactctcacctgcaaagtatgatttgttagtttcaagagattcagtactcctaaaaagaatgaattaatttttaagatggattcaaagggaaacaatattgagcacaatatttaaggtgtagtatgatcactaatacaggggatgactcactaaggaaaactccataggttgagttaggaaccaaggcacacaattagcaagacatgcaattttagctagtaattctcacaatttaaactatcactaattaatacatcctagctaggatacgccactaattaattttgcgagacttagttgccatctcgattacatccagtaggatagaagggcaagatgttttgaggcgaccatacccttcagtctccacaacatcatccaatctatttgatgaggcgataaatttaacacacgcttcttttaatcttccgcaattgtgctgatcagctagggcaacaattgttgccacattatcaacactaagactcatgcagagtgccttttcacaaatggttttcaatccttccacagcataacgatctgcagctacaagcagatgcttagccaactcctgcctttcatctctactgagatcatcattaatagcaggagagaaggagtccgtgtacataaaatgaagtagagccttgaacacaacaggttgcatatcctggatggctatccgctctcctctcttggccctcatcggcccgtaaagctccgccatgaacaccggtgatcgcgccgctagcaccacgctatgagcggggaaaacatctcctccaacctcgaagctcaagtcggctccgacattgtcctccagcaacttgcccaggtccctggacaagtttgtcggaggcacttggaagtggatgatatcacctggcatggcggctctctcctccgtcttcaccagtggtgtcttgatgacggtgagattgcactcaatcataagtcggtcgtcgcgcagataaaccgatccctccagctcactcctcctgatgaaattcttactaccccacacgagacatttgcttttgaaattagtcgtgccgaacactctccgtgtgttgttcgtagtcgagaccagaacgcaagacgagtcgtcggtatattgatccaacatcctgatgtcaaagatggttctcacctcggcgtccttggtcataagctcgaggaagacggagatgtagtcgtcgtcggactcgatgttgccgttgtggtagtagcggagacaccagtcgaatccaccgacgtcgaaagccgcggagcggatgaagctggctttgttgctgccggcaccatcgactgcttgcaggctgtatccgtgtatggtgaaaacgtgagttccccgtgctgtctctggcttgcaactcgatgccgtcctcgtcgtgctcgacggtctcagccgtgacgccgacgccaccatggttggagttggagaagaaagaggatcaccggacgaggcgacgtacacggcgacggcaatgagctataggctcgtttgtagttatcggatgcagctgcagggaagaaaaagttgcgttttgtacagctcgatctaatttaagcaactctctgctgtcagggagcatcgatcgggacgtaaactaggttaattttatgtcttggggctcccatcctcctattatactactactagtagtaaattaaattaccatgtagattaaagttcctctctccttattcggtccaagcttgccatacgctgcatatctctcgaatctctcgactcctcttcttcaccgatcggattctaagacgtcacaggaagtaattaagcgtcagcaatatggcatccatacattcatccatcctgcaattacacgacgagtaataatcctggttgatagacagaggtctctaattcgatggtcataatctatcactcgatcgtcagctaactgagctgtctgatctccatggttttgcagtgtccggagtgatttcagtacaaacatcaacagggtatgttctttgtcgggcattgggcatgaggttgatcagtggttgaaccccaattattttttctgaattttttctaggaacaaactgttgttctcaccggcgaggatgcggcggaagcagcagcatgcatggtctccggactccggtcggcgcgcgccggcgagatatggagatcggcgaaggtggcagacgaactcgatcgcgatcaaggacgtaacggggagatcgacgaaggaatacgggctagttacgcttaggatatttggcggtttcggtttgggctttctattgccgccgtccaaattaatcaaatacgttgggctagctgaaacaaattaaacccaaggattgctcatatctgttaaaccgattatgaccggcttaagtagccaagtcgaatcgcttctcaatggaaaaaggtccaatttgattacaagttggatttgattcgtatcactaattaaccgtaaaatcgggtatactactggcccctccagtgcaaaatgacccctcgtcttctttaagagcgtggttttccctggtgtggcatccacgtggcacgttaactgcctttttctaacgtggtgtctacatggtattacaatccgttaaaatataataaaatagtgggacccacatgtaagtccccaatcccttctctccatcatctccaggggacttaaaagaagttgagggaagtcgaatatcttgtgaggaggccttcaaaggaggagaaggcaagaaatgagaggaggtcattcacactatgcgtccgaccataattacctgccacaagcgcaagatagaaaattccttgcaatacctgtatgctacttccatttattacatgatttattagtatcattaaaattacataaaaatttaatgccaactccttttttgctataggttaataaatatgagataccccacagacatgtgtttacacccaaatttggcacctaggattaaaataggaaagattgccaaaatttggaagtctgccggtttcctccgagtgggccggtctgaccgtcgtgtgttgagcggtcaaaccgccggttgagggccggtcataccggcggtgtgtggccggtctgaccggcaggtccgagtccgactgtgtttcgtcgggtctcgaggtttccttgctcgagaaggcatgtttcaggtttcctttggtttctaccccgagctggacgtggaggagggcctgtagagggcaagaccaacccctatataagggacatggccggttcattgtaaaaaaccaatctacaatcaatcaatcgaatcgtttttcatattgcttttagttttctcttagtttgtccatctttgtcggtttgcgccgtaaaccatccgccgccgctgcgagagtgcgacatcactttataggtttgtcctgaaaaccttccgttttgcccacgagacgggtagttatctagaaatcggctccgctagccggttatttatcaaaacccatctaggtttagctctttgctagatcgaggtggttgacgactctagaatcaccgcaaggcttaaggtgctatgatcgtgcttgtcaatttgtcacaaaaagttgccaacacgatttttggcgactctgctggggaggagatccgttcatcgtcaactcaactttgacttcgccatgacgaagccgctatctaagacggaggtggagccatctaatgtgataccggtcgcattggaagacttcgaaggagaagatcgtaaagctatggaggagtacatcaacgagctcacacgggaggcgttgatgagagcaagtactaggactcgtcaaggcgtgaccatcaagcccggaccacgtcccaagctcgctcccgacgtggtaagcaatgatgaagtatcacaatctatccaacaacaaattacatctacaatagattcatttatagttgtttttaaagatcagttagatgtaatttttaagggtaaatttgatgagtttttaaggaataaattcggttctcttatggacgattagacattaaaagataaagcctctaccactgctaaccaacctcctatagatcaaacgggtggtaaaaccgacgggacggcgttcacgaccggtccgaccgggcctgacggccggtcagaccgcgacacagccgtcggtccg

SEQ ID NO: 26780 - DNA, 3061 bp, Oryza sativa
gatataattagtgaaattatgaggaatagattcgggattgaaactaggaatcgtgctagaacttacaaaaagccatatcctgattattatgataatgtgccgtttcctcgaaattatagagttcccgaatttgccaagtttagtagtgaggatggtaagaccacatgggagcatgtaggtcaatttttggcgcaatgtggtgaggctaatagtgatacttttaaattgcgcttgttttctttatctttatccggtaatgcttttacatggtttatttctttaccggcaaattctattcatacttgggctcaattagaagaaaaatttcatgattatctctatactggagaaactgagcttaggttatgtgatttgacatcggttaagcaaaagtataatgaatctgtcatagattatattaaaagatttagagatgttagaaaccgatgttatactttgaatataaatgatagagatttggctggtcttgcttttaatggtttagttgctcctcttagagaaagactagatggccaacaatttcttgatgttagtcaactcatgcaaaaggctctggctcaagaaagccgggttaaggataatagaaaacttgctagaccatttgacaaaaagcctaatgttaatgtggtcgattaccctgaggctagtgatagtgaggaagagggtgatcatgatatttatgttgccgaatggtcatggactaacaaaaataagccttttgtttgctctaacctaatgccgactcctcgcaaagatcggcaaagtaaggttaagtatagttttgacgtggccaagtgtgagaagatttttgattatcttttgcaagagaaacaaattagattacctaaaggccatgtcataccttctcaagaagagttgaaatgtcgagcatattgtaagtggcatgattctcattctcactctactaatgattgcaatgtgtttcgacgacaggttcaatcggccatagatgaaggacgattgaagttcaccgatggctccaagatgaagcttgatcatgatcctttttcggtgaatacaattaatttcaatgataagaaggtgttgattcagccggagcaagccaaatctgctaagggaaaggaagtgatcattggtgaaccaaggtccaagatgatagtgccaaagaagccggaggttggcgtttggaaggagaataggagtggagcttcaacttctaaggcccctaggaagaccaaggtgacttttgatatgcttttggagaaatatgagaagcaaggtggtgagaaaattcgcaacaaagggaagagaccaagatcacctcctagggagcgatttggtcattcaccaagatggtcgcattcaccttcgtatcattatccacaagacatgtcatggggttcttatccaatgccgccgccgggttatccttatccttgctttatgccatggggggcaacaccgccaatattcaatcatatgcctccaatgtgattcaaccaacggtggggaggaccacggaggccaattcatgagcgtttgtcttcaccaagcaatagctgatttatggtaagaatcgggctaatgaagaaaagagggaaggaaagcgcgtcaaggtggaggagaggacttcggaagtgattactattaaagtggggtctcatgatgtgccaatacctactggagatggaattggaatgtccccgaacagaaaatccgaagccggtaccagttcctcgcagtcggccggtctgactaggccttctggccggtctgaccgcggtcgtgcggccggtctgaccgggccattaggccggtctgaccgccgactcgatagcggtccgaccggcacctcaggctggtctaaccgtgcgcccagtgtcggtctgaccggcgcatctggccggtctgaccggtggtctacgaccggtctgaccgggctccagcgccggtttgacaggaggattgcaaagggcgatgtggagacttcatcatcttcaaacaaagttaatagagggcattatttacctcctggaatagagctgaatcctaggtggatgcctagggatttgacggctactcaaaagagaaggttgcaacgtctttggacccaagagttaagagagaaagaggccgaagagcaaagagataaaaggttcaatgagttgcgacccccactggtttgaaggcctaaatccatagagaaggcaaaactgattgatgtagaggaaaaggaagaacaatcggttgataaaagtgaaccatctccaaaagaagacatagatatcaacatggtatgtatgttgcctatggagttttgtgctatggatgaagccgaggttgctcaattctcattaggtcctaaagacgcggtttttgagaagcccgatgagtcaaaccgtcacatgaagcctctctatctcaaaggccatgttgatgggaagccggtctctaggatgctagtagatggaggtgccgccgtgaacttgatgccgtattcgttattcaagaagttgaggtgtgaggatgatgagttgaagaagaccaacatgattctcaatggctttaatggtgaaccaacggaggtgaagggtatcttttcggcggaactcaccgtgggaaacaagacgctaccaaccgctttcttcatcgtcgatgtgcaaggtaactacaatgttattttgggtcgttgttggattcatgccaattgttgtgtgccttctaccttgcatcaatgtttaattcaatgggacggcgatgatgttgaaattgttcaagcggatacatcggccgaggttgcaatggccgatgctacttttgagtggcatcatgggaatatccaatgcttatcggggagggatctttctagttatgattttattagtatctctgatggcaaatttgtacctatctctgtaaagtcggctagtgtagcacgggtaagccatataaatttgtataatgagtaaagaggctaatttagagtggttaaaaaaagtgtgcaagaatatcggtttacaaagaacgatattggtgaaaccgttgaagattttgatga

SEQ ID NO: 26781 - DNA, 549 bp, Oryza sativa
cggaggcaggccggcggtaaattcttaaacgcccaacagcggcggcttattaggccagccgtgtaggcggaggcaccagtcggcggcgacggaggcaggccggcggtgaagtcgtaaacgcccaacagcggcggcataataggccagccgtgtaggcggaggcaccagtcggcggcgacggaggcaggccggcggtgaagacgtagacgcccaacagcggcggcataataggccagccgtgtaggcggaggcaccagtcggcggcgacggaggcaggccggcggtgaagtcgtagacgcccaacagcggcggcataataggccagccgtgtaggcggaggcaccagtcggcggcgacggaggcaggccggcggtgaagacgtagacacccaacagcggcggcataataggccagccgtgtaggcggaggcaccagtcggcggcgacggaggcaggccggcggtgaagtcgtagacgcccaacagcggcggcataataggccagccgtgtaggcggaggcaccagtcggcggccaccgaagcaagccggc

SEQ ID NO: 26782 - DNA, 10410 bp, Oryza sativa
tttgagacgggtcaagatggagaattgcaagccaatttcaacaccaattggttctacagctgtgctggatcctgataaaaatggtgaagctgttgatcaaaaggaatatagaagtatgattggatctttattgtatctaactgcttctaggccagacatacaatttgctgtgtgtttgtgtgcgcgctttcaagcttctcctcgtgcttcacatcgtcaagcggtcaagcgaataatgaggtatttgaatcatacacttgagtttggaatttggtattctacttcatcttctatatgtttaagtggatattccgatgctgattttggaggttgtagaattgataggaaaagtactagtggaacatgtcattttcttggtacatcattgattgcatggtcttctaggaaacaatctagtattgctcaatcgactgctgaatctgaatatgttgctgctgctagttgttgttcacagattctttggcttttatctactttgaaagattatggtcttacttttgagaaaatacctctcttttgtgataatactagtgctatcaatattgctaagaatcctgttcaacactcacgcacaaagcacattgatattcgttttcactttttgagggatcatgttgagaaaggagatgttgagttgcagtttttggacaccaagttgcaaattgctgatattttcactaaacctttggattctaatcgctttgcttttcttcgtggtgaattgggtgtaattcatccttttggcatggtttgagggggagtttgtacctcgtggttttatcaagcaataatatgacaatgaaaaaattgataaaagagagctttgtttatgcatatggtattttcttgtgcatgctaacaatattttgaaggtgtatttgtctatagcatagcttgtatgtattctagtcttttcatgagatttagattttgcttttaagggagatgatgcataacacttaaattctacggcctttttttgggggaaaaaatttttaaaaacaaaatatgcaatgttgatgctagcatatggtttgatttataaatgctctatacatatgctttattgacttgttattcctcaaatacctttatttgctcattgtgaaaaagagaataaaaatataaaaaaatgaataccgaatccttggaaacagtcttgacgacaaggacgtattcgatgtgagcaaaataatgggtgccgaatccctggaaacagtcttgacgacagggacgtacccggaataaaagagaaaaatatgagcaaaaaggctcaagaaaagaaaaagttcaaaaaattctctggttattttgtgctaaaggttatttgagaaagagtgataaatgcaataggtatatgtgtttagtgtttcttcttcaacctatgtgcttgttaagatgttgcattataaatcgtatgaaatcatgaattttgattgttgattcaagcttcattgtaaaatctttggttcatggttatactttaatgcatgcttgttctgttatagatgggttcattttctttttattgcaacacatgacttgatatgctatatgtatgctaagctcttgaacattaatgaacataattcctatgcttgatgaaatcattgtcaaaagggggagacataatgtgaaaatttttggatttttggagaagcaaagtgaatttttgagaagagcatgtttttggttcaattgggaatttctttcttttaaaaagggagagaagttttcttttggatttttgagcacgatgtgtacatttgtacgaagtgtgctttttaccaccaaataccaaaacatttttatggatttgccaatgtgttcatcaagggggagattgtaaaatcaatggtgttttttattattattctgtgatgaacaattgggcattggaaattattggttttgttatttggaatttatttattcacgaagtggttttggagatgattggatttcacaggtgaatatacagatactgctgtgattttatgtagaccggtcagaccgggctctggtagccggtcagaccggcgtgtaatgcgccgtcagaccggcgcagcctgcggtctgaccggccgacactgtgtcggtttcggtttcgggttgtttatttggatatccgagtttattccatgattatgacttctagatggatactatacgcatgtaatactattgtttactgctaatgagtcaagttggagatagcttggtctcggaatatggtttctttgtttgtttcatgtgtaggtgactcgatgtctcgggagagtatttgcggtgatggaccgggagtcggcttggggataagacgacgtccgtggtggtcagagatcatgcgggatacttaggctagagttgatgcacgtggttgatggagattccatatggcatacgatggaggaattgtgtgcgtatgggatgcggagtcgaatttggaaagagtccaaatttggtacgattggttatgtaaagtttctttcttgtactagtgggtttcctaaggtgtttaggactcctaatatgagtttggttcatggctttaggctgcctacctcatgtataaatagagggggagcgtgaggcttcccggtatcgctttagagagcaattgagttaagttttgagttagggtttcgagtttagtcgaaatttttgtaaggagtgttgttggtgcactttgtaaacacagagagaagtaataaagtcgtcatctactttaagagttcttcgatttgtgtttcaccgggtttcggcggtttaaccgccgactcatcggcggtccgaccggcggcaaggcggcggtcagaccggcgggagcaaggcggttggaccggcggccgcagcaggcgcgacaggcgacttcggcggtcaaaccggtaaatctataccggtcagaccggcgacattcgagcggtcagaccggcagatcaatctcggtcagaccgacttccatcgatttcgagggtaacttttatttccgctaaaatttcttggtttttgggtataccaaccattcaccccccctctggttggcttagttcttgtgattcgatccaacatggataaggagtgtgtgttgggttgatgaatgatgaggagcgctgtgctcattaagtatcttgtctcctccagacaggatgccatgatgtaggtttgtgtgtattcatgtagcttgagtgattttcaaaggaaattgcaatctcattgtaatttgagtatgctaatggccaagaattgtcttaaaaagagggaagcaatggagtttgtgtatttttgaatggtgtgttctgcacttgtcacaaacagtgcatatacctctatagataccaaatattctagaaataattaaacacaacacttgcacacccatactcagttaatcttttaggtaaaataggctgtccaataagcaactctctccaaagatgtaccccaacaacagttctggcactcagtaccacaatgcaacaacttggctagtgataggtttcttgcttttaggattaaaagcgaaggccaacccaaaattagctatcgtaagttccccatcttcattattcaataatccctccaatttatattataagtcattttgactttttccaaataaaatttgatcatgattgtaaaaattgcagtgccaattttgtaaaagaaaatacatgtccatttttttagtaagtgatcttaaaaaagtgaaatcaaagattgcaaacaattttataccgtctatgagatctttcaattccatgctaagagcgacaagctcaatacaagtgaaaattaatcctatcaattgattttacgtttgctcaattttggaacttataaatatcaagacttcaccacagtttttttaagtagtcaactaggagaatccaagcaagctctgaaccatatgtaaccaatttcaaatcattagcttaaatatggttctatcgaagtataaccattgacaattttccgagaatgaacctttcttgttttagtgccatgtttgatatcaacaatgttcattattcgagaaggcattctatgttagacattaaggatctgtttgaaacacaagattgagaaagtgaaaatagaaaaagacatgattttgataggatgacaagtgtaaaaacataggattgcaaaaacaggaaaaacatgaatgaccgttacaatagaccataggaaaaagcaaaaacaattagaggagagataattaaagactcaaattaaagtttccatgaggatgaacctcactctagcttttttccaaaacttatgtggctccaagcatcaaataggaaaaatttcctataggattcaaatttgataaatttctatgttcttcctagaaatcaaggggctctatagctttaccctaggttgattcatgagccccaacataggctgcatattctatgttgagtcctattgaggttggattattatgaaattttgtatttcaaagtcaatcatttctaatgtgaataggtatctgatctttcaattggttcgatttgttgacatgaagatattcacattttgaggcttccgatcagacgatcatcacttgtaatcgctacaccccgcacttctcatcgttattgaccactctctcataattgacctcactaggaaggttatgtcctataaacattcaaagaaattcacaagaacaaggaaaagtgaaatctgaattgcagatgaacgattagcacttgaaattggggttgcacaaaccgaccttgcggcaaaactgcatagtgacagaacaatctaagcaaaacctaatccctaaatacgatgatggttgtctagcagtctgaggtcgtccataacaaaggctaactaaacatgactcaattagaacacccaagggctaaactatatttggaccgaatgaggtatgttagttgtttcgcagatttcgagaagctcaggtggaattttgacgtgagactataaccatctaaaagtagagttaaagacctatccaatctggagataatattggcaaggggatgatcataagaaaaggtgcagacttgctagatgggatattatttgccaatccaaatatcagggtggtttgggggttcataatctggagatacaaaataaatgttttttgagtaaatggttgcttaagttaataaatgagcaaggggtttggcaggacttattgaagagaaaatatctttataatcagtctataacccaagttgataggaaatagggtgattcccatttttggtcaggtctcatgaaagtcaagagtattttcttgaatatgggttctttgattgtgaataatggggaacaaacaagattatgggaagataaatggttaggtaatgtggcttttaaagataagtatccatcattatatgctattgttagaaggaagaattcttctgattgtttttcatggaactttaatcagaatggacggttctctgtaaggtcaatgtatctagttttgattaacaatggctatattgaaagggataagataatttggaagcttaagatgctgcttaagattaagatttttatgtggtacttgcttaaaggggtggtgttaactaaggataatttagcaagatggatttggaatggtagcttaagatgttgtttctgtatgaaaaatgagtcaacacaacatcttttatggattatcattatgcaaagtttttatggagagctgcacagttctctttttgtttatacctccctattagtatatctcatatttttgatgggtgactgttgggggtggacaagaaaaggagtaaacttatattggtgggagcttctgcaatatgttgggctctgtggttgagtaggaatgatatggtttgacaaatcaccatctatttcttatatgtaggtaattttcagggcaacatattagctccggttttgggcacaactacaaaggtgtgatgaatacaaaggtgtgatgaagacggtgagtttttaaaagttgtatgtcgtaagcttgagatgacggttatgcagctttttgccaattatggatggagattcacaaatatacttcaataatgtgttctcctgatcttgtattggttaaatttacctttgtgtggtcatttcattctatcatttttgaactacactcgttttagagtgctagattgtaataatgggttgtagctctttttgagcaaaggccaggatgtttattccattatctaaaaaaagacctatccaataattatttatgggcctaacaaatgcttctggattagcagctaggtccattttaatttgatgctgccaggagggtcgaattcgagtccgaaacatgtaaaatactatctcttgccttctagcaccttagtaatgtagtgacatggaaaaatactttggggggggaggggggggagaacttcagatgttcctaatcaacttcattgatcattcattgtctccatgtgtatgctcacctttgcttgataaatgctaacacttctgaaagggaagatacataaaattcatggtgcatcattctatgtccaaacatatagaaacaaaacccaatataaaacacatgcacattttatattatcgtgttgatgtggaacatgggaatggtcatatctaagccggtgatgttctcatcaattcaattctaggaactgtgcctatgccctaggacaaattttactggctatatttgtgcttgagtccatcttcctcctttctgctgcccattattttccaatggtcggaatgagaagtactataatcttcactagaaccattcttcaacacgacgacatacacgagactggtatggccatgttcaatttagattattgagcacattattgtcaaggattatctaataggctatatgtatcaattaaatatttcaataaataaacttaacattaaaacaagtggtctaagcacaaagtataaggaaataaacataataaatggcttaaaacatatttttttttgaagtgtggagcagatgatccaattcaataatctggtgaatattgttaagttaatgtatttctaccttgggccccacataggacttaagagtttagagaagtggttagccaaaaggctactaaggattgattgtaaggaaaaaaaatcataaccgctcaagagcaccatatgaggaaacaatgtgttattgagatagccttttccaaaaagaagcatatataactgttaacgccaaaatttggtaagcccaaagtcttcatcggcctagagtcagtatcgtcttcagagtcttggaatcggccaatgggagttgtcaagtcgccagcagttgtgttcttgatggagtcggatcaattaaaggaagcttatctagaagagtccgagttcaaggaggatgcgacatggcagtttatctattaattaggcagtatttgttagttcccttttatctttaggaaggtgtgtttagtgtccgataaggactttatgttttccttttatctctaggaaagtttctttcttgtcctataagaactagtatttacccatgggtataaatatgtacacccagggttattgtaatcaatctctcgatcaatacaactactctcggcgcatcgccaccctctttaccgaggtttttatttatcatctgacggaacttggcacctgacgcggggctgtatcggctttcgatatccggcgaaggggtaactcctacgttccgccagccctggtgaatttatcggctacgttggtgttgttcaaggctgcatcgcttcgatctcttggatctctctggtttggttgatatatttgcctacctgatatctcaattctatctctaattgcattgtgtttagagacgtatcggtttagttgggactgtctcggttaggtccgatcttctgtcttagccgatatatctctacaatcacaatgttgttgtaaatagatttgttatatccatcacattagacagatctatcggctcatcgagtattagattatcatatacaatctcgtgctgcatcggttaagttcgacctactagattgttgttgataatataaatcttgttaagccgataggttcatgctagtgttttatcggggtgctagccgataagttatctggacgttgcatcggcttataaggattacatacaagttgggtttagccgatcgtaacaaaggtttcactgtttaatctaatcttgtggattttatgacatcggacctccagccgatatatactttaaccttcggatcaatgcttatctgtcatatcattattagccgattggtttctattggattatattattgttatattttattatcatcagtcgattgtcttcatatcattatctacattgaacatatagcctattgctcaaaaccctatcgacattgactggaatcggcatcggctattatcggctatcggctggaactactctatcggcttatcagccaatcggctcattgatctactgtttacatatcttgtcagttgaaggatcaaactgactggcacgcccgcacctcactaagatttggacctgcacaggagctaagcagatctcccaggccagtgtgtgtttttcgcgttaacaataacacaaaagcttcaagcattacctcgtggattcaaaaccttagaatactttagggtaaaaactgaagcggtttccacaaaattgtgaaatatttcttgttgggcgtaagaaccaccaacattagggtaataaattctttaattctatcagattaattgtccatggatttcgagggttggtacctcttataattaatattcacagctcaaggaggggaaacaattcattgcagtacaaatcataagttgatttgtacatttattatgtagattttatatctatttccattaatgagtacctcttataactctttctatataatggagttccatatagagatacgatgctcctacatttcaagatgtctaagcataacctaggattatctatccatgttatctatatcatgtttgctgctcaccaaatcctgggtggaggatttcatctgaccaaccaagatgtgaatatggtaggcctatgtttattttactttttagtattttccattatgaactttgatcgttttgttttgacatgagcataattgcaaactcatgcccttttgatgatagaggaagtcaaattggaaagtgcaatttgtttcgatgtatcgatacatatatggcttccttttctaaatcttctactcctaccatatgtggtttatgatgaaatttaaccaagtgctaataagagtagtttgcttacttcatgctataaatgccttttcatcttcagacaaggtttggaaaatctttgcaatcaaaagttggtgatgccacaaagtcatatgtaagtatatatgcacaaccattgtgttttattttatccttatagaaattattttccatgattttttctctctatttcttttgcttgtttctacagatggccatgcatcagacatatgaggggacctactttgggtttgttgctacattggatgtgtatggatttgagattaattatagccaaagaatcatatcatcagtatggattgtcaacagaggtcccaatgacaacctagaagagaatgcaattaggattggatggcaggtaagcagttctccttgaaaaagtcagtaatcttatgtttatgttttgttcgttttcagcattaactatatcacattttttctaggtttttcctgaattgtacggtgactcacacacccacttcttcacttattggacggtatgattttctctacaactcaaaaattatattgcttataaaacatgtgtggccattgacctttttttttttttttgcatttgaaatagagggactcataccgaactacagggtgctacaacatgaggtgtccaggttttcaactcacacttggatcaaaaataactcctggtgatgtcataagcccagtatccgatgttgatggagcgcgacaaaatattacaattaaagtgtctagggtaattaactactccctccggttttattttaattgacgttttggacaatgacacggtctacaagatacatgtttgatcttatttttctattataatatatataataaataaatgcatgtttatttttattatagtactttaaaagaaaaatttatatatattgttctagttcctttaaactaaatatttttaaagttatcgatggtcaaagttataaaagtttgacctcaaccttgtccaaaacgtcaattaatatggaaccagagggagtaaatatatatactacaaagcataacttccatttatatactccccccttccctaaatatttgacgccg

SEQ ID NO: 26783 - DNA, 7209 bp, Oryza sativa
ttttgaataagacgaacggtcaaacatttttaaaaaagtcaacggcgtcaaacattttgggatggagggagtatattgttaggcatatgtaaatgctatgatcagtgctagctagtgaactaaaaaaacatatataaactcaatttacttttttttaaaaaaataatgacaggaaaagtctactggggattggtggatatactatggcttcaacagtgctccaacagttgtgggttatttcccagctaatctatttaccaacttatctgaaaaggcaactagcattttatttggtgggagtgttttagcagtagaaggtgcttcaacccctccaatgggcagtggattattgccatcgatcctgtctgacaaggctgcatcaattgaggatattttattagtcgatgaagatggcaaaatcgcaccatttgatgtgaagacgatcaaagacgagacctcagacctttgttatgccatgacacctatttttggtgaaagcacttcaaggtgcttatatggaggccctggaggttgcgtcgtcggttaggcagatttggcttcaactaatttttggcctctgttatgtatacatgttctttttcattgttgtcaatggaaccagggagttccatatatggagaaagataatttgaggccgcaccattggttgtgaattttaaagcataatactaattttcatattgtctgatcataatggagtatatttttgcatgtctaattcggtcgtttacattcctcacttattttaaaccaagtagtttacttgtagaaaaaaaaatcaatactagtcagcatgcacgtggatcctacgttgacatatgagaatatatcaacgttgacagttgttaagtaccgatttcgaccgtcaattatcttaacaaataaatatatagaactagcatttttacacgcatatttgtttcaaataatttcccttggagaatattataaatacatggattggctaccaaatgaaggagaatgagccaacatgcaaagaaacatatttccggctaatcacaagagtgcacacagattgaagggcccatttagcacatacttgacaaggaggaagagcatgggagacaggggatcgccctgctagagcccccctacagtgtaggaaatggtggctcggtaccccgttgaccagcacctgggaagaggagcaacggagaatcagggagatccaatcacgccatcgactgctgaacacaagataggtaagcaccttgagcaggaacagccaactaacttgtcaaaggccttcgcaatgtccactttgaggagcagatggggcgtgcgcctagcatggagtgccttggccgcaagctggacatagcaaaagttgttatggagtgaacggcctttgacataagcacttcgattaaccgccaccagctcgttgaggtggggagtgaggcaggacgctaggaccttagaaaacagcttgccaaaactgaagatgaggtttattgggtggaaatcgttaacttgaacaacctcatttttcttaggcaagagagagatgagggcatcgttgagggaggcgagaccatggttgttcgccagaaagagggtgttaagggcaaccagtatttccacttgatcattggccagcaagatttgtagaaatggcttgtgaaaccattatagtcaggcgccttatctaaaagtagctgcttgattaccgcccacacctcatcctcagagaagatgttgtctaggccagcaaagtctaccgaatagagaccaagagagtgggggtcaagacaaaggtctcgctcgatgaacgtccccatgacactgcaaaagtgagtagaggcaagcgcgctggcgcgtgatgcagttcctctgccgcctggccttagtgtgaagatggaaaaacttggtgctgccgttaccctccttgagccaaacaagacgcgaatgctggtgcgcaatggtatgctcaactgaagcaaggtcaaggcacttcaacttaaggtcatgccataaccaggactccaatggagagatgggcgagactcttacatgacctcgagccgaaatataagctcttctccattagcaatcgaagatagacattgcccacgtgctggtagctctagctctgcaagcacttagctgtgttagagaaaccccaagcgagtgctgccattggggaagatgggccggtagttgccactcgtcctacacgacttggaggaagccgtcgaacttaggctagatcgcttcaaagtgaaagcgatgtgctttcgacgagaatcgcaagagtaaaggagtagagcacagtgatcagagataatggaggaggccgcttgaaggagacaagatgggaaaaactcctcgcaatccgtggaaaagaagacatgatcaagtttgacgatcgtgggggaatcgcgctctatgcaccaagtgaagcgacggccatggagtggcaattctcggaggtccagctcgtcaatcagccgtgaagcggcccatcatgctacaattgaggttcatgttgttcttgtcctgggcctcaagaattagattgaaatcactcgcgacaactcatagccccatacgagaagagcacaacgaccgaggctcgtcaagaaaccaaagtttgtccatctccccctgtggaccatagattacaaagagccaccagggggtaccgtcagagtggtgatgaaccaacgctgtttgaagaagtcagcatggtgaatgttggagatagactagacggcggtccgccaagcaagcaacatacgcccactccaaccgatcgcatgcaaaaatgaatggtgaaagtccaggcctagcatttccaaaataattcagggcgagattacatccattttggtctcctctagatagagtagcaagacacattcatcacggacaacaacttggtgggcacgtgagttcagaccctgcatgttccacaccaacacattctcattgcatgatcccatagaggaggagccatacacagagagagagagagggggggaggtaattagtcgtagctagagaagagcgaatacatggcaatgacgtgatcctgagagaatagtgcgttgtaagctgcaaatgcctcggccgagacaagaccctccttcagcactagccctagcttgcgtatcaggttgcgctacacacacgagaccgtgttactgggtccagcgagcatgagcttggccgccatcctcttgttgcacttctgcgctacccccacgactgtgacaacaagtgctataggcgtgggtggtgggagcagcaccgaaggcaggggcttggagaagctggcgaggaaggcacgctacgcggtgttcgccacgatcgagggtgggagcaaatgtgtcatcgaccggccgtcaaagtcgaggactaccacggacacgtcgaacaggacatgtcacaacctgaatttccgttttaggatttataaattatttaataaattattaatagaatttatattaaatgttcattaatttacaagtgaagttaaatgtgggaaataaaatttcctaaatgtaaagcatggttggatttaatttttattaaattctccatgattaattatactctctgaaattttctcggaattttcggagctcaattcctaatgttaataatacaaagaacagtttagcaattatttaaataataaattaatcattaaatgatctggatattattatattaaatactttgagtgtccaagtatgttcaacatttttgttggaattatttgagtattggaagtatttttaacaattgaaagatcatctcattggttaatttatttggaaaagtaaataaaagtcctcctcatcagcttgggccgaatccagcccattccctcctttcccctctcccttcctctcagcccagacaaagtctgtttaacctccctggcgctacagtactccatcttcctcctccagccgactgtctcccgtgccgtgcacagtaccgccgattcccttccaaaatccggccacctcgttgctcctttttccaaattagttgcgggaatggaattctctcaatctcctcttccttttccccaagaaatacccaaatgtttctatggaaatcctttccaatttcgcggttcaacctttcctttttccggcgaagatctaaactttcccgagtttttcccgtcgttgtgggctcgataccggcctcccatggctatataaaggaccccctagtcgtcctctacctatcccctcaagtcccgtccgccgtcgtcgccggaatcgctctccccgcgctctccctctctctccacctccggccgccgctccagccgccattcgccgtcgccccggccgtcgccctcctgtgacgccacctccctcggcttcacagtgaagagctctaccccggccacccgttcttttgcgccgaaccccgccggaagtcgccgtcctcgtgaaggccgaaccgttgccatgttttgatctccggcgaggccctgctgctcatcccgtcgtcgccttcggtcgccgtcgcctcctttgggttcgcagctgcgaggtgatggccgtccacccctccgttgtcgccgcacatcgccggaaagtcgtcgccttcgaggacagtacctcgccacccttcgaagctcgtcgccggccatctttcgttgccattcgtcgtcgcgtaagtggtggtaagggtcactttgatcccctcttcctcccagtgccctccgtttgcattattgtaccgttgttcgccggcaaccgccgctcccatgccgttcgccagtgtaggtttttccctagggtcttaatccaatataatctaatccgtggtttgtctagcgttgtcgtctccatgtgttgctatcggaacgttgtcatcatccctccctctccgatcgttttggatcggtgagacgtctatcattgtctcattggtttagatttcaacccatcggccgcgcttgccaagccgcttcgtcgcaaccgcagccgtgcccgttgcgttgttgttcgccgcgctgctgccctagcctgtgcaccgtcgctaccggttgtgccgttgttgcttgccgtcgccgctgcgctagtcgcctagtcgccgttgtgccctccctgccacagtcgtgttgctcctgctgtgcgttaccgcttgaccgctagctgttgtttggccgttgctcgtgtgtgccaagttgttgccgtcccgctactgcaaccactgagccactggtcgccgtgctgtgattgtgtcgtgccgtgccgttgctgctatagtgtgtcacggccgtgcgtcacttaaatctagccgccgctatcccgcgttgtcgttgttgtggtttgttcgatgccgttgcccggtagccgagttgcaaagcctaaggtgcatccctaaattcctaccggcctatcgtttgccataccggggctttaccatgaatcgtgtctagcccaccggtttagtcgcagccgttgttgagttgttcgctcgttcgttcgtccgtctggagtcgtcctttagtttagagccgttcagagccgccagtttcgttcgccggtttcggttgatcatttgggtgatcccgtgtcacgtagaattgactcgttgagtcggtatctcgtgaggttcgcttgcaagattaatcttagccatccaaaatcaatataaatcatttcctctcttttcagtggcatattatttctttttaatatatgtcatctaccaaatatagtctaatctatttccggaggttgctttaatcttttatctcagttataaatcttttgtaaattgtttaatcaatttggaatagtcttttctttaataggcattaattggaattaatcttgtaaaattcataattaattcatatgaagtcagaatgaggccgttcaagtctcataattcatctaaaattatgacctacatgtttgtttactttatatgtattgtttatttggtttttattagtcttttttctcgttttacgtgttagcttggcgtttccgtcgtttcgaaggatcgtaagtgcatcggaagtattcaagaagattaattgaagacccgttattgcaaggcaagtcacacagatcccaaacacaattcctttgagcatgttgattctatatttaaattctctatttatttcaactgtgtatttatttttgaatgtcaccgggtggtgtgaacctattcctttgttatggccagtttgcattgattaccctatttcttgattatctcgggttataatttgactagttggatttatatattagttcaactagatgtattagatataattgcttagccatgcttagaaacattagcatacaattgggataactaatgtttcactactacttaatgatggacatgataatggtagctcacgatggtcaatcgtgattggttaattaattaatgtgccaactaaaacttgataatggtgggttgtgagcacatggttttgatggtcgtgctcataacaattaaggaccggttcacgagtttcggttgtgaaacattaaccgtgtcaaccacaagccagcgtgggcaacggctttacctattgtatagcatggttcattgcggggcaccagactgagaagtggcggagataagtccacgggggtcgctggggagtccatgccttgtttataagggggtgattatgatccaggaatggtgcgctgtggtggattgtgttgtgcgtggggtactgtcacagctcctttccgaggtaccgtggtggtattgaggcacatggtgacatgttgtggggctgtgtcttgtgggtacagtggtacacctctggccagagtaaaactattcgaatagccgtgcccgcggttatgggcgggtctaacaatgtctttcgtgattagtctcacacttcttaccataataaatgatgctataactggtaataatttgattagctcctggtttggaatggtacattcctggtttggagatagatctgtacagccgggtatggttgttcaggatggttgggcttgtgcagcatggatgtgctgttcagtgattgattaatattgatgattaattactctactgttttactactcttaaatgtttgctaaatgctgcttttgcaaatgagccatatattatgccatcctttggtatccttgtgcacttgcatatttgctgtgtggcttgctgagtatgtca

SEQ ID NO: 26784 - DNA, 14957 bp, Oryza sativa
catcgacttgcttcttgacttccgccaactcgctggctcccattctgtaaggcctcttgtggatcggtgcagttccaggtaccaagtcaatccggaactcgatatccctttttggtggcattgttgtcagatcgtccggaaaaacctctggatactctctgactatgggaatatcctccagcttcttagtggttttctccactgctacctcttgttcttcaccagcagcctggtttaaactgatccttggcttctgcagcactggagactggaaggttaccacctctccttttgcattggtcaacttgatggtgcggctggcgcaatcaatcactcctctatgccttgtcaaccaatccattccaagtatgacatctaggtccttggattcgagaagaatgaggttggctggaaaaatcaacccttgaatttcaactgtcacagctgggcagtagtgagttgtggtcatgccacctccaggagtatgaactcgcattggtatcttaagcttcactaaagataacccatgtgcaccagcaaaacgcttagaaatgaaggaatgagttgcaccagaatcaaacaatattactgccggtgtcgagttgacggggaatgtgcccaatataacctctggtgctgactgcgcctcctctgcagatgcatgattaacacgggcctgaacgaacttgggtccagcacgtcttggcttcgggcactttccaaccgtgtgtccgggttggttacaattgaagcagagttcgggtttttctcccaacctcttgggctgttctggcagagctggctgagctggctgatctgactgagctggaatcattaatagacttggagtcgggttgaggctgctgtgactgccactgttgttgttcttgttgaaattacccgggtggtagggacggtgctgtcggataatcatggtggaaggtccaccctgacgtcccatcgtgaaacgaggcttctgacacttcccctggggagtcctgaactgggctgccttcctcttacggttcattttgctacactgctcctcttgacggatggccttgtggacctgcttctcaaagtcctcataatctctagagatcaactggttagtcaattcatcatcaagaccagacaaaaacttctcctgcctctcggcatcggtacgcacgtcctcaggggcgtagcgcgcgaggcggttgaactcatgcaaatactctataactgttctggttccttgttgcagggagcggaactctctcttcttttgtgccacaattccctcgggaacctgtgctttattgaaactatgacgaaactctgtccaagtaacctctgccccagctggacgggtcaccatgtagttgtcccaccaaatagaagcgggaccttgtagctggtgtgtagcaaaagcaaccttctcctgctcgttgcattgcaaaagattcagcttcttctcaatggcatgaagccagtcataggcctcgattgggttggtggtgcttgagaaagtgggcggcttgacacgaaggaattctaacagtttggactgaggaggtggaggaccaaactgcaggttctgttgctgctgctgtgcttgctgctgcacctgttgcaacacctgatggtactgttgctgcatctgttgcatcatcattgtcatcatctgagtctgattgtccaacacctgagcaattgttgggttctcgggcggtggggacggactgttgtcagatgcaccgttggcacgtgctccattgatcggctcttcgctgccactggcgttgttcgagtcgcgtgaaccattccttatctccatctgaaggggataggtagaaatatgagaaaaggaagaaaaacagggggctcagaaactaatcttgcttatgaatttaagtgcaattatcttaatcttgattaaaacactgaaaaagaggcacgcaactcctaattgaggcagtcataccactgacacatgatatcgaccgccgactaacccacaagcaacaaacctaaacacgaaaactagcaagcaaacagactaagaaggcgataaagctaagggaggcgactctgaagctcggggcggcgcttgcaatcgagtaggactgacatctaaagtagacaagggataggaaccaattcatgctcaaatccaaattaaacgaagcaacaaatgactcaaacgaataactgaacatgatgatttttatgcatagaacatttttcatgaacccaaataaagacactaatgcaactaaacaataaattaatgcatagactagttgcatggaaaatgatgcgcataacattgcccccatcgaatatagacacgacctaatgcataacccccaataaattcccgactgactgtcgaataaactccaactaaaatttttctaaagccctagactgagctaatatttttttaaaaaaaaaaatccgatccgaatgaacgaccaagatttttcccgcaaaccaaagaggcaaaactccaaattttcccaaaacaattccaggagcaaaaaggcatatgcagatgaaaaaggggttcagagggctcttagggtttccagttggcttgtcctacggtcaaggtcggctctgataccaacttgtcacgcccagaaattctcaaaccagaatttctaagctgaatgtgcattaaatccctgtccaggaccagccagggtacacaaacgataattgttgacatccagatccacgtcttacaaaaatagaaaagattacaaatgcagcggaaaagataaaagcgagctaaaccgggaagcttgacttcagcagcgagcggctccactccacaggcaatccttgacggcagcgacgaaaccaactttgacaaaacagctccaactaggaagatcttcagctctggtgtgggggaaaagagagcaagactgagtactacccactgtactcagcaagtcataccggaagaggaggtatgatgcaggatataaccaaaggaagctaggggttcttttgcataaagctagcatttaaaaacagtagttgaaagcagtaaaacagctgtagtaattaatcaatattaaccaaacactgtccaacgctacaccacgttgcaacaggcccaaccaaccacctgaactacaccagttcattaagctaaactaggggtgagactaatcacggtgaatctggttgatcgcccataaccgcgggcacggctattcgaatagttttactctggccagaggtgtacaactgtacccacaagacacgattccacacatgtcgccatgccccgaagtatcaccatgatactgcaaagggggaaatcgtgacaagaccctccacataaccctcccctaactatccacaccacgctaaggtttcacccccacccctcaaaaggcagtgggcggtcccctcttgcgccgcggtgaatccggcagctggacaaccggacaccccggccgacccaactccatcacgcccaccctcgccaccggtgcctaggaaagggtcgagctatacttcagatcaagcagttacccactcccgcttgtggtaagcacggtaagtctcccagggtttcccgtgaaccggtccttaattgccatgggtgcgaccagcaaaaccatgcacccacagcccaccattcaatgtattttaattaactaacaccattgcggtggcaccaatctaaagctatgccaatagacaaagtctatgtaaaaatgtgatccccattagtgtactagttgaactaagcatggctaagcatttcctaaaccaacatctaatcattttgatacccaggttatcaatggcatatggtaaacaataaatggttgagtaataggacccatccctcattacattgtaaaagaatgcaacatttaatagaaatgcgggatattggtaaattgggtacaatatgatcaaaagtattgcatgactttccttgctctcgcactgatgagacctcagcaaagtcttcgagaaaccgcggatcgacgaaacggccgaaacctacgcgacaaacaaagcacacaagcaaaacatgctataagactacagaaacaggaaacaaaaccatttttaatggattctttgcatttttcttgatttactgagacttgaatggacttaaacggagctcggatgaattacttatgaattttagaagataaactgtgtttttactaataaagaaaagtccttaaatcaatttattgcgcaataaagcccagggctgacgtcagcgaagggggggggcggcgccgacaggcggggcccacgggtcagcggttcaagagaggggagagagaggcgccggcaagcgggcccactgggcagcggctcaaaggggaggggtggtccaccggctggtgggccccaccgggcagcggcacagggcgggagaggggcgtggctgctggcttggcacggctcaagccggccggccatggcgaggcgacgacggcgcacgaccgccggcggtgcggggagacggcggcggacggcgcgaaaggcggcggcggacggccggagcggcggcacggccaaaggcggcggcgcacgcgtgaaggggagaaaagggagggggagggaggcatcggccgggctcagctcggcctcaaggccgaccggggcgaggcggcggcgaggcacgaccaccgacggcggggaccggcggcgcgggaagcggcggcgacggccgaaaggtggcggcgcatggccgaagcgcggcgatgcacgtgcggagggcggcggcaagcggtggcgctagcggcgagcggcgtgggctcgttaggagacacgggaggggacggcaaatggggaaaacgagagagggagctcgggagagtgatttaatgggcgaaggaggggaggacgtggccgggaaccctcccgatttagccggcgacgtggggaggagagagagaaagaggggtgggattcgaaatcgaatcccgccctctcgagcgcgcgcgcgggccgggagatgcgggggaagaggcggcgacgtggggaggacgcgggagcggcgcggcgtgggcgcgggaagagcggaggaggcggcggcgtggcggattcggcggcggttgccgtcggaggcgggtggctggaggaaggggacgacctgacaggtgggccccacctgtcagcgttccggagagagggggaaagggaacgggccggcccacaaggggaggccgagcgcgggcgacgggtggactgggccgacggcccaagaagaggaaaaaggaaaaagaaaaagaagaaaggattttcctgggattaaaattgcactttggtgatttttaattggttaaaattatttccaaggctctgaaaattccactaaaaatcttgttaatgcattggagcatggggaactcaagaaaaattccaccatgccaattccaattattaattgcatttattagttagggaattagctctaggttaattaagataatttcttcgggcaatttatttaacaaatttttaaagcaaggagagggggaaacttcagggcgtgacacttcgctagaccgtaattccgctgcaattttcttttcttttgtaagtatgtaacgttattatattgatgaatctgtatattaaattgtcagtttgtgtacctcggctgattcctggacgaggatttaatgcacaaattagttcggaaattactagtgaattttcgggcgtgacaggacccgtcccccacaaccgaagatgaggggtcggccggcagagttcccggtggcaagggcaagaccggcggccatggtggtggagatggagcacgcccagagcccctgaaacccggactagaccgaggcgacgaaggagacatgccgattgctagagggcgtccacccgtcttcaaggcgccgtcagccaatgaggcagagagggagagagttgatgttgtctccatcatgggcaccgcgccattgtcgttggctggtgggtatggagaagcctgaggcgttgggggagccgcaccattgtcgttggctggcggtaaaaggaaagccagagcacgtcggggaggagagagactccggaggcacgaagccagtgatggagccgatgatgtcggttgaggaaaagccggtggcctgtcgcccgtcggagacgctgcaccaggtactgagatggtggccagcggtccgcccgtcacagaagccacactatgacgacggagaacagtagcctgacggcgtcatcggaaaggagagctagggtcgacgcacgacgacgaccagagtggctggcagagcgtcgatggcaccatacaccagaggaatcggaggtccgttgctcctcgctagcgtcacaccgtaggccgtcggaggagcacgcatcgtttgccgcggtaggggtgtgcattggagaggagagagctgccggcgccacgctgtcccggtgagccatcgtcatgtcccctgcagcccttggtccaccgccattgggcctgcacgaggcgccccaggcgagaccgcgcacagccgaggtagactgttcctttgcgatagcccaatatgcgagggtggcccaagtacaggggcggcccaacaggtggcccgaggagtgaagatggcccagagagcagagccaacccaaggagagagaacggcccatcagatggagatggccgagaagagccagcggctcagcaggtggaggcggcccaaggagaggtggaggctgagggagtggggaagctgcttctcgaagcccggtctcgactcacatgggatccggtgtggcactagacacaatggtcggtgccacatgtcggctcgccattgcctcctcatggggaagaccctggtcaaaagaaggaaatggaaaaacctcccatttttagcaccaggcaagccgccggcgagggcgaatctagagcacagagaagccgagtgcacacttaatttacacaaggcactcaggggttgtagctgttgggcatttgggcagttcgggctgcacgtaagcaatttggccttcatgagctgcctgcagcctgcaggctgctgggtagctgaagttggtacgagtattttttttctagagtgcacagaaggtggtgaaaattactaccttcgtttcaggttataagactttctagcattgtccatatttattgtttcaggttataagactttctagcattgtccatattgtccatatttatttatatagatgttaataaatctagacacataatacaatactagaaagtttaggaagtaggtgcctgctaatatgattcatcagtgatcagtgcataaaaacctataatgtttgtcaaattatatacacacaatagcgacctcgacaaactaatatttagtagtatatatagtataacaaatgatgtcctccatacatgccaacaactaggaggaggacaccaaagcatgcatatatactcaaaacacatcaaaatacaagtaatgaaacacagccacactgtacaaagccaaacagacaaagctcatcgttcgatccgatcatcacttgccgtctccggggacggcggcggccgtgtcagcggcggcgccgccacgttgctgggaggagacggcctggacgaggtggtgcacggccttgtcatagctaacgaaccccatgaaccagaagtcatgcgagtccaccgtcacgacgtgcacgtacttctccggcgggctctccttcatcgtcaccggctcggcggcggcgaccttggccaccgggatcatcaccttgtagtagctccacgccgtctgccccgagggcgccgcgaaggagagcggccggtcgctgcagaacgcgacgctccggtcggtcaggtacagcgtgccggcgacggggcccgtcgccgtcgagaggtagcaggcgaacgtcttcctcagccgctcgtcggcgccggcgccggcgaacgtctgcttgtagagcttgtcgaagccgccctcgctgagggccttcgctcccaggctcagcttccccatcgccgcgtccgacatcgacggcgccgtcttcactgcaaagaggagcgaaggaagaagaaggtgacacgtcagcaacctgttcgtgacacgtgtcgctggtcaaaggacacgtggcacacgtgatctgaagcagagaaggtaactctgctccggcaactagaagcatcagagtttgcatctaattttgcatttctgttgagtaccagtaattactccctccgttcataaaagatgaaagatatatttatttcaattttttttatcaccaagaaaaaaattaacctcatccccagtctaacaaaatagaaaaaaatctatatgcatacaagaattaaaataacagcttagtttagattaagaaataatttaacacaaagactacacaactataattatctcttttagaaaaactaaaaattgaaacattcttaacacttttggactttggacagatggtgtggttctatacagttactaatcctagttgatatctttcaataaaaatacatcaatattcaaacttgtttcctgaatcagactcaaaaatccaaactcttgatccaaaattaaaagcttgttactgccacgtgtgggcgtggctggtcaaatcacacgtgagcagaagctttggcgcaagaagcagagtaaaagtggtaatcctaatcaatttctcctcaaataaaagaacaccaaaattaaaactgtcttttgtaaatcagactcaaaacgggaaacattttaagcaaagatttgagagttttggatcacttacggttgaaccagatgttggaggcgagctcctcggccttgcggctccaggtgttgaagaagtcgaggatgtgctccatcgggctgtcccctctctccggccgcccccgcggcggcgccgccgccgcctcgcccatgatgacgtagggcgggagctcctggtcgcccctcgccgccgtccaccgcgccgcctgctggttctccgggtgcgccccgggcgccgccggcgggcccatctgcctcgtcccccacttcgccgcctccggctgctgctgctgctgctgcggcggcggcggcggcgcgttccccgtcgtctgaggctctgccgccggcgccggagccggagccggagccggggcaggggcgggggtggtggtggagtccttgccgtccatggctgggtgagtagctgtagctacgagagatcgatgaggaagaagggaccgagagagagatggatgatgctggaattgtttggaaattggaaagagcagagatgaattggatgagcggtgtgatgggtttttatagcgtgggccgtgctgtcggtttggatgattgggatgtggattttcagtatgttccttattgcttgcatttttatctaaatatttataaaaaaattaatttttaataaagatagattaatataaaatatgtcactacataaacgtatagtcaaaattaatttctacaagttgaaaaaaataaaattggaaataattatcggatatttgtagttatattttttttacaacttgtaaaagttgaatttgtgttagcatatttgtgtaatgatatattttatattaatttatcttgtggctttttaatattttatctataactattaacatatacaaaacgagaggacatataatcgagggatgaaatcacttttccggatgattggcttatttgtggagaggcctcctgtttacctctgtacagaatccgttgtctaaatttaaattttgaaatttagttgtacaactgattttaaagtattttttatcaaaatttattttttataaagatgtgtaaatcgctaagaaaacatatatcaaacttttatcaataaaatattgttttcatgacatattaacagtatttggctataggggacggagccaattgctgcggctatcaagtttaatctggtaattacttaattcttttaccattttaataaatttaaaattaaaattttacaatttcaactataataactttaaaagtatttagtttaatgatcctagaataatatttattagacatgttcgtaacgtgcaataataaaaaactatttatttattctatattataattgaaaaaacatagtcagagactcccagtgtgtacttatgttgggactataaattttggaggccaagtaattattatctaaaacattagtatgaaaccggagactactgtattaaacacgaaggcccgaacgaagggcccgtttagtaaaattttatcccaaattacattggatatacggatacatatttaaagtattaaatatagtttaataatgaaaataaattatagattccgccagaaaactgcaagacaaatttattaagcataattaatccattaatagtaaatatttactgtatcaccacattagtaaatattcgtctagtaatttcctgatgaactatgtaattgattttttttacattaaatattttatgtatgtggtagcgtgaaaagttttgtttggaactaaaaaggccctaaattggcaaactttaaactagtagcacagaaagtgaaataaggaaatgattaattggagagagtagtctgagtcaaattgattttcttcgcgagcaagaaccttcgaggcgcggcatccaactaatccacgaggatgcagcgggcctacgtggacacccggaagcttagcccaggcgacaacgtgtcctccatcccccttcttttctttttccttccgattttattccttctgtgaagacgccgtcgtcagattagcgttgctcctctctctctctctccaatgtgaacaactttttcttctggaggcgtcacgcggtggcggttcggccggcttccacgtgtcacgccgcaggaaaaagagaaagaatcgaccatcacctattcctaggggtgggcatataaaccgagtaccgaacctgaaaaaaccgaaaccgtacattgaagactgaacactcggtcatcgtcgtttgtttaagcatagaaaacaaatggttaattggttaatttgatccataccattgaaaatatggctattcagaaaaatatcattttaattcgcctatatatagccgtgtcacttatattttacaaaattaggaccattccattgccagtgggttttccgtcttctccctcacctctacgtgggacccacgtatcattttcgtcttcttcctccatcctcctctctttttcttctaccacttcttcgtttcttctttctgtgaacacaagtagagcacaaggaggaaaggagcagggcgtcagtcctcccagcaaccacagagcactggaatctttggctctttgcagtgtagcaacgcaccctccctgacgagcttcggactgaccgcggattaatgctcaagcgctgcggcaagctgctgagcagcatccaggcgttcacggccggcgacgactagtacccaagcctggtgtccatggtcgacgcggcgacgttcctcgctgacgagctctgagctgagatgaggcgcgcgcacaaacgtggaggtagatcgagtggctggtgttcaaggacctcgtcgtcgtgcagatctctttctcatcgtcgtcttcacaagaagagtgtgaagaaagaagcgtcgccacctcccagccaccggagcaccggcgccccactcctctcctctacctgtgaaggaagaagaaacgaagaaatggtgaagagaaatggaaagagaatagaagaggaggatgaagaaaaaagataaatctgatggatggttcccatgtatagatgaaagagaagctgaaaaacttaacggcgatgacatggttttaattttataaaatataagtggcataattataaataatcaaattgtaataatatttatctgaataccattaaattaacccaaaaacaaaagaccgaacatactacgatcaattcggtcatcatgcctggctaaccgaagagaccgacaaaccgaacaaacaaaatggcccaataccccatcaacccaattgaagcaagcaagcagcccaatgggccaatctcaactacaccaatcaaagtagtccagatccaaaccctagggcctaggcagttctctgcagggcgtccagatccaactccccagcgccatgcctcagttggctgtgtcttccgccgagcgtgtgctactgctaccgcgccacccccgacgcgcccttgttccgccatggagccgctgtccaccgcgccacaccgtcgcccgtcgccggccgtcgcggctatgttttgccgcgaagctacctagcttccaccgcgctgctgtgccgcatggaatcatcctacgcagcagagggggaggtcttcactcttcagcggtaagaagatgtgaggctgtacatgttcggtcaactcgatttagaccgaggaccgaaccgaactatcggttaaccgatctgtcggtcagtactcttctataggtgagttcggtttccttttctcaaagaccgatctttttaaagaccgaattaaccggaccgacctttcggtctacaccgaatacgcaccactagctgttccattccctctattttgggccatcggtccgccaagcgatcgaactggcgggtcggcaatgggtaaacaatttttctttttttttttttttgaaaaattcacttttactctcttcactgttggctgtatcttatttatgccccttaaccacaaaactgattatattgacctctcatctattaaaaaagcagtgcaaaaaatgattcccacagttgttttaagggtgtttttcgcttacgtggctcgttgagctgatccaactgactaagttagcatgtgggcccacatgtcagtgtcgcctcctctttctcttcctctcttctctctcttttttttttctcccctagctatcctctgactccgagcaccatgcctctcccatacggtttttcaaaattgatggccacgaagccctcatccaagccgactactcctgaactgacatcgttaccaaatgatctcatcttttcgcttatgcttatgcttatttgccaaaatttaaattttcaatcttaaatttaaatttgtagttgattttagagttttttcatcgaattttatttttcagcctttgcttttatatcgctaacaacacatacatagtttctggttaattggttacaaagtttataattttttttctacgaggttgtagccttttataatcttcttttgctgcaaatactattcttcctttataaaatacactactaggcaaatgcctggtagttttctcttaaaaaagttttatttataaattattttttatttgtaaatatgccatgatgtgtttgaaaaaccctactggctgtcagtgcccgagatcaagtcgaacaatacggcttgagatcggctacaccccttcccctggatcaacatacagatttttttagataatgggaaggatcaacatacagatggaagacacggcgtggtgactaactgacaacggattcaaacggtgctgcatatcttctgacaacatggtggatcgacatgcccagacagctacacgtccggaggcaattcaacgactaccagcacacaaggagttcaatttaggagattagaatggcttaaaattaatctattgattttatagatatagccaacatatatctacacaggtacacaatattttatatataatttaccgtacctattttcagatccatacaatattgtcaggtgcgtaatttattatgtttacctaaaagcatgttttttttacgatatctgttatgcgaacgtctcctatattaggcctatacggtctaatagtgggggctcgctatgtttttctatagaaatcatgcttgtttatggtttacataatacatgatatttcatccgaatatgctcatatatcatgattatactagaagatttagttttttgagtacgcatttggtattctctgctatatatcttgccttctagaaaatacttttcaggaacaatcgagcattcgagtagacagtggtcgagtacaccccgtcgtcgagaactaatgcggagttgtcgaaccaaatctaccaacaaaaaccgatgacatatctcacatctaacactggtcatgtccggactatttgtgaaaagggtgttgaggacaatctcttcacgaaagttgtcagcttgatcatccgacatgattgcgaatggacatccgatatatatgctactagttgggtatgtgagtcatgctggccacatgatatgtacacgtaataaccaactctagcacccctaaaagtggtcgagggatgactatgtctggtcctcgatcagcgttgtagcgatctctcaccacctatcaaagttaccttcgggtggccgagaaatgactttttcgacggagtagatcgcgactaggtatttgtagagtatggggatcgttattaccaaggtatacgcaagattgaggtaaaagaggcggagacatggacttttatacaggttcgggccccttatatgtaaggtaatagcctgtaacgccccgattttcgttcgggattaaaaatcatttaataatgcatttcctagaaattgaataaaaagttaagcaatttaatcaagtgaaataatgggagaattaaaattttcccttaaaaatcattggccgggaatattttgcaatattctttgtgccctaatgtactctccggaattttccgtgaattttcggagctcgagaaatagttttaaagtcacgaagatcatttaaccaattaaaataaaaagaaaacaaataaaatcctccctcctctctttgggcccctttcggcccaattcccccccctctctccctctcgggccggccttctccctcggcccgctcggctctctctctccctcaagtctgctttgcctccccagccggcctctccctccctctctcttccgacaggtgg

SEQ ID NO: 26785 - DNA, 19045 bp, Oryza sativa
aaccaccccacttcgcccacgtcgccggagcccactccgaagaccgttgccggtcgattccgccctccgcggccatgatcccaccgccccgagccaataaaaacgatccccgtggtctcctctcccatttccccaactttcccgagctcccggcgccctcgcccgctctcccctcgccaagccgagcagccgctgctcgccggagttcaccggccgcattttcccgccgccccagccaccaccgcgccgcgccgtgtgtgccgtcggcttcgcctcgccgtgccgcgccccggcctccactccttttcccccaaaccaccaccgaaataccaccccaccgtgaaaaccgagccgccgctcttccctccgtctccagccgctccccgccggcgataccgacctcgcccggtcgtgcggctgcctcccacagcgccgccgctccgtgccgcatcccggccaccggcccactcctcaaatccacccccgaagcaccattcccgccgcaaacccgagccccaccactaactgccgccaaccggccgcctcttgccgccatccccatctacctcacgccgcgccaccgcctccaccgcattcgctgcatcccaccgcccctcggccgtggctccgccgtggtcgggcgtcatcggaacgccgttctcgtcgactcccgtgccgaccgccgccatcctttccgccgccggtcgcctctccgtggtcgtctcgccgtcgccgccctcggtgagcactcctctcccctccctctttctccccttggccggccgcctcccgtgcttgcgcgcgccgtgccgccgccgccggtggccgcccggcccgtgtgccgccgtcgcttcggtcccggccgccgccgccgccagctttgtgtgagcgctggccaggccgcgccgcccggctgtccccagccgtccgatcggccttggccgatctgggccgttcacgtggtggacgcgcacccgaggcacgtgtggaccatgtccaccatgcgccctccccctttgactcgctgacgtgtggggtccgcgtgtcggcgccggccgccccttgctgacgtcagcgaggaccatttcctttgtaaaaataaataataattgcgcaataaatcgagtttaattctagaaattcatttaaatggctcaaaatttctaaaatccatatctaattcattcgaactccgaattgagccattcaacttgcaaaattcatctaaaattgagctctacatgtttgtttagtttttatgtactgtttccttggtttttattagagtttttcctcgttttgcgtgccagcgtgtagtttccgtcgtttcggaagtccgcggtcgcgaggaaaagagttcggaagattgttttgaagaagcaaggcaagtcacacattccccttgagcatgttgatcccaatttacaaatgttttactgtttgcaaacaaatatgcatgttttgctaattacatggggtcagggttttacctatctgctcgcttgtgccatgtttacttgatatctgttctttgtcaaccttgggtaatgaatcgactagctcatgttacttatgtgacctagctagaactatatgcttagccatgcttaattaccactagctcagttgatgggataattgcagtattagacctttttagtatcagagtgagctgcgtgctcgagacacctggccatgcttcatggtcgtaattatccaactaaaatgcgactgaatggtgggctgtgggtgcatggttttgctggtcgcacccatggcagttaaggaccggttcgcgggatgccctggaagaacttatcgtacttaccacaagccagcgtgggcaacggctgggcttgtagtgtagcttttctctagccgacgtacccaggcgagggtgggcgtgatggagttgggtcggccggggtgtccggttgatcggcttccggattcaccgcggcacgaaaggggggctgcccgttgcctgctggggacgggggcgaaccctaaggtgtggtgcgatcggttagagggggttatgcgaagggtcctgtcacggcctctttccggtatgtcgtggtggcatgtcggcgcacggaaacgtgtcgtggggctgtgtcttgtgggtacagttgtacacctctgatcagagtaaaactattcgaatagccgtgcccgcggttatgggcggtcgaccagattcaccgtgattagtcccaccttaataaatcgacccaatgcactgtagtacaggtgggttggttgggcctgttcaacgtggtgtagcgttgatcagtggagattttaatgttactttaattactcaacagttttactgtttgctaaataaaatgttttacaaccgcctttatgcaaatagccacaaacggtccttgtgttccccttgcacgtctgcatcgttggtgtggcttgctgagtacggtggttgtactcagtcttgctattattcccccttttcagaagtgtagtgcttctgagctgaagacgaagttagaggaccaaggctcagaccccagttgagttttgcctgtggagtggagctgaagccccgctaggatcgcctttttccgctgctgctgttttcgtttcggtgcgaggactaagtgcctcttttgtaagtattttacgctttatttatgtttggaactgtatattacttgtcgttttgtgtaccctggctggtcctggacagggatttaatacacaaaatagtctggaaatttgggctaaatttctgggcgtgacatagccctactcttgttagctgaagccggtgttgctcttattcatcgaaatcacgcaagtaaaatatttgggataacctatcttgtcgtcgtcgacttggcggcatggaacaccacacgtagtagacgatgggatagtcttcctcctcgaatgcaaacttgacgagatcagagatagtgctagatctctcttgtctacctctgtggcaccgaattgggtatgtcttggcttatctctgatgtcgatgtctggcagcgtgtattggtgtctattctgactgagcgtcccccctctcctctagggggtcttgtatttatacccacagatgtcctcttgtccaagaaaaactagggagacaaatatggatacgattcgagtagtctttgtaattttcaacttgaactctgcttctccttccttatccggaataccttccatatgcgaggaatgattctttataagacttggtatatggtggaccccgtcgagcttaacccaagattattgggtatgtgttatccataacattgacagactagacatgttccttggctagtgttgaagcaatctctcatcatctatcagttgtcttaggcatctggtcctcgaccagcgttgtagtgatctgtcaccacctatcagagttgcctttagatggccgagagatgactacgcctggtcctcaaccagcgtcgtagcgatctctcaccacttatcagttgccttcaggtggtcgagggatgactacacctggtccttgaccagcgttgtagcaatctcccaccgcctataagtagcctttgggtggttgagggatgattacgtctggtcctcgaccaacgttgtagtgatctctcaccacctatcagacttgccttcgggtgatcgagaaatgactacatctggtcctcgactaacgttgtaataatctctcaccacctatcaggattgtcttcgggtggtcgagagatgagtacacctggttctcctgtggatttcctttaaagaaaacatttcttacggtatttatggccccgaaagaatttattcatcgagtcgctttaccttgtttaataaaatatgcatcgcggttatatgcagtgtgagcggctgccacctccacccacagtttgttagaacacatgcttctgccgatcgaaagggtgggaagtttcacatggcttttggccctttgcaactgcatgccaccaaacagagagaggggaatgaaaactttttcccagcaatttcaccggaaagcaaaaaaggagcacccaaattaagtacactaacaagtacactttgcatgaattatattaaaccacggatgggattatttatgccgccggcgtgtgggcacaatggcgcacccagtacaaacaagtttatcttgtttttgcacgattctcacatggatcgatttcttttgtatagtttaatttagacttgattactatctgccattccctgacaggacttttttatatcacttgacatattataaaaatcacatcaaatatagctacagtatgattataatgtaagtataatttaaaatgcatataactataatgtaactcatgggaatcccatgtaagtacacagaaaaacgcaattgtagaggcaagtgcgtgcgcgggatcgagttccgcagcgatgcgacttttagtttttttctctcgtagaatgattttctttctcatctaactaaagataaatctaaaaaaaaacccgatatatcttttgcaaaattatttgtaaaaatgttagcactaatgatgttgtaaaatcagataaaactaaaaaagaatctaatgtcgtctagggcatacaaaatcgtacgttagaataatcatacgtctagaattaatcattaatcgcaacagaaaatcatacatcagaaaatctgtgtaccttcacccaaaaatctgtcaaaaatctatagcaaaatcgtttcctgcatggaaagaagtacgggtgaacttccacaaaagattgaacatatatagacctgatacatcgtttagccctaaactttgtgtattgttcacttaaaccaccccaccctatactcttctccaagcaacacgaggaagcactagctagttacacaaatttaaatccgtgtcggtctaccacggctggaagaactactaagtaaaattttcactactaattcacgagaaaaaccagtactagaatatttagggtttataaaatagaccttcttcccttttgttcttatcttaactagcgcgcggttagcatcattatattttctcccatataatatcatatatgttttctctatgtattattcaaatatattaaaatgacaacataattttaaattttgtactaactttacgaaactactaatatgtaatattcatattgtatttgatatatgtgttagttattaattatttttaatatcaaattttagttatttgtaaattatattcctatatcgactctagacttgtcttcaatatttcttttttaattttttttttcatattttcattatctgtaaattgtagttctatatagactctaggctcttcttccaatattatttatttttaattctgaatttttattatttctaattgtatttctaggtggactgtaaaatcatctttcaatattcttaaattcttaaattcgaatttagttacttctaaattgtattcctatattgactttagacttttcttcccatgtttttttaatttagaattttagttatttgtaaattttatttttatacgaactctaaactctacttttaatattattatgtttattttgaattttagttagttttaaattcatatatagactctatactctacttctaatattccttatttttaattccgaatttctattatttcttaattatatttctatatgaactctatactctacgtacttctaatattccttatttttaattccgaatttctactatttcttaattgtatttctatatggactctatactctacttctaatattccttatttttaattccgaatttctattatttcttaattgtatttctatatggactatagtctcctcttccaatattcattattttaattccgaatttcaactatttctaaattttatttttatatggactctgtttttctttttctctaattaatatgagaatttctaggcagcgagagcgaacgtggaggctcctttttctattcctttaataagttaatagatttattcttaatctcgtcctttccttacacattgccactgccgctgctttcctagtggccgcatctgacagtgaggaggctagggatcgatgtcagatttgataaccctagcctccccactgttcaatgcccctctattctcctatccctctctactcgccaaccaccatccctcaactatccacccggttttgatttgccctaacacattatcattctcgattcttggaccaatatatagtgatagttgtcattggctttttctgtaccacatgcgtattgtgggtttcgaaacctaacagtatttgaagttttgaaaccggtagtgattatgattttttcaaaggagaaagaggaaaagaagaagaatactttatgactcgtgtgtttggtgtaagagggtacaaataccgcggctgatatatatattcaccactttatttggtggtgtagcattgtttatccgcgacttccgcgtagagtggaatatatataatttcatgcacgcacgcggacctgacctaactcctcgatcggtcgtagcttcgttctgtgacctcatcatatcaagtaagctaccttatgtgtactatttatacagtggttcattagccagtaggttacaagaaaatccttttcacgaccaccattatattgatcgagatgagaggattgcaggccgccgtgctgttcacggcggtggcggcggcggcggcgccgacgaactgcaccacccgctgcggcgacatcagcttcgagtacccgttcggcgtggagcccggctgctaccacccaggcttcaacctcacctgcagcagcaacgacaccaggctgttcatgggcgacggcaccgtgcaggtgctcgacatctccatccccaactccaccttgcgcgtcaacgccaccgccatggcgttcgaccccgccgacgacgtgcagcgcggcgtcatcaacgcgacgacgacatggcgcgccgccgccgccgccgacgacgacgggggcccgttcgtcgtgtcgaggcgcaacacgatcgcgctgatgggatgcaacgcccgcgtcgacctccgcggcggagaccgccgccacagcgacaacctggtcagctcctgcaccgccgtctgcccaccggtcggcggcggcgacgacgccgcggctcacgacgacggcgacggcggcgacggccacaccatcgcgatcatcgacgcctggaacggcaagtgctccggcgtcggctgctgccaggcaaacatcatgctgggctacccttcctacaccatccagatcaagcagctgcaggagaagaacctccatagcttcgacttccagtacatcgcctacatcacggacgagacgctgaatttcacggaagagatcgccggccgcatcgccactccggcggcgctcccggccacgctagactttgtgatcagaagcaactcgtcgtgttcgacgccggcgaactcgacggccggcggcgagtgccgcagcgaacacagcttttgtgaggattacaagggtggtggtaataccctccttgggtatagctgcgtctgctcggagggttaccgaggaaatccctacgttgctggtggatgccatggtacgtgtgtgctcgctcggatgattaatgttggtcgttttagggctcgtttggtttaaatgatttctatatgaaaccttaggacatctatcttctatcttctatctattatcttctatcttctatctatctatctatctatctatctattatatactaaaagtccattaatcttcctacaaacgctcttaagccgccacttggcgctctaataaattagagaaatcaaagaaattctgagaaaaaagaaaagcatctatccgttgattttaaaatagtgggtccactattagaaaccgtcagattaactatattgatcttaaaacgtacaattccacaccatccgtaggtacgtacgtacgtacggttccatctccctccctcctttttcttttcatatatatataatcgagataacagttaatatagttaaattttatataatcactagcaaaagtgcccgtgcgttgcaccgggtgattacagagtgtgtatattgaccaaaagtgttgtttggtttagcaaaagtgcccgtgcgttgcaccgggaagtttacagatcagaaaaatatgcaattaattaaaatacaaattcgctgaaatatttggtatttttaagtaggtatgtgtataattaaataaatttacaagtaaaattctccattctccatggttaaataaaatgacatggttaaatttaattttattaaattctccataattagttacgctctttggaattttattggaattttcagagcttaattgctaattttattaatacaaacatcatttaacaattatttaattggaaaaagaaagaaaatactttcttataggtttgcttcgaaataaacatattcaatagaactataattgtaatgcttctgaaaaaatgagcactaaaaatgtacttattctctgtttttcggctcgagggaccaacaatagacttatttccgacctatgccggtcggcccacggccttttgcgcatgcgcgggcgcacttttcctcccccaggccgcaacctgggcttgggccgaaaaagaggcctcactctcgatccctcttgggccgatttcggcccggacgacaccggccgtccgatctctaaggttttgatcggacgaccgagcgtcaatagtggggaaacaaaacccactccctctcagccgcggaaccctagcccattccccccctcccatgtcacttcgccgccctctcctccgcgcccccgagcggcgacggcgacgacggcgcccctcccccaccaccgatggcggcggcggcggcacccccaccacccacggcggcgtcggcggcatcttcccccaccaccggcggcggatctagcgggaggggaggcgccccgcgagcggcggcgacggcgacggcgcccctcctcccgcgagcggcggcggcagcaccctcccccaccaccggcggcggatctagcgggtggggaggcgccccgcgagcagcggcgacggggcccctcctcccgcgagcggcggcggcggtggagtcctcccccaccaccgacggtggcggcggcgctctcccccaccaccggagagtgccctctgcagccgccgccggcggatctagcgggaggggaggcggcggcggcggtgctctcccctccaccggatccacagcgacggcgacggcggcggttcggcaacgacggcgacggcgacggcggcagcggcggcgacccccttcgatctaattttttgtttttatttggatatatgtgtgctagcggcgacccccttcgatctaattttttgtttttttgcaaagtgctataaggctgcatgtgattctttgttatgtgctatgattttttatactatgtatgtatatatgcacttgttctcctggtgatgctaaccgaataggacttggtataattcaaaccaagtcctattcgcccaaacagaaacaaagtcctaatcagctcaaacgaaaacagatgggagtttgtttcctatttttgtggaatcggacatattcttttaccgcgttgatgaatcggattcgttccggttttttttcacccggtttttttgacggacgatggaagcacctcttattttttaagtagtagtagataacttatatgattatattatgatatatctctttccaaaataaagtttacaccactatatttttacccattaaataaaggtatacgtgaaccctttatgtggagcattattttcaaataatacactatttaaataaagtttataaagtttatatcgttacattctgtacgcattaaactaacaaagaaatatattaactaatttatacttaaacgtgctattttagactttttaataaaggccggattaattttacgagtctttacaattatttgtaccataaattatatatctatttttatttttcaaataaatatataattttaatatctatattagatttattgcattctagacctacatccatcttgagtgctccactaaataaaagaaaatattaaaatttgtcattgaaaatcaaaatatgctagcttattttttaatgaaactgttaaacccattaaaagtacattattagacatctaatgactttctaccaacttaattaatttcttcataaaaaaactttattaattcctcacaacatacacgtgggggctatttacatatacgaattgatcttgatgcttttgtaaataaatgatattttaaatttaaaagataaataaacgatcttaaaatgatcatagcatctaaatcatacatatgattgctcctagcactcctaaacacttctaagtcgctatgtggcattctattaattacaaaaacactcatataatcgaccatcggtttccacttaaaccgatggacccaatttttataccatcatatctatcttttcggaaaaaacaaattctatcagaatctctgtctggctcactgcataacatgcatgtgtgcgctcctgtaccttttaaaccggtagaaccattgtttgtaacaagtgtttattcatggtacatgacattttaaaaatattactgtgcaatgatatttcgacgttattgtattcttgctaggttgcgtggagcctctcattcactctacatgaaatgttcataggtagatcgcctctcaaaatatatcaatcatattaggctatataaacccgtgcattttttgtgtagattaatgtcccacccaattcatcctttaacatattatgataatatattatacaattaaaaaaataaaaacaccttaatttttattttacacttacttttactttcgttgacatgttttctaaaaaaaataaatctaccttttttttaaatgatgaagaatattataaataattacttatagatactacttatatttgatataatataaatctaataggttagaatattattaaagaattaattaatgctgacaaaaataatgtatggagaaatcgtggcagatgttctcctgttaaatgtcgcttttataaatacctcaaacttggcgtacgacgcatgcccgcgcgaatgcgcgggctaccttcctagtttttttaacaattgttggaattgaatccttaggatttttttcaacatatatcacttgtttcataagaatggatcttaccaaatttctaaggatggtagtcttacgagcttattttataccctctccgagctgataatacttgtatcgttttagacaagagtaaggtcaaactttaaaatctttgattatgaatcattttaaaaatatttgtctttcaaatatggtgactatatgcatagattagtcttaaaaagtactttaataaaatcatatatatttttaaaatatttttatacatattataataaaaaataatggtcaaagttatttttaacttttttgaagaccgtgcccttgtcttaaacgacaagtattttcaatccggaaggagtacggttcttaggatgagatgaaaccttttttggaaaaattcctaaggaattaaatagatgtgatattctaatcctttactttacgtaatttcttgatttggaaatcctatgagccaaggattacaatttcgatttcacccaaaatttagctcatttcggttctaccaaaatccctgaaatttctggatttttgggccaaaatttcttgaaattttaacataatttaactgaatttgactaaatttgcaaaattctgagagaaaaaggaaatcttggccgagataatcacttgccgggttggaaattttgaaccaaaattgcaatcctgctatgaaccgaatagggcacttagaatgctcaactatatatgtcttaattaaatactacctccatttgtttttgcccagtttatatctacgcaatcttcaatacacaatttatcattactttctaactatgtatgtttatgaaagctttaaaagtatagtaacaatataagtgttttttatgacaaataatatatcaattaccattttctcttctctaatgttttcattaaacaatcatttaaagtttcaaggtttggttgcataaagtaattttagatgacatctatttaagaatattagtactaacacaagttgttttagaacttttatgcattatcttttctgttttacctatgtttgatttttctaaaaaaaaatgtgttaccactctctttagtataaatgatgagcagtaaggttattttccttctttcgatctgtgcatacatttaaaaggactgtttctgtcaaaaattataaaatacttacatttagaatcagaggaaattaatatcctagtcattggtacgtccctttatttcttcaggttcattaatgtttcaatgactcgcctaactaaaatatacgctcatgattatttgttagatatcgatgaatgtcattcccctggctactgttatggagattgcaagaacacagaaggagggtatctttgccagtgtcctctcggcttaacgggcaatgcttcaattccaaatggatgtaaaggtataacgacttaactaagtagcgggagtattcagttaggcatcatcaagtccgattgtttttttttttgaaaaatatggcgccataaatatagctactccctttcaaattatataacttcgaccactaatttgtgctctccaatgtttaataaacatctctaatattacaatatatattatgtttaataaacattttaaatattacaatgtatatttttaataaacaatttctaacaacatgtatatgtgatccctccgtttcagataataagtcgttttgattttggttaaagtcaaactactccaaatttaatcaagtttgtagataaatatatataataatatttacaacactaaattagtttcattaaatctataattgagtatattttcataatatatttgttttgagttaaaaatgttactacttgtttctaaatatatatttaaaaagacgatgagacaaacttttgaaactttagtcggatgcttatcaaaatgatttgtgtttgtgaacataggaagtagttagcttgctagagttttatgcaatattggctccccatatatggctatgttatttactaatctggcttttctcttgacttgttatcgttcttctttcccatgattaattaatttggtcatcatatattcttctatgttatatttcttctagacattgatgagtgtatgcacccggaatcttactcatgctatggacaatgtgtgaatacgtttgggagttttcaatgccattgccacagtggaaccgagggggatccaacaataagaggagggtgtattaagatcaagcattctgtgtcaagtaccaatattgtactccctccatcaaagaatacaatccaagcattcaaatcttataaagaagattacaattatagagtactactttctatccaaacacctctcgttcaaattttctccatcttagccccaaccaccatcccactcccaaccacctcttatttactacaagacatctaagatattttcctttcctactagtttgtcttttgaatgctatgattgtattactgttaggacaaatggagtaacaaacacacacacacacacacacacatattacttatttatttatgtatgttcttgatccaaattcttgaattctttcctttacgaattttcaggtttaacaattggtttgggagttagtggtggcataagtattttaaggaaaaggctatacgtactaacttttttttactaaattcttactaacactgatgtgtcatgctatgagtccatctagatttttttataacttccatctacttaaatcaaacggttgagatgattgttagtaaaagtttagtaagaaaaatttagtatgtgtagcattgctcgtattttaattatggcactttctgcacctttcatagtacagaaaataaagctacataaggtgaaaaggatgaaagagatatttttcaagcaaaatcatgggctactcctgcaacaattgatgtcacaaaatgcaaatattggtgaaagaatgatattgaccttacgggagctagaaaaagcaacggacaattttgataaaactcgtgaagttggtggtggaggacatggcattgtatacaaaggaattttagacttgcattttgttgccattaaaaaatcaaggattgtagtgcaaagagaaatagatgattttataaattaagttgcaatcctttcccaagtgaatcatagaaatgtggtgaagcttctaggatgttgccttgagacagaagttccattgttggtttatgaattcatttcaaatggatctcttgatgatcatcttcacgtcgatggacctatatctctatcatgggtggaccgaataaggattgcacttgaagttagtagagccttggtctatctacactcagccgcaacaacaccaatattccatagagatatcaaggcatctaacgtacttcttgatgataatttaacagcaaagatatcagactttggagcttcaaggtacattctaattgatcagactggagtgactacggttgttcaaggaacaattggttacctagatcccatgtactactataccggtcgtctaaccaacaaaagtgatgtttttagttttggtgttcttcttatagaactacttacccgaaaaaagcctatctataggactgatagaggtgatagtcttgttccacattttgcctcactactggaagaaggcaaattggttgaaataatagatccccaagtcaaggaagaggagaatggggaggttgaagaagtagcaacactagcggcaatgtgtactaagttgaatggacaagaccgaccaacaatgagagaagtggaaataaggcttgaaaacttgcgagctaaaaccaaacatgctccatataataaagaaccaagtagatatgaagtatcccgagttgcagggcattgcatatcagctagaggggacatcgaagaagtactaataagtagacacagcatggaagatgagatgttgtcgttagaaaggtatcctagatgatatcgtgtttccgcgtctctaatcgccataatattgtttagtagaggaatatattgctactttctacattttttttcctttgtgtaatgctcttttgtaaaaagaagaaaatgccatggctttgtttcatgttacaaaaaggactaaggccactctgtatacattaattggatttgaaagatctatgcactagagttgccttgtaaggggagattggaatatctatgatcctaagagtgcggtgattgttttggtgattaatgacaacccattgttggaactaactatttccatgagttggtgagattaggttaagttccggcatcaagttaaaagattaaagctagaagatggacattataccttgatgaggagcaagtgaagatattgatgatgcggggtatgaaatggctatctatggcaaaccggtgaagagaaagcaaagctaggctagaagatggacattataccttgatgaggagcaagtgaagacattgatgatgcggggtatgaagtggctatttatggcaaaacggtgaagggcaagcaaggctcggctacaatggaccatgcggggagaggcttggcaccgatggaccgaatccggtagtgaaaggcgagtgaaggctttgtcatgatggtcatgatggactgtgcgaggccatttgaagctatgagtaatccgtatcaattataagaagaccgcgagatggaatgccgaggatcaagaggatgtggttcttcgatgaacatcaagtcaaaatccaaagtgggcattgatcaaggcaaaggtataattgatttgggactaatatgcttaatgagtgtaggtgagaatagtcccaatagtgaaatggcgttgacgttgacaaccctcaaggtgaagcaagaagatgacattcctagtggtgtattagtcccaggttgcttagaagtggactaggatgtttggagacccccccaaaacatcaaaatcaaagcggcgagaagactcggagctgagttagactagtttactttttcgctttgagtttaggaaaaaccgtactattaagaggggttccaagtgtggttctgagataacacaattgctcttagtggtgtccaagtgttgaaatatttttaggagctgtttttgaaaatggctctactcggaacagagagtcccacccggaggttctgtccggaacttcctagcgccgaggtgaggttgaaaaatttcctaagtgctgcctggaagttcctggcacttttacccgaaacctcctggcaggtttccagttcaaacttgtgagtaacggctagatgacgtcacctagccgttatatatatggatctcgtccccaggtcaccctttggccattccacgttagttcttgtgttccctagcttgttctagcctcttccaatgtgattttgcttcctccacccaaatcttgtgtacttcttgagtgagagagtgattttgagggtggtggtgaggattggagaaggttttgaaggctaggatgacttgagcacttggggtatctcgttgggctatcatttgaagcttgttactcttggagggtgacctcctagacggttaggtgtcgcccgtgagtttccaacaaggttgtggattgacccgggcaagtttgtgagggtgttattccacctccgaaaggaaacggaatacacggtgagtgaattccgagctgaggtttaggaggtcgttttggtagagcaagcctcacttgtggtgttctcttggtgttcaagttggggatcttagtggtcacttgaaaccaaagagaagtacctaggggtgttggcttgaataccggagacctcttcctaggcctttgcttggtgaggcaaggggttaatcaggatccggctctttggagctcctcaacggagacgtaggattctcggtggagaatccgaacttcgggaaacaaatcgtttgtctcctctcactctctttatctttgtgattgtgatgcttttctccttatttgcctagttgtgctatcatgtctcccattgtatgatcacttgtgctatcttgtatattttcatgtgtattactcttgtttgagacatgttgtacctctctatggtttaggcttccttgtgatttaatttacttgttgtgaggtgcttgaaatagcaattcacaactgcccggaagttcctaggaagatccccagaagttccgggcagctttctctgcttgtgagaaaaagctgccaggaagttccggaccttttgccaggaagttccgggcctgattttaaccgctgcgatttgaagtaaattttagaaacacctattcacccccctctaggcgacatcaaggccctttcaggattaatcctgtgttatatgtacaaaataatctgacaaatatccttcgtatgaattgtgaatataaaatacgaacattaacaaaaatagaacttttttccaatcttatttatatcactgaatgcatggatataatatctaaacataccaagtaaattaggtatcattttcttttgaatgttcaatatatttagtattatataatatagatatatagagttagaagcaaaatacatgagagatagaggaatgagatcctctgaagacattttccacccttcctgcatgacaagagatatgcggataagctaggtgagtggtattgttacaaacaaactgagaactgtgaatcaatttgtccctagcatcatgcgcctgtcagcctttctattgatctttcttggaatccagttcacctgtagatgatttccttgtaccgcacactgcatttcactgagtattggtctgagactccagtgtctgggatactcctggaaatctcctttactgaacgttgatgcaattgtgctataatctgtaacgtggatcatatctgcaaagttcaaaaattatttgagcaattacggaggccaattgtagagcaatgagtgagttcagcttgaagtggggacattcccatggcacagttcgctttgatgaagaatgtattatgatcatcagggtgatggaaaataacaattccaatgcataatctgcgatctatgtagcacctatttcttacaggaattgaaaaggaataatttacaggaattgaacaagaacactttcaaggaaaaaaaaaaggaatatatcaaatccacccattagcacattgttaacaacgaaatttggtaagccccgaagacatcatcggcctagaatcagtattggtttcagagtcctagaatcggccgatgagaattattacgtcgccaatagtcagattcctgctatattcggttaaggaaattaatctactaaaggaagcttatccagaagtaaccgagttcaaggaggatacggcatggcaagttatctattaattaggaatagtttgttagttcccttttatctgtaggaaagtatgtttagtatccaataatgactttatgacttctggattacttcaacaaaacgagcgaattcctcgtccactgacggtttcatactccgttgaggaaacggcagcaaccgtacgtgtgtcgcagtactcctgcggcactgtcttttctagctgaacttccttgtcagccgaatcactagatggcgcttctttggcaatctcgttagttcctgcagggttaggatatggcagatcacgagtagacttacctcccctcgtcgtgattgccttagacattttcaacggaggagtcaggttgccccagaatcctcccagtttcatttgcagggactaaggatgccaattgagctagctgggtttctatcattttattaaaactcagctggttttgaaaagcagaagcgaagccatct

SEQ ID NO: 26786 - DNA, 2103 bp, Oryza sativa
tttgacagtgtgcatgcctcgctgacgggtctggagtcgttcctcgctccaacccatattggagaccatcttctctattagatcaacggctccttaaaccgttttagagaagaacgctcctccagctgccgcgtccaggtgatcacgggacatcggggtgagtcaattttaaaagttctgcaggatcagccagtcgtccatcccatgatgaggacaagcggccacgtactcttgcagaccctcccatgcttcaggaatagactcatctcttgtctgctggaaacttgaaatccttccacgaagggcattggttttgcccatcgggaagaatttcgagaggaatgtcgtagagcatttgtcccaggtgttgacagcagcacggttggcatagaaccactcttcgctctcccgagaagggagaacggaaacagtcacagcctgacggcgtcgggactgacgcccttaatggtgtacgtgctacagatctccaggaactgttgcagatgagcattggcatccttattaggcttgctatagaacgggctagcctgcgccatcgtgatgaggctagacttcaagtcgaaatccacgtctcccatgttgatctgcggcccaatggccacattgtcagcagagggagtagcgaactcgcggagagtcttgttagccataatcttgaaggtcggtggtgctggtacggctggtttctctgttggtagagtttttttgcggagcaacgactcgcggcctgacgctccggaagaaagcttctggattttctttgaagttttccggcaagttgaaactagtcatgcactaccctgttttcacaacaaaagtgaaaacaaccaaggttagcctgcaaaggaaaatgattacacacaggtaaatataaagtattagttcaggtaatctctattatgaatcttccccggcaatggcgccagaaatgcttgttggtatttcttaacgtcattactagaaatataattcccagcaatggcgcagaaatacctctggtatattatggttacagagttcatccgcaagcgcacggatataccattgtagcatttcacccgagagtattccaagggtatcgtatttattttatcccgtggaaagatcatgtagagagaacttgattaatattttatatattacttgtgataattatattctaagcagggttaagataatccaagggtagagtgacacacaagcattagctactcattctcataatatattatctaagctaagtgggaagaagagagaaagaaaatctattcctatacttctaatatacatagtatacatgcattctagttaaccgatatactagctaataccctctatccgatgccctcctggtacttcgagaagccacccctgactgccgagttccttacgacagcccgtcatgaccatacaatcggggctaaatacggaggaataccctcctcaggaattaacttaggattatatacaggcgcggaggaatacccgtactgagctgtcatcatcagcggcccacctctcatctgtagcatataaccccaaataatgatatcccgtaatctagacaccatgtctaaactaccagatactactctaatatcatcgtcatgacatagagtaattgcataagcaaatattatacccgcaccaaagcatctcccagataagctagccatatattcaatataacatgaacataatgtaaagtaggtactcatatactcagaaagtatttcaataccataaatgtatatagaagagtattctaataaaagtacaaagcttacaaaagaggaaaggaaagctactagagccatacccgaactcttccgaaggcttccggactcctgatttctactctatttctattccaccagctagatactactaaactaaacttgagagaaatgagagagctcttgcttgaggtgtgtgtgtgaagtgagaagaggagctccttttataggcaggtaatgacggttgtgacggttggaatggttggtaataccctccaaccgtcattggggatcaatcccagctatccatccaaaccctgcatccatcggtgccacgggaggttcg

SEQ ID NO: 26787 - DNA, 4095 bp, Oryza sativa
cgaaccatgggctggcccaacccagcccatcttcggctggtggcctcctttgttgttctcctccatagacttgtaaattttggcccagtgtgtcgtgtcatttctgatttcttggcctattcatacataagtctggttctcaacatcgtccgattgatttatcgtctgtgttgatgtcgagtctcctccactttattgtcattctctgcaaaaggttagtataccctatactagtggaatattattattctaacagatatatgcattgcaagcatcacttgttctcctctattttggtaatattgacggtcgaaactgatcgataacgaccgtcaacaattatttacatgtgtgatgcgagcaagatttcttttatgtatactatgtacttagtatactcttcaaccaatggagaaacaaatattttctatcttaatttaagagaacattgtaccaaaaaagatatataaaactacaatattttccctatgacattggaaaaatattgtggtgacttgtacgctaaagcacaatatcatcttggatacctttccaacactatctcgtcttccatgttgtattgcctacttactgcttccgtagggtcccctctacttgacatgcaaggccttgcgatttgagatacattacacatacttggttttgtattatctgaagcaagtttcatcttcacttgcaagttttcaagtgtcatttacacttctctcattggctggtcttgacggttaaaacagcaggagaggctcctactgcgcaaatatattaaaaagagaacggcaaaatacaagggaaactgtacagagggaatacaacaggggggaagaaagaaagaagaaaagaccgcctgaaacgcaagctagttaataaatgctattaatccatgattgccacaatggtttttctgtctcctttactctatgcaaatgcagagtaaactcatccttgaaatcagccttccatttgccaaattttgcttggataccattgaagatcaggtcatttcgcctactccagagatgccagcaacaaattgccaaaacttccataaagaagggatgagggaagttcctatatgctgcaatgatcatgttcatgaaattcagatttagatcccagattatgccgaggaaatgccaacattgttgggcaaaggggcaggcaaagaagagatgaagaaagtcttctgtggtcgagttgttgcatgtaacacatgaagctcccccttgggtattgaaatgtcttcgttgcatcagctctttagtgtttaatctgtccaataaaagtagccaaagaaacactttcaacttgagtgtgcatttgcttttccagatgagagtcaagggaatttcaggttgaatatgggtgaaaaacaggtcatagactcttttcggttgataatggggagagttccaaatgtatgtccattggtcttccatatgatttgagtttaaagtttgaagagtgatagaaagaaggtggcattcctgaattgcttggatggggagaggagtataaaagatctcatctaagtgattccgagatttgaaacctttgatagatatgtccttatttttggcaaatgagaatagggtgctcagataatcctctaaaaaacgccctgaccaattatccttccaaaaaggtgttgtgtcaccatgttaacgactaaatttggtaatatatggactaggtttaacattggaatcaaggcggattcggcaaggagatggattcaaagaacagagtatgcatcggctgcgacgacatcggctggagtttgcattggctgagatggatcggacagaggacagccgatagaggtgatgcagccgatttcagtggcgatggcttcggagctgttcgtcgagttatcatatacacgttgcaatctttgttagttacatcatatagcttgttatcggctgattctcattgtcgggaagtgaccgatagtgttatgtttcgttattaagttagattatatcgtgtatctaccatcttttagagattttcatcatcttgcttagatcttatacttatttttatgcttaatgttgcatcggttaagttcgatctattgagttctatctataattgtgatatctagcctgttttatgattatcaagagagatagtatcggggtttcagccgatcttacctgatttagccattttatatcccctgtgcttgattgttatgctaagtctgccctttatattaagatctcatttcattacggtatattaggctttttgtttaatatattctgcttgtcttgatatcttagtatagagtggtatcagagtattagccgatacatgctagatctatctgatcggctatgctataaacatttatataatctttgctttaatatatatttcgacttaagtgatttatactgtctcagcatggcgaccgatctaccccaatcacttggtttaaatatgtatcgaagtaaagattatatattgttaatatctacggccgatcgagtagatttagttttatcttatttactcatgacagccgatcgattccaatgtgacatcggctcaaagataaatgatatgtcatcggcaaccagccgatcggctatcgtttatggatttaactatggttttcttgtttctttttcttgttgattgcataatcaaatcaactggcacgctcacgaacttaaaggcaagattttggacctgcacagaagttaagcagatctttcaggccagtgtgtgtttttcgcatcaacacaccaagaccaactttaaccaaagaaatggctcgaaaaattggagtcaatctgagtacatccttccaccaaaaggatcccttttccacatggcatgcgggggcagaacagagtttgagtaatacttgtcccaaatcaggttaacccatggcagatcctttttattgtagaacttatctagatgcttgagtagaagagctatgttttgtagctccaggttgatgactccaagacctcccttctttttaggctgacacaccaagtcccaagcagccaaggaatgaactttagcattaggatcccttgatttcctccaaagacagtgcattcttgccctgtcaatatgttgaataaccttctttggaagtttaagcgaacatatatagtatgtcggcagggaggaaagtactgagtttaccattgttaagcgctgaccatgattcaggaaggccgctgtggaagggagccttctctcaattctgtctactagaggggcaaaatcaattattctaggtttggttgaacccattggaagaccgagataagtgaaaggcatagagcctatgaaacagccaaaggtgcccgcaagaatttccatattttgctcatccacattgattgggatcatacaagatttatgaaagttaattttcagaccagtggagagggagaagatttgaaggagacctttaagacagaaaatctctttttgatcagctggcaagataatgagggtatcatccgcatactgtataatggggaatttcgcaccaggttgtgggatgggctgagacagaatgccagagtcatgagcagaattgattatagactgcagcagaccagctgccatgacaaaaaggaaaggagagagagggtgaccctgtctgactcctcttttgcatttgaaatcttttcctgggaccccattgagcaggatagaggtggaagctgaggataaaatgtttttagtccagtttacccaaatctcattgaaaccctttgctctcaaaatttgtaggattattacgtggtccaccatatcaaaagatttttcaaagtcgattttaaggatcacaatctcttttttgctttggtggcattgatgaatatactcgaaacaccatgccaaacaatattggatggtcctccctttcatgaaaccatattgatttgggtgaatgacgtacatgatgactgattggaacctatttgtcgtaatcttacatatgaacttaagggaggagttctgtaaagcaattggtctgaagtcatttggtgattcagggttagacttctttgggattaaggtgatgaaagagtt

SEQ ID NO: 26788 - DNA, 4913 bp, Oryza sativa
  unsure (1)..(4913): unsure at all n locations
aggtgggaaattttattccttctgtacctgtcagtagcagaggcttgaaaaaaggagggattttcatcaccaaatttaacccacctagcagtatatcgtttcctccaaaactcatttttgtatttcagaagaaccaagatatgattctttagaattgatctaaagttccattcatgaataagaagaggcctttgttcctcgatactgtccaaaaacaccagaacttcattgcaatttgtgattagagtgtgcaaattggatagccttttactccaaaatttcagctttcttttgagattttttagttttccattcaggattactgtctgattagagcttctgacattagtattccatgactgttgaacaagatcttgaaaacctggcatatctacccaaaaattttcaaacctgaagaggttggctctaggaactgaggtttctatgctgattagacatggagcatggtcagatatgtattttgatagagcagtagctgaagtgtttgggaaggctaggttccaggcagtggaggtgaacacccagtctagttgctgtaaaagaggttgatcttgcatattactccaagtgtaagccatacctgtgagggggatttcagtcagacccacattgctaatgatctcattaaaaagcataatatcatttacatctccaccaggaaggtttctatttttaactgatcggatgaagttaaagtctcccatgaaaatccagttctgattcaaatccacttcgaggttatataaccaggaaacaaaattatttcgtaactcacccgcacatgggccatatatatttgtgaggttccaggtttcatgtcgggatgaggttgaaaaaactgcatggttatagcaaaggggagacaagaaattagagtgctagtaaggacactactattccagattatgattaggctacctgaagcaccagaggatggctgaaaaacaaacttgtcaaagcgtctagggcaaaatttttgcaggtaggaatggtcgaacacttcttttttagtctcttggaggcaaataactgaacaagaggattctgcaattttttcagataaagccagccacttgtgggaggagtttattcctctgatattctaacaaaggatgttgcaggatctgttgatattgttattcatgggggtagaactgaaaagagagatttaccgacgcagataactatgaccccgcaccacaaactccactgaacattcagagaaaaccctttcatcaaaccgagtaaaacatcagaagcacaacaggagttatcagtagacaaatagcagcaacaagagttccaaagccatttcacatagcagtagttccataaccacaaataataagggctccagcaaaagagaatagctaccctattacatagcagagtagcaaagctccacagagcttgattattacaaccatttggaaaattcattttttgggctgagagagtttgtcttcagctacttcctcaggaagcagcccacaataatccaccccaatcttctgcagctgttagaacaggaatgggaggggggagccccttgccggcttcaaacttgaatttcttgatgggctgcactttggatttctttttgggcacatcaaaggccaggtccatcttgtcttggcccaggaatcttgggcttctcctaaggtttgcagaggtgattggcacctttggtctggattttcttggcttgggtgtgattggagctggttgagaagcctcatcaataactgaaaactgaagtgctctgacaacagggttatcaatccttgaagtcttttgtctcttggctgggctaggactgtcaccaagagcctggaacaatgaaaggttgactgagatattccagcgagtagagacaagggaccatctttgaaacatggctacagagcggcatagggggctgacatgacagcagaaggggcttaaaatctccatttgctactgccaaacaaaagacctcaggtagcttaatgataggcaaagtaggaattgggagagcatagggaatgatctgctagcccaagtgctgctgctggtccaacagaaatgttgagattgtgccctcagaggaaaaatcatgcactgtgatggagtcttgctgttccccagggataggttccactaacatatcattttcatcctgttgctccctcatatgatcaatctcatgttccagcccattatggttatgcttgatatcatgatttgcattattcccccagttgccttgatgcttatgctcgttgagatgagggtttgggggaatcatttcccagatagttggaaggtcctcatctccaggcagcagatcagtgggctccccctagagaacaaaaacatggaaggtccaggactgaccttggcccccataagccatggcgtcactcataaccagtttacgaggcatatcactgacaatcttatacctggctttcaccaaaaccctcccgagaaccctgtcttgataatgccagtctatgaattccccaaaaggttagtggcttgaacaatgatttgtcgagttttcatatgaagcggaatcccaagaaacattagccaaccttctctagtgaaagggaaattatgccagtttgctaactgatcatgttttacgaaccaagcatggaaccaattacccaagagaacaggctcactagcaactagaacatccctagccagggcggaggagagttgcacaatgcagagagctagtgggtacctttggatcctaacaacatgcatacgatgctaatgctcaataatatttgcaacttcatggatcaactgaccgagaaaatgcacagggggctagggatcagtgactacggcagcaaaattttcatgtgtcctgtgcacagtaccttgaaaggtgaagtcggcccgaggcgagcggccattccaggggatttcgatgttggtgccgtggggaagaaacagctccggccggaactcggcatcagggaggttcgccatgggagatggagaaggaagcaggagatggttttctgtggcggagggagggagatgacactgtttggcaggggaggtagtgggagagagaacggaaggcgaagcgactgaataaggaatgaggtcctttgatttctccgtgaaagtttccgaggcctttttcctccaaaccttcctaacccgcgaaaggcaagagtgggccaaatgtccataattgtggcaggccttacagcggaaggtggatcgacaattggtgctagagagacctgaggaagagcaatctttcatacgatcaaacgaagcaccattagcaagaagcagtctcttgaacactgagggtttgcccacatgannnnnnnnnnnnnnnnnnnnnnnngaggcataagattgctgaaacccagaaggacgcttgtgcttggaaaccaaggtccattgatttgcttcttctaattgccaagataagaattccttgcgccaattcggaccaccattgctccataagaaaaatctgacatgaaaatccttgccaataaaattacgaagagaatagatatgaagccccacccttttgttgcaaaccaggaaggataaactgttacccttgagatgatgaacctcaaaactgtgaggagtgccaccaaggcaggattaaagagcaatggccaccaatttagtggtgagacgaaaattgaacctcacaaaatcaaccaccaacttgaaaggggtagagcctaagtggggagagaaatgaataggagaactgaaaaaatccagaatttgggattcgagagccttgccatagtcaattccaaccttccgggggagagggagtaaccagagcatcatcgtcccctcccctcccatcaagtttatctcttaaaaaaatagtaagtctagcatcatgttatattttaaaaaccttatccatcggctggtcttgtccattcaacttagtacacattgccgctagttttgctacttctttgatacttatcttcaccttccataacttgaagatctattatttcaaacaactttctttctcggagtagcgacagaaaatgtaaaacaagactatcaccattcatcagttctatatgtgggctagttttttctagtaagcggttctataagaagaacaccaaaactaaaacatcacttttatctgtgttagacaacgtgtataatagtacatgggatctaagtagccaattgttccttgaatgactgtagtcacctcagtttgattaatcgggatgtaccttgaagctccaaagtcaaatatctttactattaaattgtcgtagaaaagtatgttggatgtcttgatatctcttatggaatattggtattgcagtagctgagtgtagatagaccaaagctcaagcgacttcaagaccaatccttactcggtcatcccatgatagagaaactggcccatcagcatgaagatgatgatcaagagatccatttgaaataaactcataattaaccaataatggaacttctatacctcaaggcaaaaacctagaagctttacggtatttcaatgattaacttgagaataaattgcaacttcatttatgaaatcatctatttctctcagcactataatccttggtttcttaatggaaacaacatgcaagtcatgagttttatcaaagtagcaaccaatgatttttcttaaaatatctctctttcatcttctttaccttatgcaactttattttgtatcttatgaaggggacaacaagtgccagaattaattttgtatgtttgcaacataatgtagcacatgtgttttgtttacaaaataatgattgtttcaaataaataaatatataacaactagaggccgattttctagtgtactatactaagtgggggcattggccctcgcactt

SEQ ID NO: 26789 - DNA, 26546 bp, Oryza sativa
  unsure (1)..(26546): unsure at all n locations
ccacttagtatagcacttttctcccttttgtttacgaagaaaataaatagttagtagcaatatatgccttcactagacaatattatgttcgatgccttgatatctctatgaaattttagtgattgtagggtctgaatgtagatagatcaaggctctactgacattaagtgcaatccttatcgggtcatcccatgatatagatattagtccctaataatgtgaagatgatagatccatttaaaacgaattcataaactaacgttgtaacttctgtctcaaggcagcatcccaaaaacttcaccacatttctatgattgacttgagaaaggattacaacttcatttataaaatcatatatttttctctacactacgatccttgattaatttcttaatggcaacaacatctatgtctaatattcctttgtatacaatgtcatgtcctccaccgccaacttcacgagttttatcaaaattacccgatgatttctatagctcctataacgtcaagatcatttttttcaccaatctatatttcatttttttcaacttatgtagttttatatgtgttatgaaaggtgcggcaagtgtcataataaaaatatttacgtcacctctaactcctaatctgatggtgaaaccaaaaaaaaatcataaaataccaaattcaggaatttctataaataaacatgcataaattagcagtatatacaatattgttactcctttcatcatctcataatataaaatgatttcgtgataccacctaccaacttttgcaatagtttatattgaaagtgaatgaaatcgattggagcgagagagaattgagcgatagaaattgtagagtgaatgagcgagaggtctctttattgatcaatgcggtacaatatatatagaaggggaaggggtggcaaccgtagacatgatggttgggaaccatcgcgtccgttgccaaggtgcgccgattgggaaagaaggcgcgattgccttcggttgctatcccatccttttacatggatgaaatcaccaactagttatttcataacactcccccttgatcgaattcactttgatcattgctcatcaagtgttctagatatctgtagagataatcttagaaataattatagttagtatattaaatacatcacgtaaaactcctcaaaaacccagcgggaaaaataaggagaggactgtgatatataattgactacttttagatgtttatgagtaaagctcatagtatgatccaaaaatagtataatgtctacaattatcttgttgagcaaccgggttttgggttttgggccttgtaattgtgttgttcaaaagccagatcgagttgtgtcgcgactccgcccaaatcgactgtttatccatacctatcagaagatcaagacctatcttcttcatcagttggtatcagagtacagttacccattaggtaatttatcgtccctattgacgaaaaaatcgaacacaccggcctaggatatctgcttagctcctgtgcaagtccaaatcttagtgagatgcaggcatgccagtcagtttggtcctgcaactaacaagatatgcaaatagtagatcaaaacagccgatcggctgacaagccgatggagtagttccagccgatagccgataatagccaatgccgataccagccgatagcgatagggttttgtgctatcagctatatgtccaatgtagataatgatataaaggcaaccggctgatgatgatgtaataaaataacaatataatccagtataaaccaatcggcaaataatgatatgataaataagcatcgatccgaaggttaaagcacacatcggctggaggtccgatttcatgaaatccacaagattagattaaacagtgaaacctttgttgtcatcggctaaatccaacttatatgtatatgcaatccttatgagccgatgcaacgtccagataactcgccggctgaaaccccgatgaaaccctaattggcaatcaagaagcaggctaaagattatggttctaggcacgacttagtagatcaaacttaactgatacagcactaagtatgaaaagaaacataatatctagacaatcaagccgttgactgagttttcagggtggtagatgtctaagctaatctaatctagcaacgcgatttagccgataccggcagaaactctaaaacgagaagcagccgatagagctaaattgatatgctaagactagattaacagagacatatgataaataggtaggcaaatatatcatccaaaccagagcaatccaagaggtcgaatgtactgatgcagccttaaacgacgccgacgtagacgatacaattgcctagaccggcgctacattggacttatcccttcgccggaacgtaaaaacaaaagtagaaataaaaagggtagcgatgcgccgaattgtattgatcgtagcgatagattacatagactctgggtgtacatatttatacccatgggttgatacaagtccttgccggacaagaaagaaactttcctaaagataaaaggaaaggataaagtccttataggacactaaacacactttcctaaagataaaaggaaactaataaactattcctaattaatagataacttgccattccgcattctctttgaacttggtctcttctggataagcttcctttagtagatcaatttccttaaccgaatatagcaagaatccgacaactgacgacttgacaactctcatcggctaatctcaggacttcgaagccgatgctgactctaagccgatgactactccgggcttaccaaatttcactgttaacagtcccataaccaaaaaattgccataaaaaatatttattatttacctagacaatttgagccgttgcattgttctattagattttgctatgttgaattctagattgcatcgtcatgtcaatgctagtttagttttagttttagattttgctttgtcgagccaaggagacatagaggagtgattgggaaaggaatcgctgggagggagatgagtgggggcggcagagcgagatgccggagagggagccgatgcgggtgcactcgcacgagagaggtgcaatgcggtggggccggcagagcgagatgcgggggaaggaagatggacgcggatgcagaatggggtgtggatcaattagattagatcgaacggttaggaaaaaaatgatgacgtggaagcaccaggaagcagagaatttctagtagtgggatgatttgtgtagctatataggattaaactcccaaccttattcacagatgcatgcgctgatgccgtcatgcgcagctcagctaactagcttaggctctagctcctttactttccaacgaaaattgctaggaaaggattttcatttcctctcactgtttgaaaccccacacctcagcagaagcatatgttttacgtgggtggcactgagtatatggcctcattgtttggcttttttattttatttttttcatctagtttatattacatcatttgcttttgagtcattgaggacatgtatacaaaatgtttactcacaaatgatctttttttgagattgaaaagaaactaagtagttggaaaggtaaatatatgccagttggggggagactaatgttgattaattatatgtttatgatttctttttttaagatttcaaaatgagttcttcaaaaaaaatgattattatagatcatgcttctttttggcaaggagatgagcacaagaagaagtataggcttactagatgggaaattatttgtcaacccaaacatcaaggtggtcttggagttcataatcttgaaattcaaaatcaatgtcttttgagcaagtggttgtttaggctcataaatgagtagggcatgtggcaggtctattgaaaaggaaatatctttataatcgatccttaagtcatgttgagaagaaacaaggggatttccatttttggtctggtcttatgaaagttaagagcaagtttctaaatatggggtcctgaattgtgaataatggtgtaaaagtgagattttgggaagataaatgggtagtgaattattcttttaaagataggtatccatcgttatatgctatagttcgtaggaggaatgcttcaattgcaaatgttatgtcttctgtcccactgaatgtttcttttaggagaactttagtaggaccgaatttaaacaattggcataatttatgtgtgcttcaattgttcatattcatttttcagaggagaattatatttttagatggaatttccatcaaaatggtgtattctcggttcggtctatgtacttagctttaattaataatggcaacattgagagaaataagattatatggagacttaagatgcctctcaaaattaagatttttatgtggtacctacttgaaagttgcttttctccccctagtgggttttggtgattaatgatgaataaggttaagggactaatgagtttattgagatattcaggtgattagtcccaagaacttaggtgatcaagagatgcttggagaccccctacaacattcattcaagcggatttgaagcccgaaagtcaataggatagtttcatatttgaaatcgagttttaggaaaaaccgtactattaagaggggttccaagtgtggttctgggatataaaaagtaggggtgggcaaaataagaccgaaccgaagaaccgaaccgaaaagaccgagaacgagaccgagaaattcagttagtagttcgatctcagccctcaaaagaccgaatttttttcgggcaattcggttattagcttcggttaaccgaattaaccgaaaaaaccgaatttgtggcccaataggcctaggaggcccaataagcccagtaaattgctaaccatagaaatcacacgcggcgccctcaacccatccatcgcgccgcatcgcatcgcctccgcctccacctcagatccccatccatcgcaccgcctccgcacatcgcgccgcgccgcctctgccggcatccatcgcgccgcgccgcctccagcttgccctcctccgccgcggccccgacgagcactgcctccagccgagctccgccgcggccctgacgggcgccacctccagccgggctccgccgtggccccaaccggcgccgtcgtccgcctccagccaggctcgcctcggcgccgtctccagcttgcccacctccgccgcggccctgacgagcgctgcctccagccgggctccaccgcggccccgacgagcgccgccgcggccacgccaccaacccttgccgccgagccaccgaacgtctccagcaaactcggtctgaccaagaccgaaaccgaaaaaaccgagaccggatttgtcggtcctgagtttttctagatgaaattcggtcctgagttttcaaaaaccgaaatgaccgaatgaccgaagaccgagaccgaatttttcggtcagaccgaacgcccacccctaataaaaagtgctcttagtgggttccaagtggtagaatattttttaggagctatttttggaaatggctctagcccggatagagaaggctggccggaagttccggtccctggacccggaacttccggaccttgcgagttgaaaattttcctaagtgttgtccggaagttccgagtgtcaggaagttccggactccttccagttcaaaaatgtgagtaacggctagatgacgtcacctagccgttatatatatctagatcgcacccagctcaccttttggccatttcacttcatttctttcatgccctaggttcttctagcctctcccaagatccctttgcttcctccactcaaatctagagccattcttgtgagattctgagaatagatgagagtgtaggagtgatttggagaaggtttgaagattaggtttgtttgagcactttggatatcttgtgggctgtcacttgggcttattactcttggagatcttctcctagacggttaggtgtcgcctgcgagcttccaaagatcttgtgaatgtcccgggaaagtttgtgaaggttttcctcacctccgcaaggaaacgaggtaagtgattaaagattcttgtgctgagtttttagaggttctcctaggtagagcaacttgcacttgtggtcttttctagaaggatttgtgagttggatcttggtggtcactcaattctagaaaatgacctaggggtgttgagttgaaggcattggacttcttctgagatctttgcacaagtgaggcaaggggttaatcgagacccggctctttggagcacctcaacggagagtatgattgcaagatccgaacttcaggaaaaaatcgcctttgtcctctctgtgatgattctgtgcatgttgttgtgattgtgtatctgctctgtcttcctgtagtttaattcgtgcaatttagttcaagtcactgttagatcttcaggtttttctgttgctcggaagttccggtggttagaacaccgaaagttccggacagtctgagcagaccggaagttccagtgttctacaccaggaggttccgggcctgctgaattttaccgttgcgatttgtttgtgatttttcggaaagcctattcaccccccccccccctctaggctacatctttgtgcgttaactacttaaaggggttgctctaacaaaggacaacttagttaggagaaattggcatggcagtttgaaatgttgtttttgcatgagaaataagactattcagcatttgtttgtggagtgtcactatgcaaaatttctttggagagctctacaatttactactggtttatatactgctcatagtatacctcatatttttgagaattggctcatgggagttgataaaaaaatctaccaaacttattcttgttggagcatccgctatatgttgggctatatggttgtgtagaaatgatatggtttttgataaatcaccatttatgtcctatatgcaggttcttttcagggcaacatactagctccaatcttgggctcaactactaaagtgtgatgaagaaatcaagtcagtgaaagctgcatgtcgtaatcttgagtcatggttatgcagctattcgctaactttggatggagatccacaaataggattcaataatttttgtgatttttttatgttgtgtgagtttttattagtttgtgtgtgcttttatttattcaggtgtgagtttttattgagttggtgtaatatttgactgtatctctttgagcaaaggccgggattatattccattatctaaaaaatgatctttttttttgttaataagcgattcggataaacatatgaataagcgaaacaatgggacttggttgtacttacatggattgacttcttttataaaagagaagctaataaattatggagcaaatttaagaacccaatgttttatggttgaaattgcacaaacccaatgtattataatgggtggcatatatataacctaagctgttatggtttatggttttaaagttttataaaaccctacccaaccctaaatatttacttcaaattttacaatttgaaacttttagttgtcaacttcttatcaaggttgttggtctaactaaaagaaatttcaataaagatgggttttgtgaaacatttcagatatgccttaaaatatagttttctgtaactccaactataacatacggagttttatgaaatttactatttttttacggggatgaaatttactgattaaccataaaaaaataattataagttaaacgagagtgattatacatgtcttgctcgaaaagatttcgagagttgttcggagccattgtttcgcttattatatttgcaaatgaaaagtaatttataaataaaactttcacatatgtgttcttagcgatctaaaagaaaatgctgaaaaataaacttcagtgagaaaaccttaaaatcatctccaaatttaaggttagaaattcaaattttgactgataggcataatcataagcgaaaagacgagtcccgtttatgacgcaatacaattgaagcagtataacacttgttacgaaacagtaagtgcagcgatttgtataccatgaaccagcatttgaatgtcttcgtatcataatcttatacggcattctatcaatcggtatgaacacttcgtgacatgaaacgctaaggacataaggacatgtttgacagggcttcaactccacctcttttagagctgaaacattaaaaaaaatagagcagggttaaggttgcgtcgcaactctactttggagaaataacacaggcctaaaaatatcctaataggattttctcctgtgggtgaacatgtaatcggacacagctaccattccaaaagtgtatatataacttcccaatgaaattatggccttgtgttgaattccaattggaacaagtttactttaggtccctcaatttgtcgctgagtttgaattgaaccataataccaggtatagcccatctccaaactcgcaaaatcgtgtcaaatttcatcccaaggcagtatagctcccggttccatccgacgtagcattttgactccggttagctgtgttgagtcagcgtgggacccaaacaagctccacatatcattagccaactctttcttcctcatctctctccttctctttgccatcctcaccaggtcaggagtcaggctgcgggcaccatagataggggcagtggtcggcatccggcgatcagtagggagaagggcggttggccgctggtggcatggacagggaggcggtggggtccaccttgagccagcggtaggtgatccaagagaacagtggcgccgccaagcaggcaccccacttccggttgggacgatgttagcgatgtcgtcgccgagggggctagggtttctgacgggaatacatgttacatttcaggagccagaggtttagtagaggaggtggtgtttgtgttgctgctacaggcagaggtcgattctgtgcttgtttgtccgacgtccgtgtcgggccatctcgatcacctcacgccgccttgtgagttgaaattttctctctgtcggccattcatgttttgttttggaatttttgctcgatagttttttgtgatttctgatttccctgtgttagcgatactaattgctttgaccatataactgaatggtgccatcaacatctagttcgtatatgacatttttgtttttgcgctcatgtggtcgcttcaattaagtgaaagcagggatgtgtccttaacaattgtctttcatggcatttctttcctccgaaagcactgcataagaaaaaaaaccaaacttttgtcccatgtgatgtgttagtatattgctgatatggtttgatcgatgtatggcaactcttggcagtgacactaataaatgaataatcaatgtttgaataagatgcacacgcgggtaaggaacggtactgtagttgtatgcagtacttatctcttgtactttggacttgaactaggctggcttcttctggtatcatcacttagtttcatgtccactactattagtcacatggtgcattccgatgtttgttattttcgcaatgtagttttctgagcattgacctagaaattaaacaatccattatcatgtagcgagccctggattttttttacgggtaaaacagcaggagaggctcctactgcacttatattaaaaggaggaaattcacatagagaaactataaggggaaaatataaggggggaaaagaaagaggagactaaggtcccattctttttcctaacaagagttgaattgaagattaagattttcgtggcactcttttcaaactgctaaacggtgcggttcatgtgaaaactttctatatgaaagttactctaaaatatcatattaatctatttttaagtttataataattaaaactcaatcaatcatacgttaatatcacctcgttttgtataaaaaaacttaatctccatcttcatcttcattttcagtaaaaaagaacaccacccatgaatccatgattgccaagatggtttatctgcttcctttactctatgcatatgcagagtaaaattaccctagtttggttctgtaaatgtaaacaaaggagaacccactgctttgagatatgatcatggttgttcttgtcttccctaatgaatctactacacttgtatttgttaggtcggaaagatgaggaagggactacatcctcagatgcagtatatctcatatgtgacttagagtggcaggctgatgaacatcatgatgaccaagatcagccacaccggcaaagtgcaccacatgagagcgaagcatcggatggctcagagcctagggcagattgccaagttcaagcgccgatatgagctggaagcagaggaaaacaatggcaggtagggagaattgcgtgtggaaaataatagtagatgttgttggtggtaggcgtgtagcatgtttccgtgctatcaacataatgtgtgatccccacgtttactttgttatgctttacaccatttcgggttgaagcttgaaatttctgaatttcagttcgccgccttctgctgtaaacaaaattaagaatgtagacattttcctacaatgaaatccatttctactgatacatgatggaatgactattgtactggtgtttggaacccacattttccattcagtgttttggagtatttacaacgctgtggctttagcttgtggcttcaatccccagttatgctcgaatgcttggagtagctcttcaaatgtttatcaatgtgtcttccacaagacacaggtgtgggtgtcataagagagaggtgatccaaaggagagcaaaaatggaagtgagcgctgccatggatctggttcgccctgctgatccaagatgaaagggaattgaggaggatagggctccgttggcggaggttggcaatggagaaaaagagtgccggttgcattttggtatgggaaggagacgtagccggttgtgatgagagcaaaggtctcgctcatgaggtgagaagaggaggggataacgaagaaataagggagaggttttctatgcaaggtttgctttataatttctgtgctaaaacttttagtcagaagtcaaataaaaatatataagaatttgatggaaagtagaagagctgaattacaaaattatgtagggcctatctagagttatccaacattgtaagagttatatctctctacatgattttacctaagtagcgcgcctttttctcgtgagggctacaccacgaaaccactttaattgtaaatattgtatactcttcaatctcaaggcgtatggtccataggcaataaaaatatctacatcaacatccattgaacatattctatctccttgatccatatttctcatgttagtgttaatatactctatctcttttgcaagaagagttaatctatttaatattgtcacttcttttcctagcaatctagcagtgaatatcgtattcttctctttcttcccatgatataagcagggaatgtgaaaacgagctccaccagcaatgttgactcaagcttcgtaccagtaacaacaagccagaccatgaatatatcatctctagtggagtcacgacacgctctttctcaacgagatgtaggaatgaagatgttgctatgcttattgtctcccatgcctatgtcatccatacaacgttacttcacaaggacacatttatgtaatgattgtgacgtatatgttgattctacagttggaagagtggaaccaagctccgtatggtacctacttttttatattagcgtgtggtgttggtactagtgtgttcgttcctcctagtaaaattgacacactagatagatagggtaaggttaatttttatgactccgtcagcatacaagagtggtaccaactatatgaagcaatagttatgtcaatatctacaacaattaattttttttaaagaccataagatgagtccagttgggtcctaccgatgaattgcttcctacaatggtaaagcttaaagctctttttgactgtatgtatacaatgattaaagtatttactgttacaatatttaatgcttagggtttattttatcaatatatattgtggatacctttctgtaaagtctctttcaaaacatttaaattttacaatagtttataattggcttgttcgatgcaactgtttgagctgcattgcatagcccagtcgttcggctgcaacgatctggactattttgaatgcagtcagctgttttatgctggttgcagctcctacagccgttgttggttggctgttgtagccaccatagatgctgcagcagtactagaacagctagctctttcgaacaggccgaataattttataagacgtagattaacctttttatggtaataaaataatacaacaataatttattttccttgattttttttgtgtgtttgggaattgggatatgcaaatctgctcgtggcggactggcggttgccctcgcacatgtcgtggtagtagctgtggccgtggaaaggggaggcaaccgcacaagacgacacgaacgccaccacctgtccccatttcccccaacattccgtcccaatccaatccccccccaacatggccgactccgccgccgccgccgctgggccccaccaccaccaccgcctcccctcctcctcctccgcctcgccgccgccgccgcagccggaccccggcggcaagcgccagcgccgccccagcgtccgcctctccggctccatccccctcccctcccacctcccccaccctcgccgcattcccatcacccccgcctcccgctcccgcaaacccctccacctccaaccccaccaccccaagcccgagcacgaggaagacgacaacgaccacaacccctccaaccccgcctccgccgacgccgacgccgacgacctcgtcctcgccgccgccttcccccgcaagccgaggtccctggaggccgtgcagggagagagcgttgcggccgccgcggcggcggcggaggagaagaaagccgcggctaaagggaaggtggtggacgtggtcgagtggctgtgggggatcgggatgggaaggtacgcggcggcgttcgaggcgcacgaggtggacgggaaggtgctgccctgcctcaccatggacgacctccgcgacatgggcatcggcgccgtcggggcccgccgcaagctctactgcgccatccagaggctgccccctcctcccgctctgcctccgcctcccccgccgccgccacggaggtgaaaaccgttcttcctgtggtgttggtagtagcttagctcggccctaacttcgtcggaaacttaggatgcgtgggtgtcaccgtgccgaatagatttaggaggtgtaaaaagtgtaaaatagatggggaggaaggtttgatctgtgcttccctgtggaaatggtagtgttggcccaatgcccatggtagtgtcactagtgttgtgtacaaatgcaaagaggtgaaatggaaatgctaactgccctgttttaatgttgtcgaattctctccgtggagtggtagtatttgtgaatgtggaaagatgagatcgaaatggtaactgcaatgcttttgcaagtgtttggagatgcatcttaattggattaggtgaagtagccacatgctttgttattagtggaataacatgatgttgcttggtagtgtgacaaatatgtttagctgtgctgggtgtttatctaatgttttgttgtttgcgattgatcggattagctcctgcaactgcaataatcttgcatgttagtccatatcataatatgccctccaagtagattttgtcattttgctatgcagtttggttcctctcgtaggtgataaacacataaaaaatatgtacaaatgttacatgcaacattgtttctcacaagttgatttgtctttatggcagcaattactatagtgtgtagttgtgtactttcaggtttgctggttccaattttagattgaactagagtatgttgatgtgttttttctgggtaaaattgcttagtgcgctcagattcctcttggttttggaaagtactgttgtgaaggaggtcggtgcccatctgtcactatgcttaccagttcaagctttcttaatcattgaatggcagaagtcaagtttctgtcatattgagatgccaatgcctgaaatcatgtgactttggaatcgaacttacagatgttcagagacattttgaagtaagccacatttgtgcatgtctagttagttaaatattgaattcttcctcatttccttaacccttgttgataaggttttacgtccttgtccatggctcatgtagcgtagatagtaacagctcactggattgctttctttctggtcagtcattatctcatttttcttgcaagttttgctggttcgaaggtcacgttttacaatgctagtgttttgggcttttgggccttttctgtgttttttgctatttccagtaaggagatgccgtcccagttagagattcaaggctatatcctcccacattattgctgcatctgctttatatgcttctgttcttaacatgtcttaaattgttgatgacaaagaacaaatcttcaggactctcagtagttaatttgtttcttttcatgctgtaaatgaagccatatatgctctagtttttttttcacagcaagaacatgagaccagttgcttaagcaatttgagaggtgatccatctgccataaatgaaatcaaagtaattgaattctccagaacaaactcttgcatattcttagttcacttttttgaaatgttcaagtataaggaagaacttaaagcatgtcgttatgattttgaaaactcaagatctctatgctttagtacactcagcaacttcattgatccacctcaagtacattctgcacttttgggttaatcgccttcctgtgtaatgctctttaactcttatttggtattgattggtgtatctgatctttctttgcatgcttttcttgttatctggttttggctgactcgtgaatcataccatttggcttcaatggattattaacccattgtaaccatgtccttatccaaaacaacaagtattatcaacccagagggagtatttctagttcttcaatgtgtttcatagtgacaactagttctattcatgttaaatttacaacaaaatatcctgatgtcaaatgaaagaactaaaatcagtgtttctttactagtctttcattttgttcctagcatgttgtgccttctagcataacatcaggtatgagatcaagaagttctaaatcagttactgctgttaatcttctactaggaacttgaattcgcagccaataggaaaatggaagtttttactacatactttgacgtcaagattggctctcttccatctatgttaattaccaagtttttctgacccctcttattttgattatcacggactaattgtttttatgttgccagacagatgtcagggagccaagccaatgaaatgtaccttcccagtctttgtataagctgcagtttattcaggaaagcatcgtaatgtacagggctagagatagtgttcaacttcaatctagcggagtatacagactacagagcagaagggactgatagtctaaactaattatctcaatttgtagctagtattgccgtatggtccaaaatgtcttaggtttgcctggttgttgcatgaattaccacactcacattagccccagttatgctctctttttcgctttccgtagaagggtttatttaatggacaatttctttcacaccctggcctatatattggtcagtgtgcgcactaactagcaagttggtaccaattcacaccctcaacacatttgtccctcctcatgggctttaatgagatcatctaatctgggctgggatgtcacgtggatggatgcaagggtgtataggtgaaatggaaaatgatagagatggaagtttctgccaattctgtttcctagggtaatatggtgggaactttagatagcaccagttactcaggggacattatagggatgctcagaaggggatcctaaatgtctgtgctatatatggcaatatagaggcctgcttggctgtactttacaacgctatctgcggctgcgacacagccgtgccaaggagcagttggttgcgacgtaggggctgtaaagtgcagccagataggcgattttatgatgaatctcaagtgattctgggaccaaatatagcatacccttgtacaaaactgtaaaaataatggtatttctctaggttctcattttttttggttgggaatgggatcaatggcagcatcctggatggtatcaatattttgttagaagatattttcttgtacaagattgagggttgctccctgaaggccattcactgttcttagtcatttttgaaggcctacagaaaccaggactgtttgatgctcaatattccaatgtttgtttgaacgtgcagtctactttagatgcagtttgtgcaccatatgaaggtccaatcgaataacaacagataaaggcatgaatatttgatgaaacagaaatatttgcatgcagaaaagaaaaacattttctttgagatatgacatgtagaattttggatgggccttctcctgatatgatgaagggagctatgcacttcaactttctcttgacttgtgtaaagggggagtgcatgcaaatgttgatttatgaactattttactacttagatgtcgtcacatgcccctagcattatatagacattttaatatactattattaattcaattagcttctgacttatttattttgttcatggcactagttgtggcttatatgaaaagacagtggcaaaagtggattgatagtttaaccttatggggccaccttattttagtatgttaatgaatcatttgaagtcagttcaacgtgtgatgcttgaggaagttttctagtatattaatgggaacaccatattattactgaagggcatatcattgtgcctatattgtgctatacttgtgtaagtggattcaggtggtgggcttaaagtgctatgaaatcattagttcatcacagccccttataaaatcattttcttctctgagtacacatgaacatattctttctgggatactgggtgtgcactagtgtcagacccaccacttttatgttatcttaatttacctgggaagttctctttagtttttattatcatcataattgtgagtataataaccaagcaatcaacataaactagccatttcatccttcttttcagatctgaagttgcatagtatatacttgcataactgaattggctctgtcatttccttcactttcaagatggcacgagccatgcagatatgctgtcaaatcaatctgctttttggttctatgatattcttacggtattaatgtttttttattcctgtagtgaaagccacttggatggaagtatcttgctggtactaccaagttacttttagctggtactagccaatcaattaaaatttcatttttttatccgttatttcatccttttcttttcatcaactgtcggtgaggactatagcaggtgcttctcactagtattggtgctttgtcttctgttaaatgggacctacccccacctgcctcaactttgtcttactcattcctagcatgctacatcaaaggttcttaactatgtttactagagtcagtaagtaccatgtcatagtatatccttgcatcctctatcggtgagacctctgtattggagttgtgtctgctggctaacactactttatttcaaacgatgtttatgttccaacgtatgttggctgcaatttaatgctccatttacttgtttattggggaaaaaaaccttattacccccaaaatataagcacttaaccccttaaatattttttgattcattctaccctttgaatttctaaaaaagactcactttgctccctgatagatttttttaaaaaaaaaattatccttacagaaaatatgttttaattgaaaattttgattgtgccatatataataaacctgtaaaaagataaacagaaaaaaaaaagagaaatatcattagagggtagagtgagtccattttagtagtttatgggtagagtaaaccgaaaaatagtttgcaaggctaaatattcaggcaaaatattttaagggagtaattggggttcttccttatttattagaaaaggtttaattttgcgggtctccatccattaattaactttttcattgttacattttgtttattatattttgacctatctgtagctgtcatagatactctgatctatgcttggttatgcacttatgcttgcttgtattcctctcgtttgtatcttgacttgtgagtaatcgtttgcacttccttgtctttgatgctgacttcgtactgcccatttgcactctctttcattgatcctgacatgctacctgaacactaggatgctgcttcatggcacttccattgtgctacattgcgacatcattaggtcatcgtctgcatttctttttaaatcttttgtaccaaaagtttctttctgttacagatacaaaaagtcctgagcattgtagtaaggctgggtcttatacctttcttttctcccttctcaggtgcaaaaattctatcaacagattaataaatgaacatatgagattctggacttgctgcacttccatatatttggaaaaaggtaagaggaattgcatacggaagcaatgtgattgtaacaaaaataatatattggagttaaataaatatgaaagaattatttctcagggtttttgaagtacacttacatttgggtgttacctataatctagtatccttgggtgtaatgctattctttctcattgaattgtgtggtgaggattagatgttaggggagggaaaaaaaggggggagggggggatcagtgcctgcgtgggctgtgaaaactaattacaatgtgaaaatttgctgtgtctgtctgtcggtgtcctgttctctccaggtgctagctcctgccgtaattcaacgtcatgacctggttcgtgctcagcgagccgggggccggcaaaaccgctgcagcctctgccggcggggtgcgccagatggtgtcgcggacgtgttgcagtgtcatctccggaggaaggcgctgccctcgacaggtaatctctaactgcacataaatccacatatatatcaatgcacttgtactgtgaactctgttgccactgctaccactcttgactgtacaaccagtaataacatattatcaagaaaaagactgaaatgtgtactctgctaaatttctagtttgaaatagttttttgtttttccatgtcaagggaaaataaatgttgatggttcttggtgatatgggctatcaaatttttcattgaatgaattactggcaatgattattgaaataatttcacagctcaatatatgcgcagtttggaacaagtaattcactgttatatcatggtttgttccgctcagacatcagagcaataggaaaagtaagagcctaatttttatatgtatacatataatttgggaaccaggaatattttggcaacttatttccttcaagtttttcaaacatctcaatgtggacgatatcctttactgattcatggatatagccattagccagacagagagtcaagggcagaggagagggaaaagaggaaaaaaaatataggagctaatgagtggggcacacttgtattaagcttagtttgttttattcttagactatatatataatgtcttcgttttaccgttaatttaatagttttgtgtaaactattttgttggtgccgttcaatgcatctggacccagagcaatacagggttgattatccgaatccagtaaggaatccttcaggtcctgaattcctaacactccagttaattcattttattatactaataacaaagttcacacacgcaatgcacgaaagggcttctttgtttactttgaggttggaggattgaaaaggcccaaaagggaagtgcaaatatataacgcagaaatcaagagatgggttagtagtagtgcccaggaagggcactgtcgatctcgattgagatctttgttaggaggccggaacccatccacctaatcctagctgtttatactacaatatctttggcaaatgatgctgccttgtcgcctagtagacgtgtctcttacaaaagggcatgtagcctagtggttacagtgacctgagtggtaccctaaggtcctgagttcaaatcttctatggagcgaattttagattggttgtttctagggctaagttccctatttcaattgccgtatgtatccggttggatgtagaggccgggtaaaaaaaatacccttatctaaaaaaaataataaaaaaaagacgtgtcactcgccctgaaactggtttcaagctttcaatcaaacgttttaggagggaaccagtaaagatggcttagctgcacgcttaggagccatgaatttcacacaattcttgtgcctttctaaggccactttaattcttatgttaatacagtgaaggtgcccccaatttctagaagttattttacgattcttgaagagatcaataaacacacgcataataatcatcttacaaaaatactttggcgactaaaaaatatagtttaatttacaatgggagtatttcacagcaatgtattccgttttatttttagaacacttcaaataacaattaatttgctacaattatatatatgtagcctctcttaccttttcgaattgaattaggtaaagtgcattgcagcagtaccacacctacatgcacgtatatataaagtcatcgagagtgatcaccaggtataagaacgttagggcaccattcaaggtggaaccaataatagatactagtactatatatctcatcagctataataatgatgatgagctaaactaataaagtgaggttaatacacaattataaatgcatgcagagttggcatgcatgcagaaaggtatttgtagtggtggaccaatacatgtatatgtacatttaaacatgctatggttaaatggaagccgccacgcactaattaaaatcgttcatgatcgatcccaactcaactactggccttgtatattttacagacatacttttcagacatgcatgttcaatggcatggaatcaaagattttgaaagtttaccctccttgttaatcaattcaacgaacatgtaaaaaaaactatatctttagaggactgttctcacaattatatactgaattatacacacttttagtgtaaagccttcagatagctgaattgatatgtttgttttttttataaaaaaaaactgaaattatgcttgctaatatatataccacgaaaaaactaatcgctcttgggggaaaaaaaggaaaattgtagatgagctcgctacgtacaggattgtttagttactttaatttaaggccgataacatgacttcgaaacgagaaaatgaagtaggattctacagaaaagagatacatgaacgcgcacattatatgattaacgctatgtccgtttttaaatataaggatttttatagtttatttggagagattaagaatgaagggaagaaaacagtatatgatgccccgctatattaaaataaactcaatctattgtgtacaaattaagcttcagaaaaaaaaaatttggctagtttatgagacaacaatagtacatactccctctgtttcataatataaaactttctagtattgtccacattcatataaatgttaataaatctagacacacatatatattatattcattaaaatctatatgaatttaggcaacgctagaaagtattacgtattacttcctccgtttcataatgtaagttattctaacattttccacattcatattgatgttaacgaatatatatatatatatatatatagtaaatttgtttggtgctccatggtgcccgggcaccattgttgaaattgagtatatacccaattcaaatgagtatgaaactttttcaattacttaggtattaacattaactactttactaactagtttaaagcaagtttgaactgaatttgaacttgtttttgttagattttgattctaggtatatagcatccatacatataattagttaggtatgtaatcatggattgtgaaataaagttaaatttgagttgttttgttgataagtataggtatgaatcaaattattataactaggtatatactcacaatttgaaaattttgaaaaatttgagtaattttgtgcattagataccatggtgcccgggcaccatggtgccccatatgagtgtcctatatatatatatatatatgtgtgtgtgtgtgtgtgtggattcattaacatcaatatgaatgtggaaaatgctaaaaatgacttacattgtgaaacggagtaaggacattgcaaaacggaggaagtaaaacatacggttaatagttagggaccctaaaaaggtatattagggttagttaattatacagtcatatttggaaagggtgcttgtgagataatttgcaagcaatggggcaactaaagaattgagtggcactagaagctggccggtttgtgtgatgttctagctagcggctaacagcgtgcagggtgcacacaacctgtaattaagatattcaagtcctagacatatttatgcatgcttagaaagcaattgtgtatttgcaattttgcactcacatatatagctagatatttgatgtctccaataattttaattgcgtgagtgtgatgtatatcgagctagtacatgcatcatatattctcttaattaagagaagatatttaaaaaatagttaaagaattcctgacatttaattcataagaagctatataactaattattaattacaccatttacagctcataggactgtcaataaaaactcgcaaaatgacaagaaaccaaaaggcactacagattaattaagaaaataattagatgcatataaacttcattttactccaaaatatccaatagtataaatccttataaattacaggtgttaattagtactttttctaaacacaattgttagttgttcaatcatctctctatatatatatatctagcaagctaatacaatacccctacatatactccctccatactcataaaggaagtcgtttaggacaatgtttaagtcaaatcttaggaatatacatcattaataactcttaagtcgatgagtttgaaaatgtaaaaattatatgtatagatttgtcttgaaaatactttcataatagtatacatatatcacttttcaataaatatttttataaaaataagaagtcaaagttatgttttggagaccatgtcgctgtcctaaacgacttcctttataagtatggaggtagtaccagctaattgaattaattgattaatttcctacagggtcgctgccccatgcacagtgtcaccaatgagggaggctgctgtgtcggtggggaatatacaagtactacaacgatctctcatcccatcatttcgctccctacgtaattaaggcagaatgcgacacagcgacgctacttcttcgctaacacactcttaggcgatcgtatagtatcaaaataatactaatatatagggaccatatataattagttgtatatatatggtactaatttcttcgtcaagctataatatagctggctgcgattggtgaacagcgaatcgcggcgtactgtagcatgatgtgtgaggaggaccagctagctagctatatatagctagcacgtccaaggatatgtcaaatttgatggcaaataaatgatgatcacaaattatttgaaacgtagaaaaaaatgcataatattctgattccctaattaattaactgaaattgagttggttccatacgatactatgttatttttactaaacagtactaaataattaaagtaatacgacaagaaagaaaaaatgatccttaattttggaaattcataagacatttcaattttacagtaaaactaaaaataatcatgccacgagctagtcatatatagacaagaggcagccaagtaacatgcaagtatttataattaacaagggcagttagagaatactatcttttttttttattttccctcacttttaagcagcaggtattccatatacgtacgtacaagatacttaagataattttgaaacaaaataattaatacacaaattttgttatagagcattacagacacaatattttcagggaattagtgaaccctatatgtaacaattatatatattgtactccctccgtaaaaaaaaaaccaacctaggacttcgatgggacacaatttagtacaatgaatatggacagatcctaggttggggttttttttggacggagggagtagaggtttaattattgtagtcaatggcctgtactttgtggggcctttggatcttttatagtgaggaataaaatggtgggggaatttaataaggtaaaataccttaatctggcaacccattagcaggaatagcatgaacatccttgatactactaatattctctgtgaaaacccttattagttaatcaagtttgtaatgtgctcatctttggaatgtaggaatatttcacatganattttcaggaatacaacaaaatttggttcatttggaaacttgtgtcaacatgtttcaaaaaatcatgttgggctactacgtggatcgcttttgcatatacgcccacatcgagcttgagaagtcaatagatttgcgagcttataatttgtccaaggcttgacctttgtttaaatattattcagaagtcgagattttttttttgacagccctatagctaacanaaacactcagtagaatanaatgtcatggtggttggtatacttggtaaccattcatcacctgtcgattgctactgctgaggctttcgagcatggagaattcagtgtacgatcgacgaccaagtgtttttcaaactcaaagatcgacctaacctagctggatcaaggacaagttggtgaattagacgttaattagttgctctcaaatatatatggtcgatcgagatagtcacaataaattaaggacctcgatcccattggctacaccccgtttaccctatctagctacatctttaattgctactatgtactattctcctatacggttttaaaatggattgttttcaataatttttcagttgaattctcaaataaatgtattaattatgcaccaaattggattttttttacttgtagaaatccaattaggtctaatggaccaacaatttcctgacatgtcaaattaagtttgctgctctccgtcgtaaagaatccatttctggctatgcacctgatcgaacaattacttcgtctaagtgcatagctacaaatatggtcttttaatttagggactgagcagatatacgtacacatttctttacttaggtacctttaaattaagttaatccaaaatcaaaatcctcgtttaaattttgtgactacccatgggcgttggtgattagctagacatgcaagtaatagctcggagggagaaacatatatccatgaacatataacaattatattagtatatgctagtgcctgtgatagggacttctcatgctctagctaggactaactaattaaacagtgtttaaaaaatacctgttcaaattcgaaagaacaatatcaaacggctagctaggctagcttgcaaataatgcatctattttttgaaataattaaagggacatgcatgtgtcataaattaaccctttttccttaattgtgatctcgttcgatcttaattatttgtgcttaatttgtcgtatgtgtttgtgcgttttatattctttgaagtcaaaacaccttgaattaactaatatttaatcatctcgaccgggggagaaaactatatttagtggttactccttacatctagctaggtactgtacgagacttcctaatattatagtactagattaattaattaattgagaataagagaacatgtactccctccatactcgaaaggaaatcgtttagaacagcgacacggtcttcaaaacacaactttgacttcttatttctataaaaatatttattgaaaagtgatataggtatacttttatgaaagtatttttcaagataaatctatacgtataatttttatatttctaaactcaacaacttaagagttatttatgatttatattctcaaggtttgacttaaatattatcctaaacgacttcctttataagtatggagggagtatgatctggtgatgatcgatcatgcacgtactcgatcagtaagtaattaatcccactacaataatggagtagccaccaccgaatttcgggcattttgttcatctctttaaaggtgtgtttagttccaaagtttttttttcaaacattcaacttttcatcacatcaaacctttcatacacacaacatttcagttacatcgtcttcaatttcaaccaaattttaaactttgggccaatctaagggggtg

SEQ ID NO: 26790 - DNA, 24611 bp, Oryza sativa
tctaaacacagcctaaaagtaagctagcttagctaggctgtactaccacgcacgcgtgcatgcacgattccaaaagcgttagttaacgtgtcatcaacccgtaaaaaaaggaacatatagctatagattaatgatagtaacaattaattaatatatataactggtactactgttaattagtacactggtactactgttaatagtactattagttagttgaccctacaaacacaaactatatatgtaccggccccatgatgattaattgtcagcgtgtgttaattaatctggcaagagcatgatataaagaattaccactgtaattgccttagcttaagtaccattatatatttttttttcaacagacatgcatggcgataactacgacatgcatcgtcatcgccatggcacgttgcacaacttgcttgcttgcatgcataaactatagctattgcatatgcaacgatggagagaggtaatatgcactgcttagagcaagttcaatagtatagccaactactatctccaaatcatttatagccactgtaatagtcaattcgtacaatagtcgcttactatacttttaatatctggtcctacctgtcatacatacattacgtcttggagtccatgctgcagctggctacaaatctgtagcccgctgctcttctctctctttctttatctttttaaaatatatttatagctggcttatagcctgctattgtacctgctcttattgctgctgctgctgtttttttttctaaggagggttaatttattttactcggtcggtctttacatccaaccggatatatagagcaggatttggcgctgctgctggtgtgtatatattgtgcgttaggtctgacgtccattcacccgtgaaagctccaacatatatggctgctcatgacttacgtacgcgggcgtcacgcagctcgatcgatctgtccctcgactcacgcacgcgtgcgcgcactcacttaattttaatctggttttatttagtttggtatagattcaggtctcaaatctacgttgggtttgaagtttgcaagtggtttcaaaaattatgtttcatctggaataggaacaaaatgattcatacctaaattatcaatgtaatcatatatccagatctagaattactcagctaaaaataaaatcttggatctagatatgtgccacataagccttaatttccatatatttatatacctatactccctttaaaacttatctagcatttggtgcttaattactattagtgtatataaatactgtacttggatatattgggattttttttgaaaactatattttgttagtaacatagtttttagagaaaatatatcatgaacaatttctatattacacaaggtggtcaaagtggcttatcgaaaacttgacattttgttgctagaaaaatcccttggcaataatggtctcccggctggttgcaatgtgtaattgaacctcccttcttttaatatattgacgtgtaatactttttgtgctttcgaaaaagaaaatgtatgttctaatcaggagaacgttaggctctagtcgtgatcgatctgggcagtggcatggtacgtagggagctagtgcagtgatagttgacagctcgaagtggctaataaagctaggacgtccacttcgtagtgtgtggcctgttgtgtgtggcttactggtttaacttacaacagcgtaccaacgtttgaccttgattacgccaagtgatcactaggtttgtgtcaagttaattcacaattattggatattccttcgatcgtcaaccgtgtattcaagatgaaattatcgatctcaataaaaacgtatgcatgaccttgtcttttcacttttcctcttgctgtttggggcccgatttcctcctagttagcccagtgtgttgtagttgtaaaaatcttttctttcgctaatatattaacgtgtaaaacttttacgtgtttgtacaagaaataatataatcttacttttcttttgcgaggacagttaaacttaatttacagctgataggttatacaccttcagtaaaataatatgattatataaaaaaaccataaacatagttattttagtttctggaataaataattatccgtttaatttttatgtcccacataatacgaatctttttatgtaaaattatgaactaatatatcctatttgtttttttgctaaaattttgtaagtttcatatttcataaaaaataataaactaaaggttttcgatggcaggtaattaagtttattgagtgcatgtgcttagaccaaagaaaatcaagttttgggtacaattacataaaattaaattggagatgaagggccttgagcttattgaggtgttgaataaagttataagcaaccttccaattttaatatacgccttgaacttttagattagggtcgaaatgtttttaataccgataactcacttaaagcgtacgtgatgagctagcggtattattaacatggctaattgcaccttttacaatgtctatcaatatataatataaatcatccaacgtcttcttttataattacacgaaagacgcatacatacaccgcccctagcacacatatcctccaatgtcccttaattttccatactttgctttctttgtagtttgaattttcctcctcttaaatattagagtacaccatctcattaactcgttaagttttgagaaaaaaaaaagagatatatactaccttcgtttttagtagatgacactgtagacttttaggcacacgtttgaccattcgttttattcaaaattttacgtaattacaatttattttattgtaagttgttttattactaaaagtactttaagtataatttatatcctatgcttttgcataaattttttttaataaaacaaatggtcaaacatgtattcaaaagtcaacggtgttatctattaaaaacggagggagtatatatgaatgtgttggaattaatgaatgggccttagcccactcgaagattaattctttggaaaatcacaaaagcccacctcatgggatggcatgcatgtggagtttagtaccaccttgcttattctaggagagggggacctccttaaaagggaggatgccctcctagtcacttgaagcatgtgtggtggagagaagaggggaaacacacgcgcgcgctcgctcgcctcgcctcgcagggcaggcggcgcgcgtgcacgacgtacgcgtcgaatggtccgaaaaattggctcctcacccttgcgcagatgcagcctccttttgcagttttgttttgctgcaaattcggattcgtttttgttttggaaacgttccgaaaaatccggtgcgtgcaaacggcgtggagtccggataagttacgcgcgacttatccggttcggttacgcgcagtagagattgtgcgggcgccctgatcaagcgacctttctctatataaaccgacctgccgtcttcacgcaacacaagcgaaatcaatctagggtttgcctcctactctgtactgcgccgtcgctcgtagactactccatccctctcgccggcgtgcaccggcgatcgggagagcaggtctccggaacctctgccttcgacgtcctgcaccaggagaaggcagcaataaggtttttgggaagcgcttcgcgcgactgctccctgtttgttcacgacggctcgccttcctcttcgctcgcgtgtttcgtgccttcgtagacacctgcgaaaagtttcgaccaagcagccggtctttccgtcacctcggtacgtgttcaatatgatgcgcatatttgatctgttcatgttatactgtgtagtttacatgtatagatctaatgatgcgttcttgctagttttcatctgtaatgtcatgatttatttatggaatagattaaatcattatatgtctataatctcaacagaatgcgtgcttgttaactcgctacaaaaatgcctaagcttgtgtaaatgaatgtacagaatatgaataatccttcaaaagccaagggcagtgtgtctaactaaaggaaaacaggaaagaaggaaaggagacaagaaaaaaaaagatgagagatggcaaagatgaatgggccacctactagaagatgtccaaacataaaacaaagggtctctgtacatgcatggctcaactaccactctagatagatcaatatatgcatagagcattttgaaagtgtgtgtgattaattagcaacgcaggataacgactgaacaataaaacaatcaatacaatttagtagaaagtagtattttgacatttttatgatacatttttaatgtgtaagcatgcacagctaaaacaaaacaaaaatgacgtgtccctttcatgaaaaataatgatgttttgtgtagcctttattctagaggctaactagatagctagggaggagtgctgttaataaatcagaaaaaaatacgttattatattgaaaagatcgttacagaattcatttccttattatcccaagttccatatatcagcttagccaaaacctgaatttaatgcacaagggtatattggtagttaaggtgaacgcaagttaagaaatcaatgaggaagacctatcagggaaattttgacaagtttattttgaatctagataaaagtcgatatagctttaccggtggggactcagttttgtaaatactctaataaaaaaatcgaaaggttgattttattggaaaagtctatatatttaactcttatgtactatgactacgtgtcacatcttttgattccgctgtaaccgatagtatcttgtatgagagacctgttataagtacgtacatctagattttctataatttctatctagttaattaaattgaccggttaagatattgtttttaagagttctgtaagaaaattttagtatgtagcagtgctcgattttattttatgtacaattttttcggtgcaccacatgacagcctttatattgcaactgttattcatggttttcttccggtggtgatcacagatatatctgtaagttcttttttgtcatccactcattttgaagtttgtgtcagaaaagatccagctgttggaattgatgtataaaattttcaattaataggaataagcatataggtctactacaacatatttattaagattacaataagcatgtagtacgtgtgtggccagtgtgtattttgggctccacgactaaaagatgtactatgaattgatctgtgtgcgaaagaaaaaaaagtatatagcatttataattgtgtttaaatatttaataaattaatagatttcaggatttcagaagtattattgcactacatcctttttttgtcctatacactaattaaaaaacgcaattaatgtctgtacaataaaaggtgtatgtatcaagaagaaaaaggtagtagtacaatgtagggttaaggaatcattaactctatttggatttggaatcagatagcacttgctgtaaagattcgtcaagcgctatcataatggcccaattgaactatatttatataacttactgtagacaagtgagttaatttacacaaaatactcctatatataatggtttgtacgtcttgctattaattatccaattttaaatacttggccgagtactcgtaaagtcaagtcgacttatcattttattttctttttcaggagagtttcttgtgctatatattcaattttgtccatagtacaattgaaaaggtagttagttttctgttccagcaaaatacttcttttttttttgcgatcgaatcccatgtcttgtaagttgtatacgacatttaattagtttttgtccttttgcaattggcatccagttgttgtttttgttggagtgatatgcgtaggctgctttgcagtgtgttcgatccatccatctatctctcatgcagcaaccacccatttgcatatgcagcaccgacaatatttgatctactccagtatgcagtgaatagttttgcagcctttcagcacatgatttttaaactggcaggtctctctttttgaccaagtactgagtactatgttctatatgtacacacctaactggatacatcaattttggaaaaacatgtaaaatgcttatatatattttttggaatggagttagtatatgcgagaaacaatatatctatatgcccggttctttttcttaactctaaactttaactttgtcttttttattaacatgcttttcaaactattatatggtgcgtttttgacaaaaaagtttctatgtagaagtagttttaaaaatcaaataaatctatttttaattttataatagttaatacttaattaatcacgtgctaatgagttttctcgtttcacgtgcgcagaaaatatctctcaacggggcataagtgtacatatccgtgtttataaaaaaaatctatatatttaatgggatgggattttcatttaccactgaataaaattatttcttaatattaggaagttgctgtgctaattatatatatagggaatttctatactaactaatagaaaaaaaaagtgctttcatgcgcatgagatcgatgtcggtactgttatagtagcatgtatgcatggctagctacaacatttgttttagaaaattcaccactaactatatagcaaaaaacaaaaataaatatgaacatatatagatgagatgagatgagatcagatcaatgttgctacagtttgtgcatctagcttagattgaaatcaggtccaccacacggccggcttgtcgcaacaaggatgcagaggccattatgatgatcagatctcttgatatctctggcagatatacatttgtgcaatgttggcaattagctacaagctagcaagctagtagtaccatctatcaaagcttctcagtcagctagcttattgggaaggcatatatatgccacaaacaaaagcatacattgtggtatataggatggtgcatgactttcattgcattaggtgagacttggccttttttggggacagtaatatcttcaagtaaactcaatacccctcacacacttcccatcggtttctcgcaaattatatatataggtaccacgcgtgctcttgtccctattccgaataaattgtaggtgtgtcttattttacataggttattttttttaaagagaagataattttaacttaattttatgcaattacatgagtttaaatctgatctaaattttgaacttgggaaatttataggctattttcaccgaatcaggtcagtaaaaatgtattatgcttttcattggtacccctagccggccagcaggatgaggggacatgactatagatatatacatatttggcaattctttggtaagttcatttgaggcaaaacaactgtggaaatgttttcaacttgccatcatgtatgggcaatacatatatatgctgaaccttttttggtgcctttccccaacacagaagctcccaaccaccatatatataaccttaagactgtaaaacagtcaaaatatggtagagacacaagtccatgcccaagacacaactaattaagtaagtgaggtcactaattaattaagtaatggaaactaattaagaaatggaaccttaagcagcaacaaaatcacagagagagagagagagagagagagagagagagacccttaatcatggggggtcacccatgatgtaacacttggacggacacccttcacctacaccaatttgtcacaacaacaacaacaaagacctattggaatcccgacatccaaactactgtccgtagctctaaagctcctttcacctaccaatatttttgcgctctctctgcagcgattataattgatcatctacttaagctagcaacaagctccaaggtaattaattaatataaaacacgccacgaaattttccagatgcatgcactataactatagattagctagctctaggcatgcagtgtaattaagtggctgttgacaataggttagtacaagtagcaaaaccacccttctggcctgcccttatttgtggatgccacttgtcctagaaacttgttctctctagtccatgcacttttctcagttgagttaatattgttgcactacttttcctcttgtttttttttctaaaaaaattactgtatctatctgtatatgctgataccaggaagatatatttatgtatatatatacaggggataatatttaatattatgtgtatataatgtatttctcaccgcaaaacaaattgatgtgcttctccccacaaaacaaaataatgtatttcccccacacaaaaaccaaattaatgtacttccattatggaacttggcagcgacagtctctcacaagaacatgatgatgcatattattttagccgtgtcgggcccgatcgataccacgaaatttttgtatattgcatatatacttttgcatatagctgtagcaactgaaaaacttaatttatatgtgttaatattttcttagaatcttgttaatcctttttatagctcagtggttaaaattgtttgtttctaccaagagccatgaggcccccatgaggccatgacccacagtggggactactaaactaacaaagctaataactctagttaagaaactctcaaaaccgcgacgaatcaaaaacagtaaaccaacggacattgttccacactcattcaaagaaaacaaacatgaaaaaaaaacataaagacaaggcaaaggagtgcaaaaataaaataaaataaaataagcaaggagctaggtatgcatgacatacctgtgaatcatcctcaagactcagcttgttaaccaggtacctcatcactactctaactgtcatcctcccatctctgttaatttggccacaccatgcacacacaacatgtgcgcacacatgcatgcacacacaaacaccccccaagtcaatgtggcatcatcaaaaacatatacaaatatccatcaccaacaagaccaaaaactataaaatcaatcaattaaaactaatttaattacccaagaagttgatcaacaaattaacaagaagatcattagcttttctactgctccctccgtctcaaaatataagcatttttagctatcaatccggacagccaaaagttgttatattttgggatggaggtagtagctactagagaagtagagatgcatgagaaaaattactaacctaaccctcaagaaactccggggaatctgcggcaatggcggctccctcctcctgcaaacatggatcaacggcaaccgcatgaactaaccacccacattgtctctaaaccattcatgaagatcatcgtcgtcggccatggtgtactcactggttctgcgccgcccggagcacgaaccacgtgccggcctcgtgcgccggcggcggcggcgccgccgccaccaccgcccccaccgccgacgccgacgacgaaggccctgggcctgggtggagcaccgacagccgcagctccggtagctgcggatcggccgccgacgttgatgggcctgcggccgcctcatggtgggcgtcggttcttggccgtttccggcgagacgacgacggcgagcccggcgccgacgggccgagcccgagctgcagcgacaggccggcggcgtcggtgccgccgccaccgctgctgctacttgtgctgggctcctggtgggcgacgtcgtcgcgaggcggcggcgccgtgattagctcgggttgctgctgctgcggctgctcctgcggcggcggcggcggaggggcggcggcggtgtccttgctctggcggtgggggtgcgaggggtcctgtgccatggacctcaggaaacaccacgacgacggcggcgatggcggcggcggcggcggcgggtgttggctgctatcgcttcttcttcttcctcttctcgtatcgaagacggtgagctggaggcggcgaacgtcgacggcggccggcccatgggcgtggcggtgcggccggagcaacgtcaccatcctctcatgcctcctcccctcttgtggcgttgcgccgcgccgcggccgacaccacgatgggatgggaggagatcgatcgatcgacgagaggaggaagaagaagaaaaggagaagaatgttcaaaggagaagagtggctttcatatataggtagacaagctcatttaatgcacacactaatcactttttctaatctctctcactctcagtaattaagtggtaatagggtttagagagagaagctggtaagacgtcaacggcgattgcacagtgcccaactttgatccgtggatggaagtgaatggatggatggatgtactacaagacaggaataatttatgggaaaaggggcataatattgtgctgaggtcatcacatgccatgcactatagtgccatttgtgctgtgcccccctctgatcatgactactagctagctagtttatggttaccaacacattctagctatgtgcacatctactggcttgtgtggtttttaatgtatattatcagccacttaattgctcagtaacaccataaagatcaaatatccatgtgagctagaaataaatatatatatataacattgatgtgtgacttcctttattaaaaagaaaacattgatgtgtataaatccggtactccctccggtttcatatttccttagacgtaatcttatttacggaataattcattaaagtacctttgaactcaccttttcttacattggaaataaaaaaatagaatcaacaggaaatataaaaccggaggaagtaaaataaaaacagtgtttttcatccaaccctcgatttgcatcataattttgccactgatatctacatcgacagaaaatatagaaccggatgaagtatacttttcaaaaattttcatatttgtagtgcaactcatctagaacacgagctagaagtcaacacaaatggttcgcggccgtctgcgaaataacacgacatatcacggacgattctgttgctacaaacttcagttattgttactctaatagtggtgctctgctgatggtgggggcacacatggatgagacagtgcttactgctcagggatgatgcatgacgaaatgagttgaccctagataataaacacatagatctagctagctaatatagcaattaattgtagtaaattaattactccctctgattcaaaatacaaggcacaactagatgtttcataatataaggcgtgcatgcatatatgacagtaattaactatgaccttctctctactaaattattgtattttaaatcccccacccttaaaatctctaattatattggatacatggattctatttatcggagtgatccaaacgaggtgatgataataaatatttcttaatctttgagttacgggtggttatgtcttatattttgaaatagaggaaatataagtactataagctaattgaatcaaaaccgtctgcattaattatctctttatttaaaactataagaacaatagacctacaagaaagaacaaaaaggatctaagctacctcttctctcttctccaactaaaataacaaaagaagtggatctaaaccatgcatctccctctcttttctactaaagtaaaatatactccctccatttctttcacttgtatataaaggacatatatagtcatagtccccgattaatgattatatttttttttatttttataataatatatttataaaactataaaaatagaattgcatgaaattattttttaatgaaactaataatatcatatttcacacatcaatatcttaatattttttaaaaatattattagcgagtcaagattttgaggtttaataattaaaaaaaaatacaacctcgctaagatgtaatcttcaaaaataaagtaggccctccaccaaatctcctaaccttagatctacaaaagaatatatggaccaaattaatctcctagctatctgcaagcctgagcttaagcagctcaaaacagctctaacagacaaatcagtggtaggccgggctcctggtctcgagttgtgtaataatgcaagacagttttttttttttttgcttagatctgcatgtgaatcattgctcacagatttgccaaagaaaccatgaataggagtatatattactggtgacgtttagtgcaatatatatatggtaatcgctccatgcctttctcagttgatttcgtagagagaaattatcactgcagagagccacatctgtttatttttagtactcacatttgttcatgtacatccacttctgtccctttgactttccatgtagaagacagaaaataaattataaaaatcaattataaaaaagctgtaaaagaagttcatcggctcagtatagaaaaccatttcctaaaaaacttttaacggtgaaagagatcttttcttcttagaaaccaacttgaatttccctcgcaaaaaaaaaaagaaaccaacttgaattctaggaattacaaaagaaatgttaaaataattagaaatttaaactcaaaaactcaaaaatttaaaatatataaaaatgcaaaaatgttgaatcaacattcaaactcataaataatcacagagaaatgacaaaagaaaactcagtgcggtgaggccaacgagcttatagctatgttgggtcatcaccatcttcaccttgcacttctagggctgaaaacaggacggattcagatgaatacagtttatatcacctcatatcccatattttctaagcggatttagagtgggtgcaccaggtgtgtggatacgggtgtagagcagattgtttcggatgtcatgactggtatggagtcggtgtagaggcacggaaactaattaaaattgttggatgttacatgtatatgcaatcaatacaacatcaaactagcaaaggcagaagcgggaaccaggaggggcgtcgctttgccactaccgtgtgaggtgtcatcttttgctgtgttgtcacaaggtggaggcatgagtcatcgacatgtggatgtttcaactggaggcgcgggatgaatatcaacgcgcatcacttgccactcgcctagtgggtgcagtaaaagcatatcgtcttagcttccatctaccgtcggctgtgggtgtcaacggtgtcgtaagacgaacgggtgagaaattattgaaggaagttgagatggtgagatgagagctaggtttaggggcagagccatattaattggaggcacacctagggatcagttgtattatttttaccctaattctctataaattcaaaaaatttatgcaatttatttggaaattacatggaatcattgtcctaagcctagggcttgagccctagctgccctatgcctagatcctccgcttgctagattaattgatggattaattgggccattcagtttattaatgggctgaggaagtcgaattatccgtcaaacagttcaacggataatctaatcaaaatattggataatgcgcatccagtgtatttttgcaatatatatgccacatccaaacccaatacgcaccatatatactactcctatctgatatgttttcatccctctttttttttatgcatttgagggggaggaagggagggtcgattggagaggataggaggaaaaagaaaaggattgacggctgagattgtcttttaattaatcgaacggctcgggggataggcttcaattcgtgcaacgaaatcgtcctcgaggtttctgttaattgcgcacttatgcttagtttctccttaattttaattgatttgtctcatgtgttttgtttgcttgtgactgcatggatggaacacacgagctgtaattaaccaagttaatgatcaattatcgatcgatgggcctgtgcatcgcattgtacgttcgtacgttgcacctatattgattttgtagttaattatgtgagtgcattgcatatggttattggcattgcttataaaccatatatactgtgggatgaaacacaagtttggaaggtgattggctgctttcgcaacgtcgtagtacgcttcgttttgtcacatcagatgggagtacgtacggtgtgcgtgcgatggtgcccaattaactgggatccacgctatatatatatatatattccttccttcagggtcctcttccttacctgaccatacttttcctttttcgtgccatatatgcgtgcagtatctattcacgtggtatgaaaaatcggacgggataaatccacagggccaacaataattgttggtatatacttcatatcatgaatacatgattgtttttagtgactcggatccactactacagaaacgatttttgcatgtggctatttataaatttcgcaggcgaaataaagatttttgcatggcacccgcaagcgaaaattgttttcttagacaggcatgctaaagccgccctgctctataattatggcaaaacaaataaaaattccaaaaaaactgcaaaaccctagcccgcatttagccactgccacacaacatccccgaaacactagcccgcatcctgaggtcacccacgacacgatgaaggaggacctgaggcgtgctaaggaggatccgctcattgccgccggccgcttccaagtccggcgtcgccggatctgtccttgtgttgttgtcgtcgttgtcgttgccctagccatcgccatcgttgtcttcattgtcttcgttgtcgctaaggccggtggaggtggattcgccgctcccgagtttggcgctactggatctggcctcacgcagcttgccaccgtcatcgtcgttgtcctagctattgccgtcattgtcatcataatcgtcattgtagccgatgccagtggagatggatctgccgctcccaagtctggcaccgctggatccacccatcccgggcccgagggcggcagatctgctgccgcgtggctttgtcgcagccataaccaccgttgtcacggccacggtggaggaaagggagggggaggggatggccgttggaggaggggtaaggagagaagaagagaacagagtggggttgggggggagggaggagaggagatattttaagagagcagagaataaaagagggggaggggatggggcagctgactggatgctagaaaaaaatcatcactaccctaccaagtcaaatagcaaacatcttatgaaacccgaagcatcaagtagagagcataggagatattgctggggctcagcatgccagtcaacttcagcctgagacatgcccgacaaaccactcgaagatggcgaccagatgtgttatacatctcaggagacttgaccaaatcgctggagctctacaacatctcaaatgctctaaactcatactcatgtgaaactagttcctaggacaagcactagcttcacattttcatctaagcaatgataaacagaaataggacataaatagaaaataaaactcagattactactagatatatttacctaggccatccggcctaatatataataatatgtggaagcttgtatacccgttcccacaagcagccgacgggcctcttcacaaatctacctgcgaaaattgattttcgcacgcgatccttgaatcgtcctaggggagaaatttttgtatacgaagatagttatagtccgcctgcaacctagaggtagggatgaaaacggagcggatagtttccatctgctccagacaaaaacggatacaaatacctttcggatcggatatataattctcggatagttcggatacagatacgaataaagatattttctaccggatacggatacagatatggtattgggatttccgtcggatacggataataattcggatatccggtgaacagtgctatttggatatccgtaaaagccatgagacatatcgcatttctttctaactctataaccttcaaaatacctttatagattttaatagtagtttatctcttaacactagtccatactattaatattatttaaattttaaaaaatatttataaattatactttattttatataaaatgagctaattatatatgttgatatttgtttctattagaagttgagttggttttcgtgttccgagaaaaaaatattttcgtattcgtgtccgatcatattcgattcttattcgtattcaagataatccgtatttgtttccgtattcgttttcatatccgataaaaaatataaaaacgaatatggtatgagcattatccgttcgtatccgctccgttttcacccctacctagtgggagttttgactggaaaatcgattctataaaacaaataaatttttattaggatacacttatgaaacataataaatttttaatatcaaagtagttttaagacaaatatatgcatagcattttttaaaaattttccaactaaatatttttgaaatttagtgatgaccaaaatttcacaatcttatgctgctacctttcttttcaatttttgttctctatgttttgtaaggttccacctatgataaaaattccatccttttgtcatgtcagaaattttggttgatacatatataagtgtactaattgagaatctagtggttgataagaataatgagctatagataagggggggaaaaagaaagaaataaccatgcatcttattaattagacgagaccccacaatattactcatcccattaattcaatccacagtaagaaattgatgagatagtacgcatcatgcatcgctataggcggctggagatgcactgcagtgccgatattaggtccttgtctcacgtcgtttcgatcgatccctggcagatgagagactgagagagagcaatctggaatggaactgcaaaactataaaggttttggaacggaatctgcaagcatcctttcagctgatggcccctgcattgcatgcagtagtagcactcgccggccacttgatcatcttcgtgtctgggcaattgtcggtcgtcccaaatttgtgcatcatttctaaatgtgtgtgcatgttgccggcctggagggtgagatttacagagttaccacaaattaaatacatatctactccatctgtctcaaaataaacactacgctggatcaagtcatttgtcgtagataagtggtcactgatacctgtaagagttacctttgaccgcaatcaaaacccgttacatgtaaccttcatatgtgatgggtagttattttaactcgtcattggtgacctttatttgtcatggacatacattttagcccgtcaatggtaacttttatctacgacggatcataattgggacccatcacaaggtgaaaaattgaaaaaataaatataaaaataattttcacctagctagttatagacctttatctgggcatttacaaatcacaaaaatcatcacaatcacattcacattcatctagacacaacaaaatcacccagctacggtggagcttatccaactatttgcccggtggagctccgctccgccgttcgccaccactagatctggtgattcgggctagacatgtgcaccaggcagtctggggcgttcagatctagagacaggcgccgacgttgaccgagttggcggggggaggtggggtcgaggatgctatggagttgtgccccctccacagccatggtcgcctccatcactggttccttaggtggggtgaccaaatccgggcactgcaagctccggaaaggcttgatctaggtgaggccagcccgcgggcggaggcaaagttgacgaccggtgcttggggttgtggagacggtggccggcactcgcggtggagaaggcggcctccagtgcgctcgagctagaagatgtagaggacggattgcaggtggaggcagaggcaatggccggcgcgagcgagtagaggcggagatgatggaggtggagctagggttgcgggcactaggttaagagagtgatgatgcgggggaatcgagagagagggttgataaggcttggttggatggccgaatagataagattaaactcgttaattaccaaatgacgggtaaaaacaaaaaacaatttaagattaatttttttaccattgaacatgttgtatttatcgcccgttacatatgagtgttctcatctctgaccaactgtatttataaacccgtcacatgtgtagggtcatctatgacgggctgacatgtgtgcccgacagatgttacctttgtccagtgcacaaatggacccgtcacagataacccctaacctgtgatgggacttagcccacggtctcatctataacggcctctagtccaacccgttacagatgaggccatccgtggtaaggcagtccaagccatcatagatggtcttgtttgagatgggcaaagcgtagtgaaatcaattttaattttatacatgaatcataatatagtttatctccatatctattatatactaaaagtccattaaacttcctagaaacgctctcaagccgccacgtgacgttcctataaatactcctagaccgccatatggcactgttaaatctcaccatcgattttcatttaaattggtggacccaatactttagactattagattagatgtgttatttttttaaaaaaaaagaatactttcgcatctatactgtgggccggacaaagaaacaaaacgtaagttatctttgtacgtacgtacgtacatacggagaagaaacaatgaatcttatgtcctcttcaacggaagaaaagaaaacatgtaccgacttacgataaaaatgattaataagtaaaaaaaacatacgtaaagcaggtacgtagtgccactgaaaaactcgatgctccataaaatatgatattatactattttaaaataaaatatattactctataaagttatgcaaatatacatagctaaactagatcgtttacaatataaaaataaaatatcctatgaatactctttaaacatcctatctataaattattttaaaatcatatatctaatttgtgatcaagtcggatcctctaattaaataaactattgatgtctatgttcataaatacatcattatatatgaggtcaacatataataaataatgttataataataatcagaaaaataatgaattaccccttaaactattacggtcgaccgaattacccctataaacctaaaaaccggacatctttcaccctcaactattaataccggatgaattacgttccccccctaatgcggagtggtttttcgtcctacgtgtcaatttagttagcattttcttaaaaaatggtaggacccatatatcatatctcttcctcaccccttcatcatctctctctttcttctccctccacatatcaatcagcaaggctaggggcggcaagcggcggaggccactcctcctcagctgactcggcagccacatgcgcattccaatcaaggccgtcgtctccatcatttccgttgcatatcgttgtcgcatgatgagagttgcaggtgccggaggcgagaacctgcgctggtcctcaatggccaggttctgctacacccctgccatctagaacttggccaacaaatacggccgcagctatgtctaccatagcatgtcgtcccaccacggtttttaatcgatccccatcaccaatgcctctctcccgatgagacaacgaggcggatcaatcaagcaagcaagcgtaggggaatagacgaaggaggaggagaagagcggcggggtgacagtgtgcctacccggccggtccagtagcaatgggagggagaagagagaggctggggaatgggattcaggaagagaggcagagaggtgagagaggagaggggtagagagggtacagagtgtcacatatggccccacctattttttttttaaatacagactggactaccatgtagggctaaaattactccaggttgagttttttttggggggaggggtgggttaattcatcttttattaataattgagggtgaaagatgtctggtttcgggtttatggggtaattcagtcgaccgtaatagttagggggtaacttgtacttttcctatttcaaataattttacatcatattctaggtgtcaaataacacttgatgactatataatgctaacttaaagctctatatgtaaaataattgaaaacaacacaatttagttgtgtatttttaagcagatatgatttagttttaatatgtctgagattaagattctcatcttttttttaattgttagaactatttcaatagtatatgataagtgggcaacctaaatgttacataaatgtaaaaaataattatgaaaaatatttcaagccagtgatcttgctataatataaccatttagtccatcataggatttatggtcatatatgtatgtttttctctttgtcaaatagttttgataacaaatgaacaatcaattaacatgcgcaataaactactcatgatatattttttttatagttgaggaattccaacttatcagacataatttgatgaatgtatgtcatgcactctattgatgtgactatgaattatacttcaatcaattagttattataaataagtttgggaaaatagattcattctctaaattaattagtaaaggtatcttatgtgattatgaaaggcgttgaaaaatacgatatgcaaaattatatatatttgtcaaaatataaccaacaatatggtcctttggagattttatcgtggtagtattttaaaaaacactttattcaggtaagaaaatcacatatagtacaaatagaaataaaaaaaactccattattccattattgttttattatcgtgacacatgttgttctcataaattcatgtcattgtcataaatttagggttgtatggtttcatgtaatatgtcataaccagatattaactaaaacatgtttaaaatagagtgaagatctattttgaaaatataatctaaatgtaaacatttataataaaaaaagttaagcaacattaaataagtgtccgcgcatatgcgcgggctatttatatactaaaagtccattaaacttcctacaaacgctctcaagccgccacgtggcgctctaataaattaaagaaaatcctagaaattataagaaaaaaagaaaaacatccaccccttgattttcacttaaattggtgggtccaatattatacaccgttagatgaaattgatcataaaacaaaccaaatactgtggggtcccacctctcctcctcctaccgcgcatgtgtgggtatacgtacgtaacatgtacgtacgcttccttcccttcctcttttttttttcctttttttcttctttttcccatttatataatggatattttttaaatcaccataattttacaaacaaacaaatttaccatcatacaactcacatgtaactaaattagctctacaatttttgaaataaaatttacaccattatatgttaccattaaattaataatgtaatataatttccactaacatatgtactcattattttatactattattttcaaataatgcactattttaaaataaagtttacacatctatattgcgtacctatcaaataaacaatttaagatctatattaactgatttatacgtacacttaaactgatggacccactatttaaatcattcgaactatttttattacattggactattattctcaaataatgcattctttcaaaataaagtctacaacattatatactatatactgtgtacccattaaattaacaatttaaaatctatactcactaatatgcacttacactagaaccactagacccattatttaaatcatttgatatattatttgctaataaataaagcgtccgaaatcgtctttttggcccgctgcacaatgcacgtctgcacctttgccttttgcacgtgtgtaaagcgtcgtgtctgaggcatctaaggtgatcacgactgccgcagcactaccgctatgccacatatcaaatcatatatggagatgattaattttgttaataacatggaaagaaaattaatggtatgatgcagcgagagaagaattaaacactgtgggttgtgttttttccaacatttagctctgtttaagctgaaaccgagagttgattacagaataattataatgtatcgtgttatgtcatatttggattttgtactatttattcatataggtgaaagaaattattatattataaatctgagcacaatattaacgaatatcaagagaactcttacaaagacaagggtgttataagggagtttaagaccctcttttttttctagattccatagttggatttttgtttgcacgctttccaagtttttaaatggtgtcttttttaaaccacattttaactttttagaagtcaatttatttgtttataccctcaaatagctacaacataaatcagataattcatcaatttcagctgtcctaaaccctaagtagtacgtatttttttttcatgcgagtgatggtgatctgtaaattggggatcaacggataatcaaagtcgtaagatgaatatgtaagagctactataaacaactgtaaataggtgtcaaaattaattgctattaattagacatctaatggcttgctagccacacaattaatttctctttacatgcatataaacatgcaggaagctggaacaaatattaccatgtgccccatacatatatattaagctacatgcatataaacatgcaaaaagctggaacaaatattaccatgtgccccatacatatatattaagcggttaatattttaattacatgtgttaagtcctttaaaatttattaaaatgctctcaaactgccacgtggtgctctaataaattagagcaaatattagaaattctaagaaaaaaagcaaagtatccactgcttaattttcacttaaatcgggacatccaatattataaactgttagattaaattaatcttagaacaaactaaatactacaagatcccacctctcgtcccgtggcataggtatgcacctacgtacgtgggtacgtacgcttcctctcccttttttcatttttccctttcttctttttttccatgcatacccttctctctttttcttactatatcatgcgcctttatgggactatttaatcacaagaattttgagtatcttgctctcgcaatttttatttgtggctatactacacggtaggtatgcatatagatggactgtatgataattaactagcaattgtttcttatttactcgagaaaaaaaatgattcaaaagtcgtaagtacttaatccttctcttactcaaaagtttgtgaatggtttttaagataccttaagaaaatagaacccttaaattattataaaataatattatccgaactttagtttgcccttaatttatgagacaaaatttttgaataaacaataatcttatcttttaataatataagtgcccacgcatgcgcgtgggccaccttcctagtttatatataaaagttggcttattttgggatggagagagcacttctcatctattatgatatattttcggtttaacctcaaaaccttaaaatactaatagatgcagaaaataggagaattgacatctaaaaaaaagatatagcagtagatttgtcttccaaatattatatttaatttctttttagtaatttcataatgatacgattagagaaggaaatgaccaaacatgtacataacatactatgtcaaaaattggtcccaaaagccaggaaagattcaaaatcatttacccacacttatggcaagttttagctagaaatgaacttataacctttgatgcagaaccccatttaggacaggtgattgagaaaacatatgaacaggaaaatggtaggcagagtctcaatccattgttccaaataactaaaaagattttctcataaaattcagatcctacaaaattcctttaaatatcctttggtccaaaaggggcctaacccttgaattccctcaaagctctattttccactctgcagtgcctctgtttctgtagttcttggaggacttttctatggccgcccctacaggtgaaaacttacaattgctctttgttttcaaatgttaattttcttgaaacattggaagataaaaacaaccgaatttcgagccaaatggcatatttcagctataattttgtccaagttcctatttaaattctggaagtggagcattgtccggtacatgcctacatggaatttgcacatttcttaattaactcctttcttgaactgacttatcggaatagagtttccattatctattgcaaataaaaatagttgcatgcattggattacttaatttcatgaatcattgtttgcaatactgatgaacaatgcacatcgattacgtacctaaattggttatttatacattttaatgcacgttttgtatccctgaaaaaaaaagagtgcacgttttgtattattgatcatgataacacatatgcctaactaattcaaggactcattggcttcatgacaattatcagcaaagtatcatttgaaaaagaaaaaaaaaagaggaaaaaacgagtagtcaacttactagtgcatgccatggggaagtccactatgctgtacagagagaataatgccagctatttttgcctgcacaggggctgcagga

SEQ ID NO: 26791 - DNA, 2177 bp, Oryza sativa
ggagaggcaaaagagaggacaaagacggtgagaagaccaacaacaacaagcccaacaactacaagtcgaagggttctaaccaagggaggaagatggagaatcttaggaaggtttttcaacaagtttgcgccgccttcgaaccactaagtgatgtagatggtgaaagtggagatgatgataagggaaagaacgtctcggatatttgcttcatggcgcgtggcgaatctgacacagagtatgaagataatgaggtgagtgcttttgaagaagctattaatattttgagtgcaaaaaataaaaagtgtgagaagatgtataaaaaacaggaatttatcattgaatctcttaagtctgaaatgataggttaaaatcttttattcctaatgatgatgattgtgaaaattgtgaggttttaatgaatgagatttcaaaaattagagatgttaatgctgcacatgatttgaaaaatagatcttctcttgcttgttgttttgctttgcacacacgcactttggatgagttgtttttaactaaaaagttgttgcaaaaatatcaaattgcttttcatgctagtttgatgtttaacatgatttctgctaaaaagttaaaacaacctcatgatgttttggattgctcaacatgtaatttgaataagatgaaactaaaagatgctttaggtcgtgttgagtatatggaagatgttgtgaaaaacaatgaagtgttttcttgccccaaatgtcgtaaaagcaaaggtatcatggtagattgtgaaaattgtgctaatttggaaaaagaggtttcttatttgaaaaattctttgctaagattttctgatggtaaaaagaacctcaatatgattttggatcaatcaaaggttagcacaaataaccgtggtttaggttttgatcctcatgctcataatgctagacatcctcctgttgtgttaggtgttggtgctagaagaggtgagattttggttaaacctgatactaataaaactgtgtttaaatctgctggtatcatgtctactatgaatgcatcttcttcaaaattcaatgttgtgcatgcaaaacctcctgtttctgcttgtgttgctaaatcttcttgctctaacaatgtgtctaaacaacgtgaaaaatatgcttgttctttttgtggaaaagatggacatcattgttgatttttgtttcagattagctcataaacagaaaaaggagagagagatcgcttttgcaaaatcaaagtggcaaaaatcgggttttccctcgaggaaaccggtcagaccgcagtgcgtcccgcggtcagaccggcgaccggttagaccggctggagagcctcggtcagaccggacaccggtcaaaccggcagtacagaggcggtcagaccggcctctggtcaaaccggtcactgtacctcggtcagaccgcctcggaggaatttttctgaaaattctaaaattgattttgcacgtggatatatgcctattggatcttctggtcgtgtgtctcagtactggattcctaaattcttattatcatctaaccccagtactgaggcttcgacttctacttgtgtgtaggctttggtggcaaggaaggagaacgtgtggattgtggattccggttgttcgcggcacatgaccggtgataaaaattggttctcctccctcaaaaaggcatccaagactgaatcaattgtctttgccgatgcttctactagtgccgttgtcgctacaggtttggttaaggtaaatgaaaaatttgaattgaagaatgtagttttggttaaggatttaaagtacaatttgctttcggtttcacaaattgttgatgagaattttgaggttcactttaagaaaactggaagtaaagtttttgattcttgtggtgattctgtgctgaatatttctcgctatggaagagtgtttaaagctgattttgaaaattctgtttcacctgtgataacatttttggttgctaagtttgataaagatgtgatgttttggcatcgtagactgggacaagttggttttgatcatctcactaggttaagtggtttggatcttgttcgtggtttgcctaaacttaagaaagatcttgattggtttgtacaccgcgtcgtcatgctaagatggtttttacttcacatgctcctattgtttttgtgatgacggatgc

SEQ ID NO: 26792 - DNA, 3309 bp, Oryza sativa
aggatattccaaagacagcattcatcactcggtacgggtcgttcgaatgcacagttatgtctttcggactcactaatgcacctgccttcttcatgaatttgatgaacaaggtgtttatggaatttctagacaagtttgtcgtggttttcatcgatgacatacttatctactccaagtccgaggaagaacatgagcagcatcttcggctggtacttgaaaagttaaaagagcaccagctatatgccaagttcagcaagtgcgacttctggcttaaggaagttcagtttctcggtcacatcgtgaatgctcaaggagtagccgtggatccagcaaatgtggagtcagttaccgagtggaccccaccaaggacagtcactcaggttcggagtttcttaggacttgcgggctattaccgccggttcattgagaacttctctaaaattgctaagccaatgacacagctattgaagaaggaagaaaagtttatctggtctgctgaatgcaataggagttttgaagaactcaaacgacggttggtgtctgcaccagtcttaaccctgcctgatcagacgaaagatttccaggtctattgtgatgcatctcgccagggggtaggatgtgtgttgatgcaggatggcaaactggtttcttatgcttcacggcagttgcgtcctcatgaaggcaactacccgacgcatgatctggaattggccgcagttgttcatgctttaaagatttggcggcactatctcatcggtaaccgttgtgaggtatatacagatcacaaaagtctaaagtacatcttcactcaacctgatttgaatctcagacagcgaagatggttggagctgatcaaggattatgatatgggaatacattatcatcccggcaaggctaatgtggttgcagatgccttgagcaggaagagctactgcaatgttgcatgggtagagcaactatgctgtgaggttcaacgtgatttggaacatctgaaccttgggatagttgagcacggattcgtggctgccctagaggcacagcccacactggtggagcaggttcgcatagctcaagcaagtgatcctgaaatagcagagctcaaaaagaacatgagagttggaaaagcccgaggttttgttgaggatgaacaaggaacaatctggatgggagaaagattgtgtgtacccgaaaacaaggaattaaaagacctgatactaaccgaggctcatcaaactcaatattccattcatcccggcagtaccaaaatgtaccaagacctcaaagaaaagttctggtgggtcagcatgagaagggaaatagctgaattcgtagcactctgtgacgtctgtcaacgagtaaaggcagaacaccaaaggccagcaggtttgctacagccacttcagattccagaatggaagtgggaagaaatcggaatggatttcatcaccggtttgcccaggacgtcatcggggcatgattctatttgggtagtcgttgaccgactcaccaaagtggctcacttcattccggtgcacactacctactcagggaagaaattagcagaactctatctggcaagaattatgtgtttacatggtgtacctaagaagatagtgtctgatcgagggagccaattcacctcaaagttctggcagaaattacaagaagaattgggaacccggttgaatttcagcactgcttaccatccacaaacagatggccagaccgagcgagtcaatcaaattctagaggatatgttgagagcctgtgcgcttgactttggtggagcatgggacaaaagcttgccgtatgctgagttctcttacaacaacagttaccaagctagtctgcagatggcaccgtttgaagcactgtatggacgaaggtgtcgtactccgctcttctgggatcagacaggggaacgccagttgtttggtacagaagttttaaatgaggcagaagagaaagtcagagctgttagggaaagattgagaatcgcgcagtctcggcagaaaagctatgcagacaaccgccgaagagagctcgctttcgaaacaggggattatgtgtatctccgtgtcactccgctcaggggagtacatcgcttccaaaccaaaggaaagttggcaccacgctttgtgggaccatacaggatcttggaacgtagaggtgaagttgcttaccagctcgagcttccctccaacatgcttggcatccacaacgtgttccacgtctctcagttgaagaaatgtttgagagttcctgaggaacaggcaagtccggatcacatcgaaattcaggaagatctgacgtatgtggagaagccgattcgtatcctcgaaaccagcgagagaaggaccagaaacaaagtaataagattctgcaaggttcagtggagccaccactcagaggaagaggccacttgggaaagagaagatgagttgaaggccacccacccgcacctcttcgccagctcttccgaatctcggggtcgagattccgtttaaggggggtaggtttgtcacgccctgaagtttccccctctccttgctttaaaaatttgttaaataaattgcccgaagaaattatcttaattaacctagagctaattccctaactaataaatgcaattaataattggaattggcatggtggaatttttcttgagttccccatgctccaatgcattaacaagatttttagtggaattttcagagccttggaaataattttaaccaattaaaaatcaccaaagtgcaattttaatcccaggaaaatcctttcttctttttctttttcctttttcctcctttttcctcttcttgggccgtcggcccagtccacccgtcgcccgcgctcggcctccccttgtgggccggcccgttccctttccccctctctccgggacgctgacaggtggggcccacctgtcaggtcgtccccttcctccagccacccgcctccgacggcaaccgccgccgaatccgccacgccgccgcctcctccgctcttcccgcgcccacgccgcgccgctcccgcgtcctccccacgtcgccgcctcttcccccgcatctcccggcccgtgcgcgcgctcgagagggcgggattcgatttcgaatcccacccctctttctctctctcctccccacgtcgccggctaaatcgggagggttcccggccacgtcctcccctccctcgcccattaaatcactctcccgagctccctctctcgttttccccatttgccgtcccctcccgtgtctcctaacgagcccacgccggtagccggtagcaccacccgttgccgcc

SEQ ID NO: 26793 - DNA, 1752 bp, Oryza sativa
aatgtccacatcagatcagaatgctgtttggaaggcattctgtcctagcacggccctgccgccgcacgtcaccactctgagaacactgcttgcatgacttcatacttttaaaatatatttggttaaaggacttcataggggctgggtcaaaaagaatattatgtatatatccgggttggctttgtccagtgaacaagtggcggactgatccatcccatctcatctctcgcgtatcgcgtgtgctgtacacgcgtggagtagggtaaccctatcgcgttttctcaccgtatcgtgtttttccaattcacatcgagagaaaagagggcggtggcggcgccatcatgcgcaggagctagtgacaccggtgtcgtgcggcagggcccgtggcgcctgtgccatcctcccttctctctcctcctttctcgcatccttccttttgctgccccctcgtcttcaaagccaccgccggcggcaggaaggaaaggcggcgtcagtggcggcaagaggcgaaaatcggctgtaggaacctattacagtgccctcctctctcttgtctgctactgctcctcgcatcctcttgtcatcctccatagctaaggtaaggaaactctagcactgtgcagaatctctgttattttattttcagtgccaaatatgtgcgattccgtttgcatgagatgaatatcccttactgtaaatagcatctgttcaagcacattgcatttttttccatcaattttttcatagtagacaatttactaatctgaacaagtattactatgtgatgtgggcaagtatatttgttgatgagatgatttacaataattaatgtatgctaattatcattattatatgtggcctcatcacttcctagttcctacgtatgaattgatataaggattaatgtatgctaattatcggtattttgctttggtttttgggatggctatgtgatatgaattgcattttatttccaaatatagtcatatgaatgtaatttatttttaaatagtgtggtctttatatccaaatactttttttgcaatgtgtatgttatatgaaaggtagcctcgccaactaatgtaagaaggttactctatctaggcaactcacctacatccctccaaccaaacaagggacagatccctcaaaccaaagaaaaaaaaattaggtcagttccactcatagaatcaaacataacctaggtccatcccataaaaaaacatgaatgaacgtgacacatcccaccttatacccgaaccaaacacaactaccaccttaccaacatcatgctggggaggctcgtcagggtcggaaacgctcagtaataagtgtcgggagctacaccatgatcaggatcaggtaacctagtcatggaaatatttctttctgatggagtcagacatcaaatgctcattgctaagagcatcccagcagttcatctaaatttcatcctccatactcctatttagatagtcatccaaaaagattcctactccattttacttttcactccaatagatcatccatattgcatcctccatataccaacatcctatattttactaatattttacaactaccacatatttatactcacctttcaccactctaaaaaaaaatccccccacctttatctcttctctaccgccgagacgacggggaggacgagggccgatcagagggacggcgcagtcggaggagtagctaggtggaggggtggcgtggtcggaagaacggcacgggtggcgg

SEQ ID NO: 26794 - DNA, 898 bp, Oryza sativa
ctgcagccctggccgtcgtcatggaccgcggccacgatctcctgtagtagcggcgaggccggcgggatgtgaagccgcccgtcgtaggtgaccatgtccgtgatcacggcccacggcgccgcgcgcgtgcctgcacggacctcgtcgtggatggcgaccaggctcagatccgtggcctggcgtggagcagccgctcgatgaaattgaaacggggcgcggagatggccaggagctcgccctcctcgacgtcgcggcgggagagggcgtcggcgacggtgttcatggcacctgatctgtactccaccgagaaatcgaagcccaagagcttcccgacccagtggtgttgcggaatcgtcgctaggcgctggtcgaggaggtacttgaggctgtagtggtccgtcttgacggcgaaacggcgtccccataagtacggccgccagtgccgcacagcctggacgaggccgatgagctcgcgctcgtacgcggcgagggcgcggtgacgaggggcgacgggtcggttgaagaaggcgaccggatggccctcctgagtgagcaccgcgccgaaaccatgggacgacgcgtcgcactcgacgatgaagagcttggcgaagtccggcattgcgagtactagggctgtagtgaccgcggtcttgagggccgcaaacgccgccgccgccgcatcatcccaagagaagccgtctttcttgaggagggcagtgagcagcgcggcgaccgtgccgtagttgtggacgaacctgcggtagtagcctgccaagccgaggaagccgcgcactgcccgaggcgaacggggagccggccagtcccggatggcctgcactttggacgggtccatggcgacgcccgccgccgatatcacgtggctgaggtacgcgacccg

SEQ ID NO: 26795 - DNA, 677 bp, Oryza sativa
tcagttacaaccaaggcatttggcattcttgtactagtatagtgttgttagtgtccatatggactctgaaatgtcttatgtgctcgttatgaggcttgtggtagcctttagttactatgaggatatcatcaaaattgttgtaaagagagctttaaaatagatagttatttctgttaattcacaaaatcctagcttatcgtttttttacatccatttttgagtgaaggatttgtcaattcatgctaagcttatatgaccttggttccagatagttgtttgaaccattctttgatgaatttcactattagttggaaaatttgtattgatagtgtgtgttcacttcaataggatgtggtctttgatgcaacaaggaggattgtgaggcctctcaataagggttcagctgttcatcatcctcgtacaagaactttgattactgttcatgatggaatcttggaggatgtagtctcccagctgagattgttgggaagtatatcagatatcgcctagatggtgcaaggtcatcaatgtagatgctacaactttctataatgtctcttttaatcatcattttaatactttattgtgctgatctgtcactgcatctgcagtagtctactagctaaattattgtctctgatatacaaccactgaaatgatgtaccacaatttcatta

SEQ ID NO: 26796 - DNA, 1830 bp, Oryza sativa
tcatggaaagcatgtcctcagtttcggggaaaggtgattctaatttgagctcgaaattgctcaccaggtggctcaaaatcacttttatctgctggtaggcgtagccctcgcccatgcatgcatgcttcccggcgccgaacgacaagtaggcaagatcacgggcgccggcaacggccttgtcctccgccctcccggcggcgaaccggtccgggtcgaacacgtgagggtccttgtagatgttcgggaggagggtgttgaccaccagggggctcgccagcaaccgcccggcagggacgctgtactcgccggcttccttgtcgcgcacggtgaagccccggcgcgcgcgccggaggatcatcggcgtgaccgggtggagcctcaacgcctccttgatgcagcggtgcaggacgtccatctgcagcagcaccccgtagtcgatgccaccgccgccgccgccgccatggtggctgcgctgctgctccgccgccgccacgagccgctcctgctccgccctgacggcgcgcaggtgctcggggtgggtgagcaggcgcagtgccgtccagacggcgaccgtggagctcgtgtggtggccggcgaagagcagcgccactagcagcccggtgacctccgtgtccgtcgtggcacggccgtccccgtacgtcgagtctatcaggtcctgcagcatgtcgtcctcaacacgtccagacatcttgcgcgtcttgacgatctgggagaatatctccccgagcttcgcgcgtgccttgtcacgccggcggtgccccggcgtcgggaggtaagggaagaacatgctgatcaggtgcatacctcccatgagctcgtgaaacagtgaggcaacctcgtcgaacatgttctcccggacctccttcccgagcaggcaccggctcgcgatcagcatcagcacgtgatccacctcttgcatcagatcaaccacgccacactctccccattttccaaaatattcctatacaaaccagattagtttacggagatgataacagacatgatctgagctttgatttataggatcaggtaattgacaaaaaaaaaatgtacttgcctcgatctcacagaccatggggaagaacatggcccctcagttggcgagcctcaagccttttgggcgaagaaggaaggtcgttgcttccttggggccaaatcgatgtggttagcaatttcttttgccaagaatggccccgggtgacttcgtccaagcaatggatagctatctcaacttctgggcgtgaaaaaaaaaaaaagtggtcggagcactccggcccgacgaggaacgtcaccgcaagcccaagtgacctgagcgtaaacacgctgcccagcgccctgtgctgctcgcggatcacggcctgcaggcccctgcgcagcacggctggaattatcccaaccagaggagcacctttcgcctccggcggaggccgcggcttgctcgtcttctctgcagggagagttactgatgatcttaccaccttcgcagctagtgtaatgatgaagacgagggctatggtgagccatgcgttggtggagaatatgtgatccatgatcacaacccagctggagcctctgctttagtctatactacgctctaagaaacaaaattaactacggagacggatttcattcaatataaatatatagggccgtggggcggagaacatgtactgatccatgatcacaacccggctggagcctctgctgcctctgctttagtctatgctacgctacggaatgaaattaactacagagagagacttcattcaatatatagagcgtgggacagtaagttagctgtcctactaa

SEQ ID NO: 26797 - DNA, 1382 bp, Oryza sativa
ttaaattgtcagtttgtgtacctcggctgattcctggacgaggattttgtgcacaaataagttcggaaatcactagtgaatttctgggcatgacaagttggtatcagagccatctcaactgtaggataagccaaatggtcaaaccttaaggacaaattttccgaaaacatgatttgtgaaaaattttcctttcttccttctttagaattctttgcaaattgagtagttgttaaacttgatggagaaactcgaagacgtcgatgttgtcaacttctgcaagtccagtggatcgaggaataagaagatgatagtcgaatcaaagtgttccgctgtcaagatagagtgaagtttggaacctatcttagcacctataccaccaaagtgactttgaagaatagttagtagggtaaaacgttgttgcttgttttgtgtgtaggtacggttgcattcccatcattggtgtagttcaatgatgagcgtgtaattatactaggttgcttgcttaatcaacttaaacaatataatgaactacacacatcagatcagtggtaacttggttaaggtcttgtctttagtgtaacccctctcctcctaacttttccaactctgcaacgaaaaaaaatgcaagctatagtggaaacaacaacaatgctagtggatcaggaagttggaccaatggagcaatttaggacaatcacttgggcggagttcactgaagcattcaagaagacacacatatttgcaggagttgttgctttgaagaagcgtgagttcaggacacttaagcaaaaggatcgtatcgtgacagaatatcttcatgagttcaaccgtctagctcgctatgctccagaagatgtgcgtactgacgaggaaaggcatgagaagtttttggaaggcttaaaggatgagttgtcagttatgttgatctctcatgactatgaggattttcaggagttggttgacaaagcaattcgactggaagacaagaagaacaggatggacaaccgtaagagaggaaggattgttttccaggaggcacaggatagtagccagaggcagcgtatcaagccactccaaattggtgaatcttcttctgcaggtcaagaacagtcacaacaattggacataagtggtgagatcaactcagagactaatacaagcactgaagttaacatcgagcaagctactcaattagtgccggttgcgtcttcaagggatacagctcagccaccgtttcaaagcaagtagttttttttaaagccttagagtaattatcggagttatggaataagatagactgcagtttacctatttcctttttctttctagccgttccgaatctcgggacgagattctttgtaaggggggtagatttgtcacgt

SEQ ID NO: 26798 - DNA, 715 bp, Oryza sativa
aaataggagataaatcacattggtcatgcatcctcgcctttgatatgatctgactctcaatgctacgagcaagcatgaataggtgcccaatatgattatatgtcacattatcaagcaaaacctgaatttcagaattaagcccattgaaaaatctacgcgttgtattttcattgcactctttgagaccactgtagatgatacagaccttaaattcatgaatgtactccctaacagttctgtcaccttgtttcagatgttctaatttctcccgaagagtacatttgtaataagatgtcacaaagcgttttctcatcatggttttcaattcatcccaagtttcaggtttattactaacataagtccaccaaaataatgcagaagaggtaaacttattactagcagccttaatcatttgagcatcagaaaaatcatatatatcaaattcattttgtactgctagctctcaatcaatgtatgcaacagaatcatacttcccatcatagaagggtaacttagatgcaacttgttcacaattatagtcatgtacctcatatgcatcatttggagaagtcgtcatatctcgtggaaggtgtagaagttgatgttctcgtattccattacgcaatcatgccatggttagtaccaaacaagaaacacacaataatatgcatgctcctatcaactactaggtagtggcagctcaaatatcacacac

SEQ ID NO: 26799 - DNA, 716 bp, Oryza sativa
aagaacgaagtgcatggtattttaaaaatgatgtaacattttattatacacaaactataatatgttcgcacttattagaatatatgccattaacgatgattataatcctaaatttgtcatgcagtttttacaactgaagccttaaatttgttgtgtaacttttatgactaaactacatttctacgagtgtttccctgttttttaggtgtgtttatttataagtagacattcacttaagttacatatctattttttagcattcgatttttaccgattaacattttgtggttagctagactattcattcatttgtgcagacacaaggcagtcccactataggtctttacctccagttaactaaacgaataagcttgtaccaaatgaaatacagccaactaatcatataattagcatctgaaatcaaggctgagatggtcatatgcttgaataccctacctactttgggcatgacataggtatggccggcgccatcccttgccacaagagaaggtccgccactgaaactaacaaggatagctacagcacaatactcccaaaacaaagctgcaaagtaattcgacttcagacgaactttagtccaatccaggacataccttggtagagtaataattcccaacttgtttcttctcagcgttaaacctcactccctttgctatcatggagttgcacccaccacaccaaatattgaatggcat

SEQ ID NO: 26800 - DNA, 2277 bp, Oryza sativa
ccccgggcgtgccgggcacttcacccggatgtcccgcttctccaagacgtccgggcggagcttcctgtcgcggcggtgcaggagcgacctgctgtacgtgtccgacccgtgcgagcacgcggtggccggcgcgggcgacgacctgggcgcctaccggggcgtcttccgcgggttcatgcggtcccggacgcgggcctgcctggtggggcgccaggccgcgctggacccgcgcgtgcgctgcccctactgcggcgcgcgcgtctggagcatggtcgccgcggggatggtgccgcgcaccgcgtggcggaggctgggctgcctcgagggccgcctcgagtactacgtctgcgtcagcggtcacctccacggcaactgctggctcgcccgcctcacctccagcgaaggcgagcacgacgccggctccggctccgactccgacgcgtcgacgcaaggcggcggcagcgacgacgatggccatgtagcgctgtgactccggtcagcgcatgggccacctcaccaccgtccaccgccatgtgcgccatggattattttgttctcaatgagtcagtgactcactcagcgttgtgtactagagtagacgagagaggatgggtccgatagttgatcacttgctctgcttgaggcagtagaggctagagccaccattccttccggccattctgcggcacgtggtgttcaggtggctcggttcaggttgctcaatgtcgttgtgaattgtgagttttgatgtggtttgacttcgtttgattcattgaggggcaaaatgttttgtcggcgggcaggcatcctctgttccatctcgaatccgccgtcgcgtgctcatttcaacgagacctcctcgctgtcgaccacgtatcgccgtgcgccgacttgtctgccgcgcggcggaaacgtgcgatcgcgggcgatccacgcgccgtcctcactcctcctgacaggacgacgatggaccgcacggcccggtgatcccgctgtgaccgagacgcccggggtaatagtaatttagtggtacagcaacgtctcacgcattggccgtattcgatacgagtatacgatagggctgtcgctgtgtcccctgctgtggtctgtggaagctgcagcagcgggtgatgcctccctcttgtctccgtgtctctgatagtctgatgggcagctacggccccggttgccttcgcaatgaaacaggggaggttgactagtgcattttcttgaagggcttgtgttcaggaattgggtgctgcacgaacgaattaaagtcgtcgatgaccggccggtaatgtccttttcaaatgcccttttcaaaccgagtgcgacatcctagagttctttcgtcatctgttcaaaaggacctcgctaggtgaaattattggccaagcattcttatcctggtgaccgacctgtattttggaccgtgtggccagaataatatcttcaaatttgaatttgaaattctaaatagacattcatggctggtcctggatccaaactggttactagccggtataattgccagtttttcgatccatggaatggacacaatattgagatttcagacacaatactccatacatgatttacatggacccttggctttatacatcatcgttcccttggggcttcgccacgatatttccaacactgtaacaacacatcttaaactctcaaagttacatattagagattgatgaaataaaaacagcagtgttatatatttaaatatgaaggtagtgcaatagtataatattgcccgtctgattattttattatattagacggtgacgtaaaaggagatgtagatggaaaagaggatatgatctcatagctatagatagattataaaattaatcatcaatagtatttttgtgtgtactgtatatttagatatagcgttcgcgaaatatattgagatataaacttttatataaaaaagaagtaggaaacttgttatagagttgtctataaaattctttccatgtttttacatactgcaattgtttgtatatgcccttagccaatggaactatagctatctataccattgtaattctaatcaccgtgtatgttgggctttgctctaaaaaaaatctattaggactttattgaagggtggaaacaacttttaaaataagaaaaatagtaaaatagaatgtcatgacttggtacgatatttctcaatattttctccatattttgctgcatttcaccccgttttccctccatttgccctatgttttttattcaaaatttccctttttt

SEQ ID NO: 26801 - DNA, 717 bp, Oryza sativa
attaaccaaatcctacacaagtttatgaaattaagcagtgccacgcatgtactgacctttgttggttatgcgctgattttcaccccagaaggtatagccgacagcattagggtgctgttttctgaaagtatccacaaggcctttgctagaaaagtttgtctcaaatgactctctctcttcaattgtgaaacctgcagacttggtttttgcctgaaaaagggttcagaatgaggatctgtgtactgatatatgaaattctgaaacaacctaagcactctgctctcgaatgatgtaatgatagtacagaacaaattggagggagacattgttcaaaaagaaaagagagttactcactggaggattgtgaatgtcaatgctttgacgagcacagttaaggtctcctgcaacaatcactggtttcgacttttccagtatctgcagatcaaaaggtataaatcagcttagattacatagtactatttcagggatcaaatctgttcaataagatattgtggagttgcggatatgaaccatgacacaactccacatggtctattaatgtcaaacagtaaattagattgaaaagttaggcaagtgaacacacttttacatagttgctgaaacacggatcccagttattgaccctgtaattctgaaaatcaaaaatgcaagaaaacaaaattagatcaaagcaattgacataaaatactataaagc

SEQ ID NO: 26802 - DNA, 4675 bp, Oryza sativa
  unsure (1)..(4675): unsure at all n locations
ctgatcaagtttggttttttcttcatgcacaagctgccgattagcttggattgtggcctcaatctctttgcgatcacggcgttcggctagtcttagcttggctttttccagcttggactgatattgctcgagataagcggctggagttagaacatcggccagatcttcgggaatcagagcttgaacttcatgcagtcgtgtcctaattgacccacagtcaactaccaaactgtcaaaagaagaggcttctagccgatgagagatgtcttcaagtgtttttctcacatcatcggataggggagctagggctttgcttgaagtgtcttcttctgcctcatcaaggtaatctctaatgtcaaaagagaagagatcggctagagcctgcagagacaatttcggaaagaataagagctgggtaaattatagctgatctaattgttgagacaaagggaaacttactgggatagcaggagcagttggttgttcttcctcttcgacatgatgactccccacagcggatggagtctgatcacttgacgattgctgtacaggtggagaaggagggggaggctgcgaaatagacaagtgttatatagaatcagttgagattgattaagtaaaagaattaaggacatcttactggtggagccgatttaacaattgttgctgctgtttttttcttcatagcagttttcttcttctgtaaccacaaagtctatgggtaattagccgaagagtgaggtgatttcagaaaaagtcagagagaggtacttactcttgtaaaatgaacggggacagaaggagttggaggcgtttgcttgggtgaagccgatggtgttatttctgtgtcactcatttcggctatagcttggtcaacatcttcaccatttcctcttcatctaaagcttgttcatagatggatccaaggcgggcagatcatcagtcgacgtatcagttggttgtggttgagttttcttgaatttggtctttttctttggagccaaggctaaggtactcagggctgatgatctggttttccttttcttgcctgcatcggctggttctctagttaggccgtgaaggagagttgaagtcttggggcatggtagccgatgaaagggggagatagtccacctccattcggaattagaccagaagcaaattcaatgttcttgccactgttactttgatggggaggggaggactctgttgtctgcaaaacaggagcaagaggttagtcaagtaatgaatcggctaactggttatgcaatttagtaatgacaaagtttacctggggcatgacgtcagggaatatatctgttatatacattgaagccgattngatgaaatagnatgcagncttccatttcaccccaccatttctgtcaaaggttttntgctttctaaatccctgccaanctcaatattatcaatgttgcccagagggggtcctggtaggttaagtagccgatccatcattagagtggaagtgatttgtcctcggcactgaatcttgtcggcaaagaataagccgattgggagttggcccaatccaagttgtctagccgagttcattgggtgataaaactcgtaggagacttggatgtttctcccttggtgaatgccaacagggaggatgcatgggttgattgcagctataagaatttctctggatttttggaatttttcatgattaatgtcttcgaatctaaagtctgacggaagttcaaggtctgctgagtcttcgtacggaaaccagattcgtgcatctttcttaaaacctttgtagaagctgcagaaccagtccttgagtagctcagccgatagcttcgctccagcatcggttggtgtggatgcatattctccatatgacatgcatctgcgatgggtgcgctcttctccgtcatcttccacaatcggctctggcaatgggaattcagcttctgccacatagggccgattgacaaccttcatgactatcaggtttaaccaagtttgcagcagccaccatggtccacctgctccaactattgagccgacggctattttagccaatgcattgttcaacatctagtacagatagccgagaaggattttgcccaaaggaaattctttccttgattctaaggcttcggctacgaattgccagttggttgtagggccacaactggatccacagaagagaaacttttgcagccacatgagcaagaaagctacatgctctcgaggggtaacagacccttggcccatatatgccgccacatagccaaaccagccacctatgcttttagtcttgaagtcgaattggttcttggtgttcatgttcatagggttacccgatgaagttacatctaatccagtaatcatggtgatgtcgattaaagttagagtcatcggctcttggttgaataagaaagcattgatggtgttggaccagaagtaggtggcggcagccatcaagggttcatccttagcagaattggctatggtgagagcgagtgcttggccgattccaatttcatcccagtgaactttcttactagccgatacgcgttagtaccagatagtccagctcttatcagtagtaggtttttctagagatggccaagacttgaaggtattcttccagtgacccaggttagggttggctagtctaaaggggatccggttagtttcaccgatgatgaaatcagtggggtcgagattgccgattgggccaagaaaatagtggtttttgtgtgaaaggctgggaatcgcgactaggttggaaaggtgctgcaaatccaaaggaattgggaagtagaaaacgtgaggtgaaaaggagaaatcgatttcatgcgaggaaaagggatctagctggtgaggacttacctcggcgtactcggccgatggcgcagtagaagggctggtggaagacgacatcgccgcgggtggagatctggtcgagaacgaaatcgcctggggatcgcctgagatgctgaggccacagcctattcttaaaattagtttttgacacgatttatttttaaaacaagttttttaaaagggtcaatttgttaaaattacggaatttttggggaaacctccctgcatgagtgtacaaattaacaaagtcgaagataccgccggccagttgcagacgtgtactcgtccaacagttctgaaacttgacgctctagtcaattcacagtatgccttaagccgagtttagtttcaaactttttcttcaaacttttaactttttcatcacatcaaaattttcctacacacctaaatatctaacttttctgttacatcatttcaattttaaccaaacttctaattttgatgtgaactaaacacaccctcagttacagcagtgaaccagtgtgcctttcacggagttttagcacgcgcctgctctcctccgcgtgcttttctgtgatgttgacacggcaaatctggaaaatgacgtctttatactacctccgtcccaaaataagtgcagttttacactattcatctccaaagtttgatcgttcgtcttatttgaaaattttttatgattactatttttattgttattacatgataaaacatgaatagtattttatgtgtgactaatttttttaaaaattttcataaatttttcaaataagacggacggttaaacgttggacacggattttcacggctgcacttattttgaaacggaggtagcagaagactgtcgatcaaccggtaccgtacgagtattacatcgaattgtcagtattaccataacaatgatgaaaattgtttccggtggctagccgccgagccagcttcactctacaaagactgtgtttagttcacgctaaaattataagcttagttaaaattgaaatggtgtgatggaaaagttagaagtttacgtgtgtagaaaaattttgatacgatgaaaaaaatagaagtttgaaactaaactcagccaaaaacccacaaatcctgagggaaagaagcagccaagccagatcaggccgtcgatgagatgggagtaggaaacgagaaatgcttaccggatgcttgcgttgcgtgcacgccttcctataaagttgagcgtgtcaaatcagtcctgcctcctggaggacagcgctgaggagtactcctactcaacttccgatataggctagggattgggtcattgggactttgggaggcaacctggctttgcttgcaaggttgtgcttccggttccggctgaatttttcgattggttgtccggcccccgttcgccgccgtatgtcgaaaatggcttttctccttcagatgtccgcggcagatacaacagtggtaaagcagtaatgcttccgtcatgtatgatgaacaagaaccagcaggcagtagagtgcacgagtgcggctcgatctggtgatgaggccgcacgtgaaacgagcccaccagcgaaggcatgcgatgtgagccaatgcggtgatgacaggtccccggcagtgtgatgaaacgacgaccagtagagactagagagtcgctggctctgcctcgcggtctgcagaactgtatcgttgggcagcgtgccacgaaaaattgacgaaaagaaatgagccctacagtaatcctgtagtagcggtgtactccctccgtcccacaatataagggattttcagtttttgcttgtaacgtttgaccactcgtctta

SEQ ID NO: 26803 - DNA, 2338 bp, Oryza sativa
cgcgccatccgctcctccgccgccatgcgcgtccgccgccacgctcctccgccgccgcggtcctaagctcaaaatcccttatattatgggacggagggagtacgaagtaggatgccgtcttgttgctgagaaatcgcgagtatatagaattgaagccaccggtggcgggggaagcttcaattctcagcggctgctaacctgccataagcggcggcgcactattggtcgccttgtattacctgcgtcgaattccgtccaccagcgaatcacaccaattctccatccctcctcccatgctgcggcggacacagccaacccaacctcatcttctaccgcggctaagggctggaaaaggctgtgactaggtacggcccatattacttgggccggaacatgtgctatcatagttgggctggaagggattgcgcacggattcgtagctgagccgacggatcgctctcggtcgcagtgacgatggtggccgcctgtcaccgtgttcgccccagaaaggtcctcctcgccggcgacccttccagctgccagatgcgcagcaagtgcatgcatgaattaaagaacaatggcctaaaaatgaaacacgctttaagttctaggagatgctcgtaaaacaagaagatctcgcatcgtctcggttcgcaaggaggaacttggaagttggaggcgacgttctatatactccctccattccaaaatatttaacgccgttgactttttaaaaaatatttaacagttcgtcttattcaaaaaatttaagtaattattaattcttttcttatcatttgatttattgttaagtatacttttacgtatacatatagttttacacatttcacaaaagtttttgaataagacgaacggtcaaacatgtttaaaaaagtcaacggcgttaaacatttaggaaagaagggagtaatagttacttccaagcaagaatctgaatcagagaaacaggtgaatgctggtaattaatcagaaatgcagcggaatcatatacatatcgatgtcaaatatctttgtccaatattgtaatcatactactaacttcctaaaattggtacttaagtaactcatgcacacgatgagtccaaatccatggagcgtcgcccccgccgtcgctgcctgattaagatgatcacgccgagaagtcgacgtggtagaccgcgctcatgtccgggtggaacaggccgaagttctgctccacgccctcgggcttctggttctcgttgaacatggcgaagatgtacgtctccacggccttcccgggccgccgcggcgtgccgcgcccgacgtggcgcaccaggttgttgctgtacgccgccgcgttctccacgctggcgccggccccgccgccgcccgacggccacccggtctccgacaccaccacctccaggccctgcccgcccgccttctccagcgccgcgtacaccgcgtccaggatggcgtcgaacatgttggtgtacgtgacaccgccgtccgtcacggccgccgacgtcgacggcgacagcagcgcgtagtcgagccgcaccgacgacgggtcggcggagtaggcgaagtacgggtacacgttcaccagcaggggcgtcccgctcgacgccaggaaggagacgatcggcgccaccgtcggcagcgcggcctcggagaacgcgccctgcgacggcgggtacgaggagcccagcaccgacgtcgcgacgaccgtcgtgaccggcacgccgagccccgcggcgcgcagcgccgactggaggttcctcatggccgggaggacgctcgccgcctcgtccccagggatgacctcgttgccggcgttgatgtagcggaagcggacggcgccggcgaagggctgcacgtacgactggacccacgacgccgcgaacgaggcgtcggtggcgaggcgtgccaggtcctcgttgagcgtgccgagcacgacgccgaggcccgagccgcggagcgcggcgagcacggtggtgtccgggtggaagaggcggatgtcggtgatgttgctggctctgtacagggcgatgaccttgtccggcgacgggaggttgttgccgatcatgccatagttcacaccgataccttccactcctgcacgatcaatacacacgccatacacgtactggtaaacaagcaaagaaactactcaacctagcttgtactactacattaccatttcatctttccacagattcactagttaattaacggcattttgatgaaagatttcttactaactatcgctgcaaaggtgcatatatgcgcatatgattacattacccttttcatgaaaggaacactcattttgaaattggaaagggcaagctag

SEQ ID NO: 26804 - DNA, 1050 bp, Oryza sativa
gcaccagccattctgatttgtactcagtttgcttacgttttaaatttcgaagaatcaactggtgggctgtaataagccctgttcattgtatacttgctgtacattgcaaaagtttcagcatatatgccgcgtttttgtgacatcttattattaccaaacattacagtcacatctcactgtatctctcgccagaaccccaatcttcaggctccggagggaaatcaattcaccttgttgtcatccttcagtatttttactgtttgtattctgtcttcctacatatatgcacatcagcacacatgcaactttaattagccttcgactaaatttagatgtctcaatcacaggctcacagccccaacagaatatagtaaacaattgtcacaggaagtgatataaatatcccaagaataaccctgcaaggcacaaaaagaaatccaaaatgatcagtcagatgggcacttgcattaatcagaagagaattgaaatacttctgaaccttaacagtatttggttaagaaacaaaccctgtgctcatgatgtctgcgtggaccttgtactcttcagcgtacacaaatgatgtcactgccagggggagagccgcctgcatgcatgtgaaaaattgtggtcagagaaatactcctgtactccaaccaaaataagttggctagatttcttaaattgtgttactactcgtattaattgatcacatcaaacgagggtgccgaaatactcctgtactccaaccaaaataagttggctagatttctgaaattgtgttactactcgtattaattgatcacatcaaactagaaagtactactctacatgaatactactcccttcgtctgctatattttaaaatggaggaagtacagctttgcaactaacttttccttcttggacgtacgtctcctcacttctacaagcgtgaacaatcatctttcactatgccattttccgttatctgcaactgaaatggcggctaggacaatccgtcaagaaaaaataaccctttttcgcgtaggcgtcctcactttgaagcatatt

SEQ ID NO: 26805 - DNA, 6139 bp, Oryza sativa
cccttggtaaactgatctgccagatttctagccgtttggacatagtccaatgctatcactccggagtttttctgctttctgacagatttcagtcttctcatgatgtgtctagatgacttcatgttgtcctttgaattgttcactttaataatcactgtttaattatcgcagttcattaggatagctggcactggtttttcaaccaccggcaaatccatcaggagttcacgaagccactcggcctcaactgtcgcagtatctagtgctgtaagttctgcttccattgttgacctcgttaagatggtctgcttgcaagacttccaggaaacagcgccacctccaagtgtgaacacttatccacttgtggcttttatctcatcagcattagatatccagtttgagtcactatacccttctagtacttttggatacccggtatagtgaattccatagctcatagtgccctttagatagcgcattactctttccagagcctgccaatgatcatctcccggattttagacaaaccggctcagcttgcttacagcaaatgagatgtcaggtctcgttgcgctagccaagtacatcaatgaaccaatgatttgagagtatctcagttgatcccttactattcttcggtttttccttaatagcacgctgggatcataaggagtaggagctggcttgcagtcactatatccaaagcgacttaaaaccttgtccacatagtgggattgcacaagtgtaatcccaccctcatctcctcgttgtagtttgatgttaagaataacatcagcctctgtcacaccctgaaaattcaaaatttataaattgttgtttaaatggaatttttagaaataaatttaaaagcctagaagagaagatctaatttttaattaataaattccaatataaaaaggggccagataaaatttcattaaatactttgcttaattctataattcctagatttttctgggatttatttgagctaagaaagtatttttaataaatggaattacatttaagaaataatttaaattgaaaaaggttttaaaaaaagtcttttttggctttgggccgaaagtcggcccaaaacccctctctctctcctcggcccagccggcccagtccgcagccgccgcgcgcgcgcccttgctcgctgacaggtggggcccgcttgtcggatccatcgtcttcgtcgcgccgccgccgccgtctccttccaaaattcggtcgatcctttccttctccggccgaatcaatagaggggaaacaatctccgggatctcctctaccttttctcttttggaatcatcctctacttcggtttggaaatcgatggattcgagtttgtttcggattcgttcttcccgaagtttccttcgccgtcgccggccgccgtgggcctttgccgccgctcgctagcccctttaaaaggacccccggtgtctcctctacccgccgccaccctcgccttcgcctctcgtcgccggaagagctctagcgccgtgcaatctagcgccgccgtcgccgccgtcgctccagccgtgcgccgccgccgtctcggtcgtcgtcgtcgctcgggaaggccaccgtcgtgatcgccaagttgtcgccgtccttgtccgctccttcgccgccaccgaagaccgccggagcaccgtcgccgtcgtcgacccgaaggccgccgccgcttcttcctcgtcgccggcgccgtccgttgcccttccgccgtggttttggtcaccggtgagttcgtcgcgccgcgctctacgtcctggtgccctccgttcgcgtcctcgcgccgtcgttcgccggcgggcttgcgccgcccgagccgccgccggtgatgacgtcaccgttgacgtcatcggggccgtctgccgtgagccggtcgtgggccgaccgatctcggccgtccgttttggatagggttgatctcggccgtccgttcgcgtgaaccgccgccgtgtgcccggtccaccgaaaccctagcccgctgacgcaataaatcctcttttccttttcaaaaataattcattattgcgtcataattcaattaaaatcaaaataagtgttttaatccgattaaatcttcaaaaattcataactaattcatcttagctccgatttagttggttcaagtctctaaatttttctaaaattgagatctacatgttaaaaatatccacatgtactgttcatgcttgtttatgtgctgttttggtgattttgctcttttctgcttagattccgtcgtttccggagagtccgttttcgcaggagaagagtttgaagagttccaaggccagcaaggcaagtcacacagatcccaaacaaccctttgagcatgttgatcctatttaaagctattgtttccattcaactattgcatttattttcgaatgtcactgggtggaattaacctattgtttgttatagcccttttgttcttgattaccttattccttgataccttgggttattataatttgactagttgagctttatttatattggttcaactagatattagatataattgcttagccctgcttagaaacattagctcactattgggataacttatgactcactatgatttaatgagggcttaatgatagttcacgatggtcaatcgtgattggttaattaattaatgtgccaactaaaaccggataatggtgggttgtgagcacatggttttgatggtcgtgctcatgacaattaaggaccggttcacgagtttcggttgtgaaacattaaccgtgccaaccacaagccagcatgggcaacggctttatcttttgtatagcatggttcattgcggggcaccagactgagaagtggcggagataagcccacgggggtcgctggggagtccatgccttgtttataagggggtgattatgatccaggaaaggtgcgctgcggtggattgtgttatgcaaggggtattgtcacaactcctttccgaggtaccgtggtggtattgaggcacatggtgacatgatgtggggttgtgtcttgtgggtacagtggtacacctctgatcagagtaaaactattcgaatagccgtgcccgcggttatgggcgggtctaacaatgtctttcgtgattagtttcacacctctcaccatagtaaatgatgctataattggtaataaattgattagctcctggtttggaatggtacattcctggtttggagatagaactgtgcagccgggatggttgttcagaatggttgggcctatacaacagggtatgttgtatagcgttggattaatattgtttaattacttaactgtttttttaaattctcaaatgtttgctaaatgctgtttatgcaaatggaaccatattatgccatcctttgttatcctgtgcacttgcatatttactgcgtggcttgctgagtatgtcatatactcaccttgcaatcattcatcagaagaagagttctacaatgaggctgatggtgtggaggattaggtgtagccttggtcaagctgcctgtggagtggagccgtctgtgccgtttattttattttccgctgcttagatttttattgattgagaggaactatctcctctgtaaagacattttattcgcttattaattagagtaataattgtactctattatcaatttgttattgtgtgtctcggctgattcctggacgagggttcacacacatgtaagcgtttggaattttggatagaaattccgggcgtgacagcctctcccaaatccttcatttcaaaactcttggacagatagtctttgacctcctcaatcacattaaggctggtcccaaagatcagtatgtcatcgacatataagcacaagatcaccccttctcccccaccatagcgatagtatacacatttgtcagcttcgatcacaacaaagcctgcagatgtaagcgtggtgtcaaacttttcatgccattgcttaggtgcttgcttgaggccatacaaggatttcaatagtttacacaccattccctcctgaccttctagtacatacccgtccggttgatccatatagatcttctcctccagctctccgtttaggaaagctgtcttaacgtccatctgatggacgagaagaccatgagaggctgccagagcaagtagtactcgaatcgtggtcaagcgagcaactggtgagtatgtgtcgaagaagtcctcgccttccttttgggtataacccttggccacaagccttgccttgtacttttcgattgtaccatcaggcctaagctttttcttgaaaacccatttgcatcctacgggcttgcacccatatggacgctcaacgacttcccaagtaccattagacataatcgagtccatttcactgcgtactgcttccttccagtagtcagcgtcaggagatgaatatgcctcttctatggttcttggggtgtcatctacgaggtatacaatgtagtcatctccaaaggattttgcaaccctttgtctcttactcttgcgagcatctacaatgttgtcctcctcaggattttcctcaggcgtttgatcattgtgttctatcggtgcaaagtgctcatggggcatgacagtttctttactagaagtgctaggtgtatatttcataggaaattcattctcaaagaatgtagcatctctggactcaaaaattgtaccagcatgcatgtcgggtactccagagtttactattaagaatctataacccacactgtggatagcataaccaagaaacacacaatcaacagtttttggtccaagtttccgccttttggctataggtacatttaccttggccaaacagccccatgttcgtaggtatgagagatttaacttcttcctttcccattcctcgaatggtgttacttccttatgcttcattggaattttattcaggatatgacacgcagtcaaaactgcctcaccccacaattccttggaaagccccgcagtgtctaacatggcattcaccatctcagttagagtacggttctttctttcggccaccccatttgataggggtgaatagggaggcgtcatctcatgaataattccaaactcttggcaaaaggatgcaaactcattggaaaaatactccccacctctatcagacctcaacagtttgattttcctttgaagttggttttctacctcagctttatagattttaaagtaatgcaatgtctcatcctttgttttcaatagatacacatagcaaaatctagtgcaatcatctatcagtgtcatgaaatatttctttccccctttagtcaacacgccgttcatttcgcacaaatcggaatgaacaagttctagaggtgccaaattcctcgcctcagacgccttgtgaggcttgcgaggttgtttcgattgaacataagtatggcacttggaacctttgaccaaagtgaattttggaattaaactcatgttagctaagcgcgtcatacacccgaaattcacatgacagagtcgcgaatgccacacattagactcatcattctcgctaatatggttcacagcattatgattattatacatgtcattcaaagaaaagcggaacaagcctccgctgtcataaccttttccaacaaaagtcccatatttagaaacgacacatttattggactcaaacacaagtctaaaaccttctctacacaatagagagcagctaactagattcttctttattgaagggacatgctgcacgttcttcagctgcacggtctttcccgaagtaaacttcagatcgaccgtaccaacaccatgaacagccgcaagcgacccgtttcccatcaacaaggaggaacctctcccgacctgataagaagaaaacagagaaatgtcagcacatacatgaatattagcaccagtatccacccaccaatcaggtgaatgaaaaacagagagaactgtaggtaatattttaccgtaccccgatgttcctctgccctcgctaatgaccatgttggtagacttcctgtctttgcgctcaggacagtccttggcccaatgcccagacttgccacacacaaagcaatctccctttgcctttcccttgcctttcttcttaaaattggttgcagccttgggtttgacatcaggcttgactttctt

SEQ ID NO: 26806 - DNA, 2470 bp, Oryza sativa
gccggcgtcagaaactccgaacttggcctcaagtgcatcccacatgtccttcccagaaggcatgtgcatgtacacgtccactatgttgtcagcgagtacactgatcaatgctccacggaacaggcaatccgaagcctcgaacttagcctcttcctcaggagaaagaggtggttcacttcgtttgccccgtgaaacatagaagcactgcatcgctgtcaaccacaatagtgcacgtgctttccatctcttatagtttgaaccatcaaaagcatgtggtttcagtgcagcagcaaagccaactaccgaaaatgacctatcaggtttttggattgttggaaatatagtcattaatcggcatattttaatccaaaaagttaaagcaatgatcatggcataagcagtgtagggtgatcttaacataaccagtagcatactatgcgcatcatgaatgtcaggaacaggaacataccagtaacgcgataacatgctagaggcatcatgtagaacaggaacaagaacatagcgcacatagtatagcgatagcgctaacaatgggaacaggaatagcgctaacaacagtagcaggaggagaagagtataccccgagaatggccctccgctggatggtgaggcagaattgactccgttgttgttgtcgttcacggcacctcctggcgcaccagctccagatccagctcctgtcggcggcgtaccacctccgccagcagtagcggcggcaactccagacatggcgatgagcagtcgtgcgggaggcactccccaaaaacctgatcacccgcctacccggtgcagatctcaggcgaaggtgtggtttcagaggcactgctccttccaatctctcatgcgcgcaagagatcagaagcgaggaagcgagagcaactcaggcgcggagaagaagaaactaacaccgggaaataagctaagaaaacggatcggactcgcaccgggaaagaagctaagaaaacggatcggactcgcggcctccttatctatcaggagaaagaacgtggacgagctgttgcggagggaatcgtgggaacgtgggttagtgcctgcaaaaggatagcgacgtgacgcgcgccgcgacctcgcccacggcccggcgcgcgcgcgcgcgcgtggcattccgacccctacctcaactggtcaacagggagcctccaataactccctatttaggttgagatatttctcgcttaaatcctgaggtggtattattatcctcaacaattattatgggcctttgagatttaatattataagttgggcctagcccaattattctaacagatttctgaatacatagatactaaacaaaatatatgtaagacggcgacttcaggcaaattaatggcactaggtggatccggccagttatatgggcccgtcgtcgggagtatatatactctttatcattttggaacttgggaggataagtggataactgttgcctgtcaggaagataacgggtcaatgaactacggatttgctgaaaaagtgtcgccacattatgtgactgagtacagtcgaattttaacggctgggatacgctgcgctggacatcgtgtgcacgatgcacatccgtttctccacctgtttatccctttgcaatttttttattttatttgttgatccggaattgctatgggtttgtagcagtcaattttgttgttgtaattatgtatttatacaaatttactgtaattaatatgtaattttgggatttatatatgtaattttaggacaatttaataaaaaatatggcattataaatatagctagtaccatgaactatgcatagcagaagaagtagcacattctgttaccttgaatgttacgacacaggcacagagccaacgccaacgcgccgtcggctaccttaacccttcaccagctaatttgtacggacgaggaaatcgcatgggccttgaaaagaaagtacccgcaagaagaagtgcaaacctcgtgacctcgtgttgggcctgacttcaggataagaaatgtggcggttcaaattagccggcttccaacaacattcagttttgaaattactactaatttttattcttgttaaggcattcacaatgggtctccgtggcattcagcctcatcaccacccaaaaacgagtattccttgccacatcatcaatctatgcagcctccttaggaccgcgtagccaactttggctacgggttcctcgtcgcttgtgggaccacactctcactccgtgccgtcaaggatgggaaagaagagagaaaggggatagggggaggcgccgtcgtctgctgctctgctcggcgtcgccatcgttcgcgtctttcacccgccgccccagcgtggagccctgcccgacgccgctgtcgtggtcgccgccccgccaccgcggtcgctacctcgctgtcctcaccgccgcttcgggggaggagaaaggggggggggggggggagt

SEQ ID NO: 26807 - DNA, 2906 bp, Oryza sativa
aacttgcggcacggcagaaacgacacgcgggaagtggacagcgtgttgcctgcgtgggcggtgttgtcccgtcccacaaggctgacatgtcgccatctcccgatccaccaccacgggcgcacgcgcggtcgcgcgggggccgcgaagcgatgcgccggatgcgtaggtgagctgagtcggccagtgcaccctccccctcctcctagtttccccaaaccatcccccgaccggcgaacagctcgccgtccgccccccgtgcctcccgccgcgcgaattcacttccccctacgccgggggctgttcctgttgctattatagcccccaatggcggcggaggctcgggccgagagccccgccgcgcccgtcgtcgtacccgccgcggcctcccccgagaagcgcgtgctctcgggtgacgccgggagggaggaggagcggcccgagccgaagcggcgcagagcgtgcgtcgcggcgctcgacagcgtcccctgcgccgcgccgccgctggttgacggggacggctcgtccttctccttccagcacgcgcgcggcggcttcgtggtgctcgagacgacccccaagttcgggtccttcaacccgcccgccgcggctgccgtcggcccgaagcctgcgccgcctgccggtgccgggcagggctcgccggaggaggaagggggaccggctcgcgaggaggctgaggccaaagacgggaattcgcagttagtggggccgggcgttcaggggcagaagacatgagtgctgactttgttttgacttttgaccagccatgcaaagtttgcttggagcggtagccaactcgtagtttacgtctactttttttttttttgtgtaaattggtcccatttttctcttggtgtcgatgcagttgtgcatcaccattgttgctcatttctgttgcagtcatgggttgttacatttgttatggaatggaaattttcttcaaaaatgctgatgtaacatgtgtaccaaatgagcttctcccgtcggctgcggccatcactcctaacaaacacttcttttgtaaaatccaaacctggtgctttctactcacaggaagtgcaaacagtttttgcagggaggatgtattctgtcatatcaagtgtgtcacttggtatgcccgtaacaagtttctacgacgcatgctgcaaatacacacagtaaacgatcttacctacacttcaaaatcaatgattgatactcctagtcccgttaacaaatttcaaggtggaatggttcttttcctagtggaagtaccattttaaagctaatcacagtgagtgcacacctgtatgttgtatcctgtataaccgcaaaatgagatctaatatagaatccactccctcagtcagaaactgatgctacctccggaggtaaatcttcctcgctagtgattttcgatgagattggttctctgtaccactcgttctcattacgagtgaggaagcaggcctctgcaccaaaaaaaacatggaacgttaaagatgacagccatgatagctactctctctctctctcttgtgtctatttatattttagaactctgggagtgtttggctaatgggatagggaaatgatttcccacccaccaaaatgcatctttaaatcctaaccattcattctccccgttccatttaatccaaacatttcattcatttcccaattccaatcccactcctcatttcccattatctaaacacaccctctagttttgccatatattcagcaattgtaaaaccttgtcacagtactgaaatgaaaacatgaatatagtgatggggaacttaacaaacctgacacaaaagtatccttgtagtcatcatcatcatacacaaatgcaggcggatctggtgaaccaatcccaacaattgtgcttccactgcgtggtacatatacaatattatatcacgtaatttatgattgaacaatgttccataaaacatagatatacttgatatatgcaatatataacctccaccttaaatatgcttacgatgctaaattggtagaatgattaattaaacatcattttttgacttttggcattttcgatataactggtgattacacaaccaaaatttcataactaaagctctaaaataatataatgactaattaaacatcattttttgacttttaacattttagatatcaatgaaaattacacaaccaaaatttcataactgaagctctccagagacactttgaaaatggctacactatgaatgctatgtttgggaatatgattgctttcaaaattgaaaaggaaaaagaataaataaattcatgaactagcttaagcgattgaaaaatgtggcccccttaccttcctgacataaaaacagcatcataatctccccggttagcagcaattatacgtttcttcaacctctttagtgatggcaacacctcaaatgctggaggttctggaaaagatggcaagcacacgtaccatatttcactgaatgttatttttcaggggatgcttactggatgtaattttaaaaacattattgaatataacataagttctggtacgggactagcatacgacaattgctgataccaaattgcatacctagatcattaacacaggcatcctgtgatatcccattttcagtaatttccttgagcaataccaagggatcagtttgacttgtgtgctctaacctgagccgctgcagtgcaagtattttagtaaatgattcatttcaaaattcatgctatgaaaatatgttaccttgtaaacttcagctgttgagcatgcttcaggtggctttactagtaccatcggcaaatttgctggcaatggattccgaatatcttcaacaatcttcatacatttaagtccagagttggagattatgatcagacatttttggagcaaggca

SEQ ID NO: 26808 - DNA, 1069 bp, Oryza sativa
agcgaacgtggaggcttcgttttctattcctttaataagttaatagattagttaaacttttgactaagaaaaaaaatcaaataatttataatatgaaacgaagggagtagttgcgatccagccaaaattttaacggggccgggcgtgcaggcccagtacctgacaagcgacccgggctacctgggctgcaaggcctcggcgtgccagaagcgccgcgcgtccggcacctgcaaggtccggacctgcgccgccacgctggcgttccacgtcatcaacttccgcaccgacgtcgagttcgtcctcttctccggcggcttcgcgacgccgtgcgtcctcaagcgctccggtgcgctcccgttcgccaaccccgccaagccgctccacggccacctctccagcgtcgactccaaggccacctcggtgagcacatctactatcatccaaagcttttccaccttgcttttctgcagctgcaaatggagtaatttgttgcatttctgtatgatgaatcagatgaggcttacgtgggtgagcggagacgcgaggccgcagcaggttcagtacgggacgggcaagactgctacctctgtcgccacgacattcactcataaggacatgtgcagtgagtagtaattaatcatgtgttcatcactgggaaaatgcaatgtaaaagaggataattcaatatcatgtttattatctcaaatggaatgaaaattccaatgtgcaggcatcgccgtgctgccgagtcctgcgaaggacttcgggtggcatgatccgggttacatccattcggcactcatgaccggtctccagccatctcagtcctacaattaccgttacggaaggtacaggttccccccttcttttttcacttttttgctgtaaaaattagcagttgtcacttgtcagtaacatcctcaatacgggcttgccgctgatgtgcagtgattccgtgggttggagtaacacaaccgaattcagaaccccaccagctgcaggttcaggcgagctgtccttcgtgatctttggtgatatggggaaggctccactggacccatcagtggaa

SEQ ID NO: 26809 - DNA, 615 bp, Oryza sativa
caactacgagagaacgtgtgcggtataccagggcaattgcaaaggcatgccaaagaatgtcgcaaaaggagttgatacctacgataacagcaactacgccgcacctgttcatgccgttgttggagcaggggggttcaacttggatggcttccctaagattggtgtaagagtcatatctacacctttgtgtatgttgttctcctaggcaattatagacatcgtttcaaactacatagtatggtggtaacaaattgatatactcctaattgataagaacgcattaacgcctgaaaactcacatactgttaaagtgacaagcttgtctttctgttaaattgttcagctgcatagctggagcttatcaaggatttcagagtttggatatgccagggtacatgcgacgaaaactgatatgttggttcaggtcagtccacatatatatattctacctcggtttctgttaacacgctttttaaattactgaacggtgggttttgtgtaaaaactttatatatataagttcctttaaaatataaaataaatttattttttaagtttgcaacaattaaacttaattaattatgtactgatggttttcttgtttttcttacttta

SEQ ID NO: 26810 - DNA, 1063 bp, Oryza sativa
cgggagacgtgcgagctgctgaagcaggtgcgcgagccgggctcccggggatcctacctcaaggactcggagaagcaggagatgtaccggctgcacaaggaggaccccgagacgtacaccgtggagcgcctcgccaaggacttccgcgtcatgcggcagcgggtgcacgccatcctgtggctcaaggagatggaggaagaggaggagaggaagctgggcaaatcgctcgacgactccgtcgaggtcctcctcgacagttgcccagagtacgtgaggagtttgtttacttcctaactttgtgttggtaatactaattagatcaggttctgattggatggattcttttgaaggtgagggacaactggaatagttaaaatcataggtttaacctgcaaaagaacattttgatagtaaaccgatggcaattagaaacagaaagaggaccatttcatctataataacttgaaaagtctgctgaattattaaattattcctgaatagtattgcacatttcactggatcatatcttctgttgttaatactttagctaagattaagttagagcggtgtgatctaggatgaagcgactggtttctaatgcaagtgacagttggaagctctacgacatgtgttttgtgcttacatatgtacacaaaggaatgtgatgatgtctgaaatcttagaggggatgaggatgccaagaggtccagaacccagtatgaagtgatgattttgtttgtcttaatgttatttgttagaaatagaattactattggcatcaaatccttctgttaatcttagttgccttcaggggtgaatccagaacaaaaatgacccgctgtcccatgcatagcactaaatctctacaatactcaaaataaaagagcaccttgtatttaacggcaatcaatattacaaccctatggtttcgcttatgcttatgcatatccggacagctttttattaatcaaaaaaatattttttgggtaaaacttttatatacgattcaaaagcaaatgttgtaaaataaattaggataaaaaaccacaaaattaactccaaa

SEQ ID NO: 26811 - DNA, 1677 bp, Oryza sativa
tttattgatcaagtattccaaggtttgaataaaaggttggatttggcctatagtctcaattttgttcttttcatggtttaaaacatgaaattaattaataaatactttactattctcaaataattggcatagttgattatggttatctcactttaactataaattacgtttgaaatgttatattatgatgaattaaagttgtttggttatatttataatgccacatacatcaataatataatatatttttgagtgttaataaaatgtctgaaaaaaatacaaacaatcagttaaaactcgaatcatgcgcgtacaaattactccgtatttaggccctgtttagttcccaagtttttttttccaaaattccaactttccatcacatcaaacatttcatacacacacaacttttctatcgcatcgtaccaattttaaccaaattttcaaacttcagtgtaaactaaacacagctttaggataggaagggggagtaccaagttctaccctccgtgcaatctcaagtcgagtgttttcccgatttattaatttccaaatccaaaagaagaaaaacaaagttcatctcacaatatagattcacttttaaaactgcaatatgatcccccatatgatccagctctaagtctctaaccaaatgggcatgatggctgtgcaaattaattttaaggcatattcgccgaggggattaaaaaacaatcccccctctcattacattactaattaggaaatatacttcccccatcaatcaatcaatcaatgcttaaatattgaagtcaatcaaaaccatcgttatccaaaggaaaaccttaaacaaaatctaaaacgccagatcgaactgataggatattactactacagtactcccccgtcacataatataagcgattttgagtttttgtttgcgctatttgaccacttgtcttattaaaaaaatttgtgcaaatataaaaaacgaaaaattatacttaaaatactttagataataaaataagtaaaaaaataaataataattttaaaattttttaaataatatgagtggtcaaatagtacagataaaaacttaaaatctcttatattatgagacggagggagtgctgtactccgataaaagcgggtagaaaaagcacatggtgaaattcctgcgtgcggtcgtgcacagactccgtctcggagactctcccgctgactgacacctcaaaaccggccgtcccacgaggtctcctctctttttctcctctttaatcccctccccggggtctcctctctctccggctgcgaaaccaacgacggcaccccaaaccgcctccgcctccgccgccgcttccgcttaacctcctcgctctccttgacccccccgcctttcaatcgggcgcggccgttcggggttcgcgtttttatcggatcgcctcgttcgttccctcccctcccctccccttcgcgcggttctttgccgcgccgcgggggttccgttccgtcgtggagcggctggccccggagccggaggccaaggggcgtggacggtggagggtaatccgtggtgttgagggagccttggtgaggtggtggttcgggctctcgcggcggcgtcttccatgggggagaggcggtccggctacagggacagagggggccgctagcaaggaaggtattggaggccac

SEQ ID NO: 26812 - DNA, 2110 bp, Oryza sativa
  unsure (1)..(2110): unsure at all n locations
attgtcccgtgatgcgtcagagtttaaaaaatgtgacgaaatttgatgtgcgatcaccccatattctgcactcatttatgagagaactgcatttaatgttaaagacacaggtcagctagcagacaatcccaatttagttctaaatatgcaacccaggttatcctaaccatgaatcggctcacattattttgctaggatttaagaaaaaaaatattttattgtttcctcctgtcactctttccggtcatattctcattatgtttccttgtcagtgtttttacatcgtagtactgtgctgctatcactctaggaacaaggatattattttctgccgctcacaagtcataatatattaatacttattatgtaagaatggtgtgtatgtgattttcaggaaatggaaatttctcagttccattgtgggaaaagaaattttgcactgatgcttgtgcaatcccatggggtaaactctgtgaaaccaagaaattgatgtcattgtacaaaaatgtggttgactgggatgattcagctgcattagaaactttcaacgatgcaaaagctcgtttctgtgctgtataccatggccaaccttgtgatatcccgttacctgacccaaacatgtatattgacatggttaaccaagatgaacatgttgatcctgaattggtggccgaccttgagaaatcgcggcgttcttatcccaaaagggataatacagctcctgatggctgggactcctttatatttacaaacaagccagttccagccacagggtggggtgatggggaaacaagcaacacacctggtcagcaataccctacgaactggaataatcacgtgaaacagccgactgaagcaaattgcatgcaaagttcagtaaattgggataattatgtcagccagcctcctcaagcaacagttcagcaaagctcgggaaattgggacatgtatgttaaacaacaagatcaagctaataatgggaggcaccaaccatgcctggcacntgggacatgaagggtgactctctggatgcatggaagcgtgattcggcctggggttctgcagctatagattcatgggacaaccatagagagaactgttatgtacctgacagccagggctggtcttacggtcactggaaaaggcgaaacaatgagtcgagcagaaggaatagcaggggtagagatagagttggtcccattagctcaaaggccatgaaaccaaagtaccattctgaggagcgtaatggtgctaataatggctggaggcactgccgagttagaaataacatgcagtactcctatgagaatcctggttgcaaccagtcactagcaatgtgaggaagtgcattggacagaaaatgaggacccgtgtaggttatgtttccttttttcttgaagtttttgtagatagtacgaaccaccacaaacctagagtgacgattttgtctagccatttgcatgcccgttgtacatatctatatctatgtatatgtttttgagctcagtcatttttgtttactggctgtattgcagcttcattgttgcaaagtgggaattaattaagatggtgtctgttcaactatttcttgtgtggtggttttggccggttttgaattgttaggggtatatattgttcctatgttgtattgttgtgtcaaagtttccatcatgctataaacggtcctcgaatgaattctgaaatgaagcacttatgttctgaaccagaagtgcattcggttggcgttaaaatttctgaaagttaaccttaaaaaaattattctaaaacaaacatgcgaggcccactctaatcggtcgttcaaccatgcataccacacttgcattgaacagtttatgagaaacagataattctcttttagaaaaaaaaaaagaatgtcccataccactaggtgaagagcgccggcacacctctgccaagattgtgtatcagaataagcttactgtgcatgtttttttgcggggcaatgaacttaggttcagtttagtatcaaaacagcggaatccacactagtggaatcatatttcatgataaaatgcctatgaaagtttgcgcccagagacagcaaacaaatgcatcgcgttatatacag

SEQ ID NO: 26813 - DNA, 5825 bp, Oryza sativa
tgtgttctgaccatctagaggttgtgcgaatttcgcagttgccactactcattgcagcatatgatttattgattctgcctatctagcaagtgcgtgctgctttaatctccacgaaaaagtttattccgaaacttctccgttaaagagagctcctcgaataaactaatcttggagcactcggttattaactgacgaatcgtttcatacctactgatcgtgcaatgctagatgcattggatgtacacacattgttaaacttacgaggaaacctaattatgtgttggaatcgacgtgttccccacacaagatttccccgtatttccattttttgcaagttgtttcgtacggcattgttaccagccgcctgccgccgttttgctagaataaaagaagctgtgtcggccactcgtgcgccactatatatggctgctagcgagctgaatgatgcgtgtagttcggcgtcgccactagcctctactcgcacattaatcaatcgctgcatgcattagctgaaaactatgatcttggccatccatacttggatccaatggcctagattcactgtcacaaggcaccttatacattgatttgccacagtaaaatatatgctaaggtgcttagtggatcgagcccctgatttctcgttgtgatagatgatgctagtgcaactgctgaggtagcaaatgcatcaggtcctgtacgaccagtggacgccgagatgacctggattgtccagcaatgttaatgtctgccatttttattttaatttgaagctagacttgcttaattactctgtttggaggaacatgaagtctacataagatcacatggttcacaccgtgaatgatcttaagtttccttctttgtgtatgcggtacataattcggtcccaaacaacatgagcgaacaaattttctggttggttgtttcattgttcttgccaacaatgttgaaaacaccgacacgtacaatagcctacaaacagcactgtttgactgctaaagagagagactagcatatatgcaatgaaaaaaatatgagagactatacaacacctctctgctatagcttgctggtcaacataggacgtattttgactttgccgtgtaaggttgaggggaaagacctgaccaatattttgatttgacgacgcaggaaaaaaattgactgcaattcacaattttttgggttcaatgatatttaggcacgctctggtttatttcagatgagaattatgcccccaaaagggtatcttgcccactgaacgaattcacctcgagttgtagtcatctgctggatccatacctagatttggaacctccggtcgtacgtgttagacttggaatagcatctagtcgacaatttaaagagtcgcctcgcacgtgtgtggtcttgttgaactaattaacccattgaatatatatgaaaccatgaaaatcctgaacttgcttgtgtccagtttctcattgccaaaagaatgcccagacggcaattagagatcaggcccaacaagggcaggaaggttttctctagcaggccaagtccaacagataattagacttgaactagtacatttctatgggccttttcagttttgaggctccaaggaaacgaacaagctagggatttttaaattttttttaaacattttatttttttctttaaaaataaacattttcaaaacttatttataattctgaaacttttgactacgccagccggttggtgtgataaaacaacactatcacgccgatgacgtggcatgttatttggccacgtcaaaatagctatggtaattgttctgccttgccacatcatcttgaatagcgtgtgatgtgacagtgttgttttgccatgttaggcggacgaacaaccaaaaagttcagattttaaaaataagttttgaaataatcatttttaaaaataaaaaggttaaaaaataataaaatttccaagctagcaggctactgaaaagttgattcaacctttagaaatgtcagtatgtcactgattcaacctttagtcaattacagtacttcctgtgcctgatcacattggagagaagtgtcactgttgtagctcggcttcacttctcttcctatggaccaagattgcaaacctgctcgagacggcagcctggaaaagggccttcccagatgcacacgcaagggtcacacacgcaaaagcactgaaagtctctccgtctttcgcccaactgtcagctcctcttaatttcgccgcccggtaccgtttaccggcgagcacagcggccaagtccacgaaagcaatgcaagcagcaccagctttcggttattgcggccgaacggggcagaggaattcgccgtgagctcgccaaactggcacgtactactacggtacatggttagaacccaacctggaggataagaccagatctcaatcggacagagcaaatgagcaatggagaaaacgtttctctttccctcaaaaaaaaaaaagcttctcacagttcctggctgcacggagatgtgaaacatcctcttgcagtgtcggtgccaacacgaaccaatccgttcaactgctggaggctgcaactgtcaggtagatcaacggaaacagggacaaacataacgcacagtacagtaaccatggtgccgagtgatttgatgagtgaacgtgtcgcacgttcgacgtagtcttgatctgctgcccagtttatagaggtcttgatccggactttcggagcacatgataggcaaaagaatcagattcagcttcatgttctagtaacatgcggagcacatcatagaaaggtactgtattgatatgcctttgttgtgctctggtaaagatccttacattgaaccactctgaaaaaactaaaaatttcaggttccctcaaggaatgagaaaaaaaatagaaaaacaatttctactgctttagtaatgatagtagcagtgtgagagaagtggttccttcagtactgatgtggcagtgtttagttccttcaaacttccaaaaattccatcacatcaaatatttggatgcatgcatgaacattaactgtggatgaaaaaaaaccaattgcacaatttgcattaaagttgcgaggcgaatcttttaagcctaattacgccatgatttgacaatgtggtgcttcagtaaacatttgctaattacagactaattaggcttaataaattggaaaaagtacgaattacacccacgaactatcgcggtcgtctgaattaccccccttaaccacaaaaccgaacatttttcacccctaactatgcaaaccggacgaattacccccctcggcccaattacacgtggcagtccagtcagcgcttttttaattaaaaaattgtgggacccgcacgtcatacacttcttaccctctctctctactctctctctcttctctctcgcacagcgcgcacggcgagagcgcggggactggcggtcggcgacagcggctcgcggcggcggtggcgcggagatgaggcgagcgcgacggcggccgagcaggtcgaggagtaccaccacaccgagcaggaggaccaccaccatgccgcgtaggatgacatgagcagtgatggcgacgagctccagggcaaacgcggcggcgtgctcttcatcccgcccttgggcccggtcgatgtggcggtccgtgaggtgaggcgagcgcggcggcgcggacgtcggcgcggaggcagaggcggcggaggagcggacggcgcggacgtcggcgcggaggcggaggcggcagaggcagcggaggagcgtggcggcggaggagcgtggcggcggaggcgcatggcggcggaggagcggatggcgcgggcgtcggcgcggaggcggaggcggcggaggagcgtgatggcggatgagcggacggcacgaacgtcggcgcggaggcggtggcggtggaggagtggacggcatggaagcggagtgtagcgcccgttccgtcgtggcgcctagcgggaaaattatctcttaaaaaccctaattgcgaaatttgtttctttgcttgttgtctagtgtccgtgccatctcaagatctcaatccccgatctatcgtcgagttcaattccgaatccaaatccttccaatcaaattcctccgcaaaagtctattttgcctcccccgaggtcgatgggccgaatctcgctcggtccatcttcccctcttccccggccccctctctccccgggcgcgctctctctctctctctctctctcgcgctctcccatctctccccccgctcggcctcgcccgtacgctgctcgcgcgggcgagagccgccccgagcgcctctctccccgctcccccgctcagcctcgcccgcacgccgcgtgcgcgtgcgcgtaagccgccgcgccgagcgccccctccctttcccctcgctctgccgcgcctgcagccgcgcagccgctcgtcctcgcgagccagcgtgtgcgcgcccgcgcggacgccgcccgttgcttcccgcgcgcgcgtgccgtggtggccgaccgcccggtcgccgccgccgtcagcctctgcacgcgcctgtcgccagtgtcgccgctccgctccaaaccgccccgccgtcatcgccgtcgtcatcgcccggcccccgcccctccgcgcgcaagccgccaagggacggagccgcgcccctcctccctctgccgcgatgctcccgttcccctccccctctttttctcgaatcggcaaaggggcaagcccctttctccccctccttttcccctttttcctcctcgccggcgtcatcctcctgccgccgctttggctgcaagcgccgagcgccagctcgcgccttaaccgtccaatgtcggttcccctctcccaaaccgatattgccgtccatttaagcccaagccctccccctccaaactccctcattttcgcctccgcgccattgccgccctctgtttcgccgtcgccgatcgtcgttgcgcgtgtcggaggagccggcacgagcaaggacgcggaagaggactccggccgcgccctctccttcctcttccccggcccgaggccggagagattactcccgcgccgtcggcctctcgtcacagcgccccgacccgcacggtagtgcctctctccgttcttcctcctcgctccatctcccccccttagttttcggtggtagcacgagtagcctccccgtagctagccggcgccgccccgaccgttgccgtcgctcgccgtgtgctcgccgccgtcgccgcccgagctcagtagcacccgctcgtcgccggcctcgctcggcgtagttccgtccaatccgacgctagcgtcgagttctcgacgccgcgtagatgctctcaccgccgggaatcgacctctcgtgacctcgtcgccgtttccctcttctcccgccgccggttgccgctgccgcaatccgccgccgtcgagcaacctccggcgaatccgagccgttggctcgtctccccttgtcacgtgcaaccgcccggtgtgcacgcttttgcccgtatcaccgtggttcgctccgccgctcgccgccgccgcccgccgtccattcgtggccgggtcgtcgtctacctcccgccggcccgcgtggcagccacgtaggcgccacgtcggcgccagctcagcctagaccggattgagccgaccccggtcagtccctccccgtgcgcgcgttccaccgcgagccgcgaggctgcgcgtgggcccgccgcacctgcgtccaccgggaccgcgcgcatgcaccgcgtcccttccccgcccgcgcgcgtgcgtcgcgtgctccctccgcacggtgagccgagccgctgacaagcgggtcccacccgggaccgcgcgt

SEQ ID NO: 26814 - DNA, 1878 bp, Oryza sativa
  unsure (1)..(1878): unsure at all n locations
ctatattccctccctcccttcttttctttttcttttccataaaggatttaaataaatcctttttcctttagaccaaaaatccaataatcttagaaattcaatatcttcccaaccgtaaatccgattgactccgttcaacttccaaaattcctcaaatctcgagatctatctaatggcacgcttagaggtcattaatagggctttattttcgccgtttgttgagttgtcccgtttcgcgtgtagtttcggagcccgaagacccgcagtgcgaggatttcgaggatcaagctccggatctcgagcaaggcaagccacctttgaacatcttgagcctatatttgaaatttaattatattgcttgcgaaatattatgcattgataggatcacacttaatctgttgtcccgtctgcaaggcagattggcagacctacctaatttgttacatttgatccttcctttgttaattgttataccatgtccccttgtaaccacccaattgcgcctcgatattcgtgcactctgtgcgagtatcgacggtcgccttcaaacttaaaatctgagtaacaacttgggtaaaactggagttttacaaaggacttggaaaacccgacacctgggtcggtgcttgcgaactaaatgaatttccaaaaccgcggaccggggaacgtaccgggtgtacggtttcccgctctcgcacttaaggactgattccttggaatttcatccaaacataagacaagtacgaccacatgggtggaatgggacacccctggctgagtaactagcttatcaggggagccttgatgccgagagacatgtggattcgccggggtggtgtcggggaggacccctgggcttcctggcacagtatggtctgggacctaacctgttgttggtctgggacccctctcgtcggcatatggtaaacctgtatcggctttcgaaatgccttgtcatgaaagcttggaggtctcccgacgtggctgatccccacgggctgggtgatccgggttagtaatgtcgtgtgggtaaagtgtaccccctctgcagaggttaacaaactgttcgaacagccgtgcccacggtcatgggcggatgtgaggtgattcctagcgtagttttgtctgactactgcttgtgaaattgctgttgtgaaactgggttcgatgtttgaaaaatcagcagctgacgggatcagctaggcccgggtggccgtttgaaaagttgttggcccgggtggccgtttgaaaagctgttggccgggtgccaaccctgtttcaagatctaaagactgatacattgcacatactccgaccggacgagacgcactgtctcatccgtgtcgtttgagaagcactcacttagactttttagaaaagagttcaaacaaaatcaattacgaaaacaatagcctttccttgaagccttcattaaacacttatttcccctggcttgctgagtactcccgtactcacccttgctctatataaataatccccccccagttgctgaagaagatgaagtggatcctgctgacgaggagttcttccanggagcaagtcggcatacgatgagctttagggtttcggcctagttcccaagtcgcgcctgtgatgattggtccaagtcctggcttccgctttccttttgtaatgcagttgtgagctcgggatctgtccgcagcccaatatgactgtacttctactctataataaagagacctctgttgctgtgatactctgtctccctgtgataccagcactgtttcctgggactggtatcgattaacaggttaatttggagcgtcacgggctagatccggtcgggactagttcggggcgtgacacggaggcgcgtggcggcagaggagtggacgg

SEQ ID NO: 26815 - DNA, 1699 bp, Oryza sativa
tcgcctcacttccgcgccaccgccgccgcgagccgctgtcgccgaccgccgtccccgcgctctccccgtgcgcgctgcgcaagagaggagagagagagagagagtagagagagagagtaagaagtgtatgacatgcgggtcgctgactggactgccacgtgtacgccacgtagatcgaaaccaccgtggattgggtcgagggggataattcgtccggtttgcatagttgggggtgaagaatgtccggtttcgtggttcaggggggtaattcagacgaccgtgatagttcaggggtgtaattcgtactttttcctaataaattcgcctcgcggtttacaggcggaatctgtaatttgttttgttattagtctatgtttaatacttcaaatgtgtgtccgtatacttaggccgagcttagttccaaatttttttttcaaacttccaacttttccatcacatcaaaactttcctacttcatccgttccacgatgcaagtcattctagcatttcccacatttatattgatgttaatgaatctagatagatattcattaacatcaatataaatgtgggaaatgctagaataacttacattgtgaaacgaagggagtacacacaaactaccagcttttccatcacatcgttccaatttcaatcaaaagcctggtttagttcctaaccttttcttcaaacttccaacttttccatcacatcaaaactttcctacacacacaaacttctaatttttccgtcacatcgttccaatttcaatcaaactttcaattttagcgtgaactaacacacccaaactttcaatcttctcgtgaactaaacacacccttcagaaaaaaaaaattggacaagcaactaaacacagcctatatttaggtgcagatgcttcttatacaacctgattcttgttgacttgtgtgtgaatccaatgaatgggacaaggtgtgggagcaccaaaccggggtccagctccacggaaagcaaccttataccaacttatagatgtaatccaatggacggagatgtacttcagtagtgagtgcttggcacaagtgcaacggatatcccgtccaatatcccaagacaattaagagccacaatagattaaggtcatagcaactgaaatgcaattgatccattggccaatcttataaaactgattaactccatgttccgtactagataaaatgtaaagtattccatgatacatactcagctaacagtactccacaatgtagacaattttcatatactgtcaaagtaactacaagtggcaaaaattgactcatattttcatatgcccgacacaaagatcgtacttttcctgtatttatttgccttcctaccacaaattaagacaagaaatgaacagattttgcatcaaactagtagaggatcacacattgatgaattcattagaaccaaccaaattgcgtgtgctgttggaccagatcccacgctttaggcctggttgtcgctcttgcgttcgccgtgcgagtcacgctcctgcagcagcgagccggcctcctcgtcggcctgtgcggccttcttctgcgcctccttcgccttgagcgcctgaagcttgacgtggttgtagtagcctacaccgaggaatgcgatcccgtagccgaacaggttgatcggcgtgaccgtgtcccggatcacagaccaggagaaggcgatgagc

SEQ ID NO: 26816 - DNA, 980 bp, Oryza sativa
aaaaaaatggcatgtacatacatctctgtctcattataacagctacctgaaaagatatattagtattagtatctggcgaaaatagttctagcaagagaaaccaacatcaggaataaagttcagctcgtcttgacgcttgcagtattctgcagaacgtaaaccacattttggcatactgactattggcctcttctaatactatcatacagtacagcacatatcacacttcataataaatcataagtacccaacacttacagtcagtaacatctgcattggtagactaattttagacttttactcgtatcatagccaccattttattcgagcaggctataacaacggaaagctattacccacaaggtcgcaacatcaagcaaccggagctagcatggagaacttatgaggaacttgatagtttcattcagtcaatgaggcagaattcacaaagcttggaatgacatccactgaattcaccattttgggaatatcaagctcgtgcgaaataatgccagttccatcaatcccgcaatccacaattgttggtctagagctctcttcccggactgctacctcagtgctagtgttaaagcacggagaatggtctgtacaagtaacagaaccaaaactgcactgcttctgaaaggggaaagtaccaatctctgcatcaatcttgcctcggatatcaaacaaaagggctcttaacctcaccacctcagcctcgagtgatatatgcccctgcaatctcctcaagagctgctgatttgtggtgcgaagtttcttgacttcctcctccaagaaagctgcatgcgctttcttcttctctcggtacttgcgcactgcttctctatttcccagaggcttacgggtctttctcagctcctcttcaacattgttttcaccagaagccatgacttgaatgtgtgtgtggaggcatgtgtgagtatgcatagcaactgatggacccggtggattgcaag

SEQ ID NO: 26817 - DNA, 676 bp, Oryza sativa
cgagatggggaagggccagttgtacatcttggggtcgaggatgtacttgttgtagacgatgaccgtgaaggagaggaagatccacaccgccacgtacatgtacgacaccagcaccttccggatcaccgaatccgacatgcccccctcgccgccagcgccgccgccgccctccttccccacggccatcctcctccccgccgcccgccgctcggtctctccggctccggcgagacggtggatctgggcggggtggcgagctgtcccgcgtcggcgcgctcgcgagatggagtgtgagatctgggagggagcaggggaggaggaggaggcggatctggctgggaaggaggagaggtaggtggaggaggaagaggagggggtttcctctccaaatcaatcggcggtgcggtgcggtgcgagtagcggaggagtgggggatggatggggggagatggccacgtggagaatagcctctgcctgcatcttggggcgcccccttttataggccggatttgattttgtttttacggccttttctttctcccgtctcgggctccggcgctgtcgattctgttgttaagggccagttattctgcgctgtacgacagcacgagtagtcttggcgtggcaggccgcattgtgaatcggttttctttctccttgtgtaacgtgcagatct

SEQ ID NO: 26818 - DNA, 719 bp, Oryza sativa
tgaagaaccttggactgtacttgtacacaagaaacgcacaacctgcctggattccttataatcctaaggtcatgaggtctccatctcttagcaaggatacgaaggctctaaagattctgtcatggaatgtgaatggattaaaagctttacttaaatcgaggggcttctctattcatcagttagctcagagggaggacttcgatatactatgcctacaagagacaaaaatgcaggcaagatatgattttagtttttcttatgcaaaattaccatctaaaattggacaaaaggttctttcttggggaaatggtatcttttcttctctctgaattgttttcatccttcactgctatagtttattaaccaggaattacgttattttgagcaggagaaggatgtagaagtcattaaggaaggtctacttgaaggctatacccatagtttctggacatgcagtgtatcaaagcttggctattcggggactgcaataatttcaagggtgtgcactgctattctcacatcctaccacaatgatcattgcaaaatggctacaacctctaatgcatcatatctcatgtttgttggtttgcttcgttttgtgccttatatcttgtttttatctataatgtgttgtgttctgcaaattcctttaggtgaaaccactctctatcaagtacgggcttggtgtgccagaccatgatactgaagggagggtcgtc

SEQ ID NO: 26819 - DNA, 869 bp, Oryza sativa
tcgatcagttttattttaaaagaataaaaatctgggattaaatctcgagttcaacaaaacctaggggtataaattgcgggacatattggcacatttaactttttgtcactttatgtggcaattaattatttaccacatgctgtctatgacatgtggacccttatgtgtctatgacacgtgggtttagtggcaaatcttttatcaccactcgtaaacagtggtggacccaggatttgaacccagggtaagcctagcaaaaaaaatcctaatgcaatacaatacgattcgacataaaatgtggtaaacgatacgatatataactctaaatggttcaatacaagtaaaaaataataaataagtttgaatcttatacctaaataaaaatgtaaattgttcaaatataacataaggtctttaaataaataggatattacagtactagtcaagactcaagagcttttgctttacgcttcttcatggtcatgaaagagtgaattatgtcttcctcacttgcattggagaagatatcacgctaaataaaggtgaccaaacaattattcaataacttatcactcatattatttctcactttagtctttactaaatttattgcagaaaataccctttccacacttaccgtcgccaccggtaagatcaacaccaatttaagaagcaaatacaccaaatcataaagatcatgcctcttcgtatcaacaagtttaattgagagctcaccaatgttgtttaggcatttgaatctatcatcctctctcatataatcaatatatgtatcaagttggagctcaagtttcatcaaatcggagccttcaatgtccttaaggataaaaagcttgcaagtctaagtcttt

SEQ ID NO: 26820 - DNA, 723 bp, Oryza sativa
acacagagagagattaccgagtggtttgcatacaatccaaagaccatgaggcctccaccacttagccatgataccaagtgcatgaagattttatcctggaatattaacgggcttcatgatgttgtaacgacaaaggggttttctgcacgtgacttggctcagagagagaattttgatgtgttatgtcttcaagagacacatttggaggcaagtcttggtgtttctgccataagactcttaatttatactgtacctctttggtgttatgtcatggggcagtgttattccgaacaactgtcacctattatgatgtgtttatggtcttacataatgaatttatgattaatatacatcgtgtactgtgttttcattatgttttcaggaaaaggatgttgaaaagtttaagaatctgatagcagactatgacagctattggtcatgcagcgtctcgaggcttggctattcagggactgcagtaatttcacgggtatggtatttatgtggttatgttcaagataagttactgtgcatactaattctagatagataaaatattttgatgaaaattagatcatagcatgacttatgttgtgcttccattgcctttacaggttaaaccaatttctgtccaatacgggattggcatacgtgaacatgatcatgagggcagggttattactctggagtttgatggtttttacttggtaaatgcctatgttccaa

SEQ ID NO: 26821 - DNA, 724 bp, Oryza sativa
ttcttgcaattccttcatatacatgaaagtatgattgggtctgctctataatagagtccactttactttcaacattagaaccatggggagacaccttctcataaaagaaatccaaatagtctcttttccttcttggatctaacacagtggtaatgacaagtgccaaattgaagttgtttgccaatttttcatcccaatattttgcaaacttggtgtgcataggagcagccaatcgttttaaaagatcgctggtttgccaatcaggatcactcaaagcatgacggatacaaagaacatggggcaagaatgtgtgtgcagttggtgtcctatgagctgatacacctctagtagcctcttcaaaagccttaagaaattcacaaattgattcagcatgcaaccattcttcatcagttggtagaagttcacaattttcagaggcatagctattgaggatagccttgtaaggcaatatttctctaatcatcttgaaggtcgagttccaacgggttggtacatcaagagtgaaaccagattttggaggaagacttttactagaagcaattgaataaacgcttgaatgcgtgagggtgaatgctcaatgtactttaggatctcacggatcttatctattgctgcacgaatcaccctcatcccatcttgaaccacaaattgaggatgtgtgcacaacaccttacatgaaaatgttgccttccaaaacaactca

SEQ ID NO: 26822 - DNA, 729 bp, Oryza sativa
tatgctataatgcgggtggttcttcctaagggaaatgctatcaataaggattaaaagaagttctgagttccgtctgaaatgaaagaagggtgctcgatgggccagctgacgacacaacgatgatgaactccatttaggaagccagaggactaggcagcctaatatgccagggatagtatgttcaattacactgcaaacatgtataaattggaaataacatccaaggataaaatttggggtcatggcccacatgccaatgagacatcaacacaggtgttatttaccaactcttgtgatctttatggtgttattaggaaattattattgaagttcggctggctccttcgccagcccaggaaaaaaatattaggtaaataaataatcatatgaaaaatatttcagttattttttatggtatgataaagctcttgacattgagtaagtacatacctttgttggtcttccgggcattatgcctataaccccagtaactatatccaacaacattgggatgctgttttcgaaatgtatcaacaaaacctttggacaaaaaattagtctcgaatgattccctttcttcaattgtaaagcctgcacttctacgatttccctggataagagcattaactataagctaacaagtataaaaggaacgtttggggaagcaactggataccccaaaactagacatttatgttctcggatgttagtatagctacttttacctct

SEQ ID NO: 26823 - DNA, 5382 bp, Oryza sativa
gctagctagcagctcgtatcgtatgcattcatccatgactggaaagatggagtgatttaacaagaagatggcagcgaaatagatacacgatctgctagccctatagttcggcaagaatgaagcctggttgttgaagaaagtcgcacgtgagaagtttgccgtcggaggcgagccgatttggctctccctcgtgagccagttttttctcgcccctgcaggctagctcgccctcaaaagttaggattttttcacgattccaaacacctggtcttgcctggctaggctaggcttgatctagccttggatccaaacgcaccctaagtaatttacaccatttctttccttacccagagaatccatcagggctgataccaaatctttcttgttgccttttacaggaattcccatcatcctttaaattcacaagaactaaattagagaggcaatcaattatcatcgactgaaaataaacgaaggatgtgggtatgtggtaaatctaaacctcgtgatttccctgagctccttcactgtcatggattggagtcgatcggggtcattcctaagttgctctatctccaatttgctttcagcaacatcctcctatagtcaaagcaaataagtgatccaaccataaacaagttacagtggataatgccacctgtttagtacaaagggcataaaaaggctaaccttttcaaggacatgttcatcatctttcttgatatcagtattcttagaggcagctcgacgcgaataggtggctcgtgtttctgccatcatcaagcttagtcttatcagtgctagtttgctgggactgaaatttgcgcttggaagcccacagccacacctacagtcacagaaacaagtttcaagtgattcttgtgccaaggactccaaatgcagaacaaaagcacagaatttcctcaatgcaaagtggcagaaacgccacagcgtttgacagcgccctgacctatccgtactgctaatatgagcaaacaagagttaactgtgagcgattcctaaggggattctttttttttttaaaaaaatgatgcatccccacaaatgcaatgaactcaggcctagtacgtagcacatttatgcgacaccgtctagaagaaatttgggaactcggatttcgattcgtcaccaaaggtaaaccctaggagcacgacacccgtatccagaactgctgcgcatcgaaccggcacgggaagaacaaatgcgcgtaagagcggggagagcaggagaagggaggggggacgggaaccgtacccgtagagacggaagagggagccgccgcgcaggagcagcggcatgggcgggcgagctagggcgcgaggcgccgcgacgtggccgcgctaaagaagggaaggggagcgtggcgatgcgcgccgtggcggccgggccgtgccgccggtgagcccccgcggagtctctcggtgctatccgaaatggcccatcttggtgttaatcggttatccggcccggcccatgttggacgagaaagcggtttctctgctggccgtccgatggtaatcgtgtggatcgtactagctcgagattattcacacggaatgttttctttgatctgcgcgtagtgcagatagacaaccaggaaaaggctattcaattcaatggagtttgtaacaggcgactggccgcacgaggtatgtaaacagtgtatcctgatgtgttccatgggtgcttctctcacctgttgttttcaggcaaactaacatcttgttatattttggaagtgtttttatttggcagtagtagtcaagtagagccctgcctttaaagaaaagaaaaggaaggagtaaagcaccatgttttcgtctctcggtgtcatactgttagccaaggacgatgactgtcgcctacttgcctttaatgaacgatgaatgaaaggtgtggtttacagaaaagtatgttatactcgttctcaactgccatcggtgttatacaacatcaacaatttgcagcacaggctagccccgaaagatcgaggactcgtcaaatcaaccgtttgccaaaatttaaattttacaatttattttgtgtgtagttaatttcaaaatatttccaatcagtattttctttttcaaaattaacttttaagtcgctaattacatatataaaaaatatctataaattactttttatcattaataaaccatttggacttgtaacaagctcataactgaaagatcgatgagaccccgagtttccaacaatttgcaacgttgaaaaaaacaacgacgacgacgaatatttggaacttcaacattgatcccaagaagaaaatagatagctagtagtactatttaacacgatttacaatttgaagtagccacgtcatgtctgacgatcggaaggagaagaagggcgtgcgttacaggaggaagtgttgcaagtatctgagcccatcgtcgatgctcacgtacctacactgcgccatcacaccgaacctcaccttctccaacagcctctcctcgctggacacttcgaacaccacctccgcctccaccgtcgcgccgccgcagccaggcgccgggagacaccccgtggcccaggtctcccccgtcgcgccaccgaacagcgcgcgcgccctcgccgccggggccttcgcgtccatcatctcgaccgccaagggggcaaacccgatcagccccgcccgcaaagccgtccaccggacgctccagaactccccccgcccgaccgccgcgttccggccggtcaggtcgacctcgaactggaaacggccggtcttggcgatggcgtcgcgggcggcgacgacgaacgagagggtgttctcgccgctggccgcgaagatgtcgatggcgaaggtgacatcgtcgagggcgaggcgcggtggcgggagcgcgcggcggcgggcggaggcggaccggaacagcgcgaacaggcggcggtacggcgacgagctccggccgctggcgtcgtcgccattgccctgcatgggaaggaggccgagagcggatgggtactgggagcgcaagagcttggaccagaggtcctcggcggtgaaggcctcgcggcaggcggtggagacgcaggaggccgccgcgagcgactcggcgtcgaggaagggacccaccagccggagcaccaaccacggaggttcagatcccagcattggcgccgtcggccgcgcgggctccgcgctcacgccaatgcgcggccttttccgcgcacgcgagaccgagccgtcagcttccaccgccgcgcaagcaagcatatcaatcaatctggaggtggaagggggaaacaggtagcggaaagaaaccaatcgattcgccgaaacggcttgccttatatcgacaggttggtgggtacagcacgacggccaaattggatgagattacggtttcatatccgtagttcgactagtttatcaacctgtttataggcgagtccggatgctgtacgaatgcaacggatatgaatttgaacagcggcgacgggggtggaaaggtctagagatcgatcagcggtgagcgcgcgcgcgtgcgtgcgcgcgggtggcgcacacgtggtccgagaggaacacggtggcgcggcacgagcaaggcgcgtggcgcggagttgccttgggaagaaacgtgccgagaggatggtcgccaagttgctcgttcccatgcaagcgtcgacgaggcacgagggttggacatttcgtcatttcgatggctttgtgcctttgttacttgttagctgttcttctgttctccacttctgcctctctacagaagagatccaatggagcacgattcgggtacgcgacccagcccaatcaaggaggaagtttatttgtccgatttcaaagcccaatggcctgcgattgtatttgactatttgtttttggtgttacatagatacgaaacaagtactgctgaatatccagtattgttttgtgctacaattgtcattttgttttataaaattttagtctccttaattcacacgctcaattttataaacagggagggagatcatgtgttaattctaggatcggggaagagcgacatcatggtttagtgcactgataatatgatatgattgtcataggccgaagcatataaggtgagacttactgaaattaacagattatgaaactttcatgtgtaacaaaagctatcttaacaggtttatctaacggtacagctagtgttccaagttatcattgtctcatgtaagggtgtccaaaacggccaaaccggaataacttaattgccattaatatttgcatccgtagcctgtaattagagaaactattttaatctctcgagaagatatctttcgttctttgcatgtcacgcaaatggttatgaaaaaatttaaaacaatttgagaaggtgtattaacatgtgatataatactccacaaacatgtaaattcaaattcaacttctacattttgtaacgaaaaaaataaattaaaccgcagcttgttaacgtatattcagagtcaaatttgttttttcgttgcgagatgtagaagttaaattttaacttgtatatttatggagtgatatatcacatgttaatatatcttcttaaattttttaataaccatttaagtgacatgcaaaaaatgagagtagatatcctctcgagggatcaaaatccacttcctgtaattaggaggagattattgtgaatttgtgatcgctcagcaacttcacacctcctgagttgcactaccagatcgcacaaacaacaaattgaagcatgtttgtgagaggcgtatttgttgtcagttgccatgagtggtgcagtggcgccgtggcggtcctctcgttccatgtatacttccatgttcggtcattggttaagattcaaactaaaccattcgcagcgcagtttaggctgtgtttagatccaaagttatttcttttccatcacatcaacatgtcatacacacataaattttcagtaacatcatctccaatttcaattaaaattcaaactttacgctgaattaaacacaaccttactatccatacagagagattgagagagaagttaaaactaagacgacttacaaagcggtttattgtccaaagagagggataaaactaagacgatttggccccgtttagttctcaaaaagtttttcccaaaaatatcatatcgaatcttcagacacatacatgcagcattaaatgtagaataaaaaaaactaattgcacaattagagaggaaatcgcgagacgaatcttttgagcctaattagtcaatgattagccataaacgctatagtaacccacatgtgctaatggtggattaattaggtttaaaagattcgtctcgcggtttccagacgagttatgaaattagttttttcattcgcgttcaaaaa

SEQ ID NO: 26824 - DNA, 3063 bp, Oryza sativa
ctccatccgggcctccggaatcgcgtcgccccagtcatcacaaccaccaggcgcggggagccccgcgtacacgcacacgcccatgccgatctcgtccgctttcggaatctccaactcctccggcaccgggtcaatcatcatgaattccgcaggcgcgaaccccggctcgacccgcgccagcacagccgtcaaccggacgcgccagcgttccgcgcgcccaactgcctcgttcatgtcgcccgtgtccaccccgaactggaacacgctgttcttggggccggcgtcgcgggcggtgacggcgaaggagaggacgttgttgctgtcggcctcgatgtcgatggcgaggcccgggggttggagggcccggttgccgggggaggtggcggtgtggggacgagtggggtgatggggtcctctggcgtcggcgccgccgtcggcatcgagcaggtgaaggagcccgagcgcggacggaaagtgggagcggcagagctgcgcccagatcatcaaacatttggaacgcagtttattatccgcatagagaacaactaagacgatttagagcgcaatttattatccagagagagaactaagacgatttacaacagaaacacggagatcgatttacgacgcaaaacacataggtacgttctgccgatcaacaacggttcatcaccgctacactgaccctgaaggctaaaagagaaacgcgcatttcacaggaggaattgctgcaagtatctgagcccatcgtcgatgctaacgaacctgggcctgtagtcaggctgcatcacccagaaattaacctcccgcacaaacctctcctctatgctcaccatgatctccacctccgccaccagaatgctcgtgccgcgcgcgctgcagccaggtatggggagcaccccacgcaagcgaatgccgatagtgaggggcgcaggcatctccttattctccgcgtacaccatcacgaacgccgtaggcgcgagccccgccccggcacgcacggccgtcaaccgcacgctccagcgttcccccggcaaaagcgccgcgttcctgtcgctcgtgtccaccccgaactggaactgttcttgggtccggcgtctcgggcggcaactgcgaaggagaggatggcgttgccgctggccccgatgatgtcgacggcgaaggagacgtcgtcgagggcgagagcgggggcttgacctgctggccgtgggaggcggcgtggaacagcccgaagaggcggcgatgcggggacgagtgggggcctctagcctcggcgccgccgagcaggtgaaggagcccgagcgcggacgggaactaggagcggcagagctgcacccagagaccgtcggcgccgaaggcggcgctccagaaggtgcagacgcagaaggccgccgcctaggacttggggtctaggaagggcaccacgatgggaagtgctccccacggcggcgttgtcggctcgcgcattcctcgacgtgcttcccagtggagtggttcagacattggatccttgcgtgacaacgggtagcggtggccactggccagtgggggaaatgaagctggctgtcctggctgtgggccggtgcgccgggtggagcacacgtggtcaggtgaagggtggaacaaggggccgcgtggcgcgcgaggagcagctgcctcccgaatggacgtgtcggttgccactatcaatgcagttgatctctccctccaattcattttatcatcatctaagatatttaagatcttgttacaataattatcttttaataagtatctctttatttatttgtgaaataaatgactatcattaaatacactacattcaaccaatcaagattaactcttattgatataattttatataatatttaaaacatgatgtaatacataaaatataaaatggcatagcaccttaaccgactaggatcgaaaaatttgcaaggagctctacaagagctgaatgggtttgggtcccggcacaatacagatgatctctcaaacttgtgttcattattttagtgcaaaaattgtgtttatacaatgaaacagttgcactaacccctgctcaaaagggttgatagaattgcaggtaaggtcaagcctatcatataccgttctcttgtcctgtcatgcattatgaatcatccaaaataaaagctagctaaagagatttgatttgttttatgtgcaccaaatcacactatatcagtaacaattaagtatatgaatgtacttgtacatggccccgttcacactgaccatctcgttaaaacaaattaaccacccaatattctgttaatgtatgatgaccatatctttcgtaaaatggcggaataacctaagttttaaataaatgaggaaatatacttagtagcagtgcacactaaaaaccaatcaacgcccatgctgccaccattaccagtgactcagggtgtgttattttctccatttcctaattttactctagttttcatgtgcaaccgccaaacaatgcttttttttataaaaaactataggaaagttactttaaaaaaatatattaatatattttttaagttttttatagctaatacttaattaatcgcatgctaattagccactccatttttcatgctagagagaaatgttgtgaactcggaggttcaaactcagccttagaatagaccgccgatgaccaaactctcaaattacacatctcaaaagacaaagccaatatcgtctctcccaatgagatcggaagacaaagccaatatcgtctctcccaatgagatcggattattgttgaagagaaagaattgtgtagtctgtaaccataattcaaaagagaaaaaaaaagcatgataattcaaaaacacacataaaattttttcatggaagtttctgtaaaagtttagtttcacacttggagtcagcctgaaatggcctcttttagtagtcaacgacatagttgactttctccatgctcaatgacttctcaatcgccttgggtcctgtttggggagaataagattctaaaaatcagggaagtcaagaaagcttctcctccttatatagtgcccaatg

SEQ ID NO: 26825 - DNA, 718 bp, Oryza sativa
tcactagtgttacaacaacagcagcagcagcaagcataatagcacacagagcttacaggatatctagcaccaaaaaaaaaaggaagaactgcctaagctttggcatctcctttaggttgaccaagaagagatggccggtaaagtgaatggccctgcgccatctcaattctttcacgtggatcatacattgtttcatctcttatggcctgaaggatcgaatcaggaggaagttccctgtaaatacaaatgaacaaattgagtaggctgtggcacaaatacgctacgactgcactgtcagctagtagtatgagggtggagaaaaggagccccccaaaagcttgaaaaaaaatatggaatttattcaaatttgagcaaatctcaaaatattggcactgctggcctcctctatttgcacaacggagttgctagaaatatggcgccatatgctacagtcgatttttttcagccacttacacagtagttacacctcatttacaccccacctacatatgtaattagtatgtaattttcgaatttacatatgtaattttagtacttacatatgtaattttgagacttacattgtaaatatactaaaattacatatgtactttaggaacttacaatgtaaatacatgtcgactatttttttatgaaaaatatggcgccataatatagctacacccttgcacaatcctacattttagctgccactgat

SEQ ID NO: 26826 - DNA, 2266 bp, Oryza sativa
tttcctcagttattgatatttcagaaaccaagacggaagggcaaacctgaatggttcctttgccttttatgctgtcacccatctctagtgtcagttcacctttagctagtttctgcccataccatgcattacgacccttcagcaatgtgacataagtgtcagccaataatggcccagcaagtttttcaggctcttcttccaaaaggtgggttatgtaaatcatttcagatgtgcaaagagcaaagtaaacggatttgctggttgcactctcatttgttagagctgccaccatacctgcaggataacaaaatttcagaaaattaacagaagcataaaccaagaaaaaaaaaggcagatgaccacgacaagattaaaacgcgacgtaaagcatagcaacatagatgaagccacaatataccgcacatatttctatagttgtatttatggtatatttcttcctggagaaaacattgtatatatcttgatggtaacagtgcattctgaaaaatataaaacaaggcagagtacgcaaaacatcaactaaagctgaccagtgcattccaacataccccatgctaaatatcacaacagtatatgctctaccgtgattacagaagatagcaaaaacaatcaagagaggaaatagaaattaccggcaccaatggcatacacatttttcaaacctcccatgacttcatgtgtaatgagatcactattatcccatacaataaaatgaggctgcctcaaaaatttagcaagaggttttctccatttgtcagctccacatatacgagcatttgcatattctttattgtaaatttctgaagcaatgttagggcctccaagataaagaatgttttccaatggaacccccgctgcagaaaacaaaacaaatataaattgcagaaataaattggaaggatataattcaaaacagttaagaagtaaaaccaagcatgaacactcggccgttaacagtaacacacaccacaaatgatcaggtttaaacatattaacctgaattgagtttaaaataaaagggagaatctaaataattcattttatttatgtggaaagacagaaactggagttataccaattcatgtaacatatctagcagctaaacagctaaaggactattgaacaacagaggacatgaataaaggcaatgtttgtcccatccagttctttttttgccagcgttgtcattttcagacttgtgcctttgtatgttcaacatagacttacttttgtgtaaattatgttagggcatagagctgaagtaaacaaactattcatcctcaaatcatacaaagttacaaatttctaatgtagtctaaagcaaagataaactgcatttgtcaataccagattaaagaatatcctagttacggataagcacaaacaaagaacaaagaacaagttaattcaagcaaagagtgcacatgatggtaagattgtgtaaagaaaaggaaaggaatctcacttgcattgctaatcatctgtgtgggagttatgatccgtggcaggggatccagggaggcctctatccctttggccagagagaggatgatgggggcagtaatcctctccttccagtacctcccaatctccccgaagacttccctggtgtccgtggacggcagcccgttgatgacaatgtcggcgtcccagacggcctcctggaggttggtgacgaccttgagcgggcagagcggcgtgtcgatcatgttgaggcagaagccgtccctgagtatctcgtcggcgtagagggtgcggtcgccgaggcggccctcgacgtacttgaggtaggcgcagcggcggatcaggcggcggaggacgtcctcccgggcgttgatgacctcgaagaggtgctcggcggtggcgcggtcgacggcgcggcccgggcggcgccagatgcggacctgcaccttgtcgcggaggtgtccgtacgcgtcctgcatcagcgcgcagaagacgctcccccaggccccggcgccgacgccgacgatccggagcgggtcgccgtcggccttgcccagcaggcgccgcagctcgtccagcttctcctccacggtggccccattcccgtgcccgttcgccgccgccgcgcgcggcgcgtcctccgccccgcccattgctccctcctccacctctccgccttcccttgtcgtcgctgcaagcaaaatcgagcaggcaccggagagcccaacggcacacgctacataaccgactacttaattacggggatcggcgagcgaacgaa

SEQ ID NO: 26827 - DNA, 1776 bp, Oryza sativa
gagcgcgtccacccgaaataatagtgctagtagcaactgtagcacaattcggatgtgtactgtgtaccaagaagcattaggccatgaaaattggaggacactttagtagaaagacaaccgggagacaatcgccacgtacgagtactgttcatggccttagagtagtgctaaccagcacaaactgggatacgctgtaccaagaagcattggcgtcaccatgccacggggaaaaaagaactcctttccgtcacgttactgatagtgacgacagggagcaacaaaatttagtgacgcgtacatgcctaccttccccttgcgtgccaaacatgttccacgcacaggtaagaagctggggatttgttcaacacaaaaatcatataaaagaacttgaatgtctcatctcacttaccacggtagcagctactcattgatatataattcacacttgtgagtcgtgatgagatttaagcggaaaaaacgcactacgattttattaagacaatcagaaaagcatatctccccggatcacaaatgtatcttaggaagatcaccaatgtattttaggccttccatccacagctacaagcaaccttaattatggactacttccttacttgcattaaacataactgtgcatcacattgcaaaaggtgattttatgaaatgttgactacaagttgcctggcaacccaaggttatcgagtgtgctgcctggcaatgaggtgatggtgatacgccaacagttcaaatatagaagggggcaacggaacttgctacaaatgacatgaatacaataaccacctccctatgctgcaaaaggacaggaccaacactggtggttaaaacttgagacggtttcagtatttctgctttcctgaataatgccaaaagagtgttaagaaaacctgcaaaacggtaagtagagtgtattcttgttacttgaagggtgccattatcctcctccgccgttttggagtctccctcttcacatacatcttctccatatcgtttagtgggcggcttgatccatcaggtaaactggcgaacttccagccacctccagagccccgctttgactgcgctccaagtttctcaaccatgtaggtccatccatcgtcgggccgtcgtcggctgtacttatgacacttcacctcgcctgccacctgcaattcaaaaaaaaaaaaagaaggaaggaaggtcagaatcctatcactcatcacttaagggaaaacacagaagatccattaagatggtcagtaaccaatggaccttaagtctttaaacatcatgtattttctggctcatatgcatatagcttggcatgaagttatcttacacagaagatactccatagcttcgagtgttttatcttccaatacaaaaggaaacaaattccaacaaattattatcatgggtctcccatgtttgcctttccatatcaaaagagaacatcaaattcactaatcactacatataaacagcaggagctttaactgagacttaacaaaaacaaagacaacactaccaaattatttaattaaagatgatgaaagggagaaatagaaatgtaagatcctcaccttcttcttgttgaactgtaaccgttgaacaaattcctcatacagcatctgatcttccttcattgaaatctcatacagaacctcatcaggatctctggttgtgccatcccagccctcaggcataactttgaagtcaggtttataaggaagtgatgcaacatgaaattccctatcatgggaattgaaaaacctgcat

SEQ ID NO: 26828 - DNA, 716 bp, Oryza sativa
ccctatggtggttcttgttgaagttacccgggtggtagggacggtgctgccggataatcatggtggaaggtccaccgtgatgtcccatcgtgaaacgaggcttctgacacttcccctggggagtcctgaactgggctgccttcctcttacggttcattttgttacactgctcctcttgacggatagccttgtccacaagcttctcaaagtcctcataatctctagagaccaactggttggtcaattcatcatcaagaccagacagaaacttctcctgcctctcggcatcggtacgcacgtcctcaggggcgtagtgcgcgaggcggttgaactcatgcaaatactctataactgttctggttccttgttgcagggaacggaactctctcttcttttgtgccacaattccctcgggaacctgtgctttattgaaactatgacaaaactctgtccaagtaacttctgccccagttggacgggtcaccatgtagttgtcccaccaaatagaagcgggaccttgtagctggtgtgtagcaaaagcaaccttctcctgctcgttgtattgcaaaagattcagcttcttctcaatggcatgaagccagtcgtgggcctcgattgggttggtggtgcttgagaaggtgggcggcttgacacgaagaaattctaacagtttggactgaggaggtggaggaccaaactgcaggttctgctgctgc

SEQ ID NO: 26829 - DNA, 841 bp, Oryza sativa
tccactatttagttaagtactcccgttgtttcaaaataattttactttttacccatacatgccaatacaaaagaaaataaatagaatacccatactttatcaaaatacaattattatctactttatctatttccaatacaattattgtatttttttactttcacaaatcccgatacaattactaccaaaaatgaatttattttgagacaaacggaaaagctaaaaaataaacttattatgagacggatagagtatttggcttgttattactaaaatatgtcaataacacacataagttatacaaaaaaaatggcattaccgacgtttcagtaagatgccaaaattcgattgtggattgatcaccagatggaatatcccgtgtacgctttccactgtgcaattagcaaatctggcaccaccatccgttgctcatcatctgaccttttcctgagtggataatcatgccctgcacttccaacttccagcacaccacacaattcaagtattcaacctccttttcataagcagaagtatctttgtcacactctactactactagtctactagcactcctaatgatcgatccttcccacgttcgaagcttcccctgtcactgtccatccatggtggtggtcagacaaccccagcacacaagaaatctgccatttgcccagtccaccgctgggttgcagtttttgatgaagagattgacttgacctgagcacccttccgattgtaaatagcagtttttgtattgctgttggttgagtgattgggcaatcatccaatacatatcttggcttcttggctggactccagtacccgaggtcgcgtgcctccg

SEQ ID NO: 26830 - DNA, 6251 bp, Oryza sativa
ttataaatttttcaaataagacggacggtcaaacgttgaacgtgaatagtgcaaaactgcacttattttgggacggagttagtacatatatatacacattacacattgcatacataaacatacaaccacactgccctctagctatacacatgccatgatgccaagagccaatgatcaccacccaaatccttctagcaatagctccctatggcacaaacagtcacagctgcacaaacacacacacacacacacatatcacccattcatctactctagctaatctaaaggcactagcatagtactacaatcaaccagtagtagtagccctcatttgcatgtttttatttcgcccaccaatccttggaatgttttagattcccccctctcactctctcatcaaggaatgagcatcccccattctcccccaacccctcatattttcagtttctcactctacctttcccctcctcccctagctaacccctctctctttctctctctaaagctccaatctttctacctttctctctctaaaagctggagtagcttaatttctttctttctttttctttctcagctgggattgcacagtgaagctagggagaggctatagctatgggggtgatgtagctgggcagtgaggctagtgacaatctctctctcacacacacacacacaaaaacacttgtgtatttttggcagatgatgtcctgtcaaggaagctgcaattgcaagcccagatgttggacgtgcacgctcgccctccctattaaacccgccctcctccgatgctccctctcctcctcccccctcgccgccgccgccgccaccttctccggcagctcaccgtcgttgtagtagctctggtggtggtggtggtgacgacgacggctacggcggcggcgacggcatgctccggtcactccactcctcgtcgtcttctgacacggataacaacagcggtggctgcaagaacaatggcggcggcggtggcgaggccgccgccgccgttgagggtggcggtgatcagcgtgccgttgcggcggcggcgccgtcgacgcgggacttgctgctggcgtgcgcggacctgctgcagaggggggacctgccggcggcgaggcgagcggcggagatcgtcttggcggcggcggcgtcgccgcggggcgacgcggcggaccgcctggcgtaccacttcgcccgcgcgctggcgctccgggtggacgccaaggccggccatggccacgtcgtcgtcggcggcggcgcggcgcggcggcgtcgtccggggcgtacctggcgttcaaccagatcgcgccgttcctgcgtttcgcgcacctcacggcgaaccaggccatcctcgaggccgtcgacggcgcgcgccgcgtccacatcctcgacctcgacgccgtccacggcgtgcagtggccgccgctgctgcaggccatcgccgagcgcgcggacccggcgctcggcccgcccgaggtccgcgtcaccggcgccggcgccgaccgtgacaccctcctccgcaccggcaaccgcctccgcgccttcgcccgctccatccacctccccttccacttcaccccgctcctcctctcctgcgccaccacggcgccccaccacgtcgccggcacgagcaccggcgccgccgccgccgcctcgaccgccgccgccgccactggcctcgagtttcacccggacgagacgctcgccgtgaactgcgtcatgttcttgcacaacctggccggccacgacgagctcgccgcgttcttgaagtgggtgaaggccatgtcgcccgccgtggtgaccatcgccgagagggaagcaggcggcggcggcggcggcggcgaccacatcgacgacctgccgcggcgggtcggggtggccatggatcactactcggcggtgttcgaggcgctggaggcgacggtgccgccggggagccgggagcgcctcgccgtggagcaggaggtgctgggccgggagatcgaggccgcggtggggccctccggcggccggtggtggcgcggcatcgagcggtggggcggcgccgcccgcgccgcggggttcgcggcgcggccgctcagcgcgttcgccgtgtcgcaggcgcggctgctgctccggctgcactacccgtcggagggctacctcgtgcaggaggcgcgcggcgcctgcttcctcgggtggcagacgcgcccgctgctctccgtctcagcgtggcagccgtcgtcgtcgtagccggcgacgaagacgacgatggcgacggcggcggcgaccacgggctagggtttgccaagctcgattgatcgatcgatcactactgctcccatatataaatagagaatatatatatatatattatatatgaacatttgcatagatgcaataatattggctactcgatctctagttagcatgcaagatctcatggaggttttgggaggatgtgaactagttgggtttgcaaggaggaagaaaccctaaccctagctagctgcttcattaattgctgttaaatctttggttgttttgcttgcttggctagttaatcaaaagctgttaattaatttcgatcctgcaatgggatggagaggaggatttgagaaatgcatcatagcttaattagcatgaggatggcaatggagtttgaagtgatcaagaacatggtgagaggctactactacgtactagtaccaattccatgttttttctctttttttttccatttttttttgtttctgcatgtctcactagttcctgttggagatttacatagttctagggagattttgtctatatgttggacctaaatattgcactactattaatataatttgttaattttgatgtgaggatttgttgctacacatattattgcttctatatatattctcagtgttctattatttatttggatctgtagatcttgcaaaatggatcatatccaccatgcatgcactttttctatgaccttcatgtttttttagtcatgtgtgtgtaatattaatttcttaggcatggaggccaggaggggatcttctagctagcttctatagctcacttgcatggcctcattttataatcctacatttcacttgcttgttggtgcttgatgcccttgttagtattataactaatcatgcgttctttggccagcactaaccataaactaatccctattttgggaggttgtttatgtgggagtaatgatcactcctgtagtgttgcaacttgcaaaggcaaacaaatcaaattgtatatatatacagacaggttttgtatatgatgctaattaatacacctagctatagctagtgttttctttttcttctaatgtgctcttagggagaaattaaagaaaatgttgtgtgtctcctctcctgcccagggagaaggggtttgggggtcttgttttctgtgacacatgcccctgatatgctggtaagctgtctttgtgagggcatggcatgatcccatgcatcaatgccaccctaatccctgccccctgtcccctcaaacaaaatcatgggatttctcaaaaccaagccaccccttttggtggccaacttgcccccttaatctctctctctctctcatatatgtggttgcaagagtagtttctctctctaagagtgaaaaagatcattcccttttggaaggacccatgttcctctctccattgccttgggatctttgcatgcatgccttcttaattggttcctcaaagagagccatgccggccatgccctacttgattccctttggttgcctgtctctcatgttttaataatttaattaagtatagattggtacctcttcttttatatctgttactaggcagttgtttttagagaatttttgtgtgaggcgtgtggtgggtatatatgtctgtgaaaaaaatatataaaaccaatcacacttgagttcagaaaaccaaatcataaaagtgttttattgttcgttaggagaggtgagtttatatcatatttatcttcttaataatagaggtaccacaaattaacaatagagtggtataccatggtacaacaagaaccatgaaaagctcaaatcataatgttgcccttttgttataattcaaatcatcagttctttatgtgatcacttgttgactgctttcacatactccagcctttccctattaaattttgtcatgatttttcatgaatggatggattatcaactagctatttttagatccgatgtaatctgaggttcctttggggggcataacttttgatagaaccaaatctagcaggtgtggtcaaaacattaattttgagataattaattatatataagcatattggttttagtagtagtatatatagcatttcatgtcaacttgttgtacaacttactagcgatagtgaatagttgattagacatatatgatataatcgataatagtatattgtagatggatgggttagtggggtacacgttcactatgaacaaatttgcatcgaataccttttactgccttgatatatttgtctgaaatcttgcgccagtgtaatgtggagtcgtatatacttgctactatataaattaaagaagatattgtagtatgcttaattaccggcagtaagattaattaataatgtatgggcccaagctgtccagctcaatgccatcagtgggagtgtcaaaccttatcttaatttcggtgcatattacaattatgctgaccttaatcttcctcgcacacatgctgcattgcatcatcctcacatctctttgactttgattaggctataaacaattgattgtagcttggtattttaacctcatcaatcttttcctcaagaaaaagtgacattgactgatatgtctgcagtcaggccctagctttctttgccttccaaccaatgtgtttggcataagaaaaaaaaatcctactactacaatgcctagtattctactacctcctcccataataagcgcagcggtgggtttcagtgcccaactttaaccatccgtcttatttgaaatatttttatgattagtatttttattgttattagatgataaatatgaatattactttatgtgtgatttaaattttaaatttttgttcataaatttttcaaataaaatagacggtcaaatgttgggtacggaaacttatggcaacatttataatgggacgaagagagtaatgataacatagctacattcacaatgtactgtaggagtatttgtgtttgcatggacatggcatcttataatcttttattcctagtatatgctgccccagctatgcactatatctatacgcattccataccataggtatatatatcataattaacctaagggagcatatgtaatatcacatccactccaaactactcctagctaggagtatgtactgcctacctcttgcttactctacttgccttccttgtagaacacctacaaaaaaaaggtggttcaagaaaacattttttttccttgtaagaaactcgaattaatagcaatgcaacaaaggtaagtgtgcggtgcagcacaaaagtttgttagaactgtcgtcgatcgatcatgtagctaggccttttgattactccctggattttgcgagagtttataggggaatctcttcaacttagtaactttttggagaccgatgttacatgacattcagcttcgtcaactccaatgaatctcatctgcaaaaatttttgtcaactacttaccggaatcatacgactttgtaatcttcctaaatgattgccatcttactagctactactaactagctagcatatatagctatcgatcacaaccaagctaactatagatcgggatcgctcaccagattcattaacctttttattacacatcctaatcaacgcataaacgttttcacattcatatatatgttcaagtgctatgaattatacatgaagataaatattgcgcgttgattttcgtttctttgaacatgaatcgggggggggggggtgcattcataggcgtgtgagtggatgtagcgtgtgcagtgatgtgtgtacatgtgcatgtactatgcaatcaaaaaaataatactaggttcaagctactccatccgtcctctaatataagggattttgacattttgtttgcactgtttaaccattcgtcttattaaaaaaaattgaattattatttattttatttgtgacttactttattatctaaagtactctaagcacaacttttcatttttatattcgcacaaattttttgaataa

SEQ ID NO: 26831 - DNA, 12224 bp, Oryza sativa
  unsure (1)..(12224): unsure at all n locations
ctgtaacttgcatataattacactgtaacaatagtgtaacttgtatgtaactttcaaaaatctctctgtaatatgttatttcggtaaaatggaggttatgggaacaaatccttacacatatgtgtgtgctgtgatttttttcttcctcaccaaaacaaatcttgtaatagatttaacgattcaaaattacgtgaaacttatatacaagttacactgtagttacatgcaaggtacagtgtaattacatataagttacagtgtaattacactacgattgtactataattacatctgtcaattttttaggagaaaatttatcgataaatatatagctggtcccatatttttatatatttttttcttttaggagtagctaattgaattgcatctcctagctagatgtcacacgtgttcttcgtatcattcattcatgtgtgtagagtgtcgaccctgtagtcctgtagcaggcattggatagcagctggcgcctggcacccaaaacaactatgagccgcgtcagttccaaatccatcagaaccgttggtgtccaaaaacactaaccctagttttacttttcctctcccctcccctcactatgagccgctctacctcccctcccctcaccggatcttagccttaaaggaagtggcgggcggcggcgacacagctcgaccaaccagccccagcgccagcggccactccgcacccctcatagtcggatctgaccttagggaggcggtgtggagctcgaaggccgcggcggcggctgaagctcgacgatagcaaactcatgccgctcgtatctcttgcgagatatggtagctagatttttgttcgatttgggttttctttttctttgtctgcctttatcaactcttgtatttaggatctaattcaagaaaattttgtaaccaatttttgtatgttgtatatgcaacttctcctggtgtaatactaactgatttaaattttttgtgttatttgatatggactctgaatgacttttgtgtgttggacttgggatgccgcggatgaaaacatttaggtgaggacgttcaatttttattaggggcaatgtatcatgtgcacacatgcactcatgcaacggcatccttccgatctcaatccaaaggctagcatcatggttaaggaattttgcaaaaaaaaaaaaacaaaaatccctgacgaggcttttctcttatctcatcttcttatgtatcccaaatcttcatctctatcaagcaattgaactgggaagccccagatctggaacgagaaagaaagaatcaagcagcaggtggcgtacgtacatgttctattgaaaatcaaatctctaatttctctcatctcccgaactcgccggcctttttgtaggtggcgccgatggtagccacatcggcagtggcggcggtgcagctgctgctgcatggctacggaagcatcggcagcggtggaggcgccggcaaccagaaatcaagcacccacatacataatatgatatagggcctgttcactttgatatcattttcactttgataccactttaacaccttgccaaaattttagcaggtaccaaaatttggctgcaaactaaatgtagccactttttagcaactttactaaaatttagtaaggttaaaaatggtagcaaagtgaacaagcccatattttacatctaatattaaatatattttagtactatattacttttttataaaatatattgaaaagaaggaagtttcaatttaaaaaattaaaacatcttgtaattaatatactcccccatctcctaaaaaatcaatctagtaccagatgtgacacatcttaatatatattcggtactatgttagttttttttatcagggcagagagagtaaactactcgatcgagtactctttttcaaaaaaaaaaaggtacaaattgggccaaggtatatgtagcccatgcatgaagctactccgaatcactttgagcatacatggatggattcctccaagcatggagggggagagagagagggaggtaggtagctaatgatcgatggatggatggatcgaaaagatcaacgcagagagagtgagagagatcaggctaagctagctggagtagctctctagacgcagatcgagatgccacgctatctatcttagctagggaaggaaagaatatgcgttagtgtactagtactacgtgcatatgcacgcacgctggctggctggctctctctctaggttgcttgtgcatctcgcacaaatatggcccatccatgtggacgatgtcatgtaacgtacgtacgctgtccctccctcccttccccccactccgttcaatcaacctctatagctacgttgtagagtaccctgcctagctgcacactatgcccaaatcatttacgtcccaaaatataagtattttttaagttagcacgggtattaagaaagtaggtgagaataattgaaaaatgtgtgtgattggttgaaaaaagaaagtaggtgaaaaagaatggttgtgattggttcagaggagaaggttggtagaaaaatagcttcattttagaataaagtactgtgctagaaataactacattttagggcggaggagaagcttgaaccccgatcgagcgtaggtatatcaggtatgtttgcaagtgtgtttgctactagaatattcttgtagcgctttgccaatttcaaaatatacccatatagtctttcgaatatgtgcgtgtgcaggtttataagagcatggtcagccgttttccctaaacatctctctcccaatattaaaatgagggggttttggttgaaaaagtcgctctccaacgatctcgtaataatctatttaagaattggagttccttctgtgatggagctaacgtagttgtcctccaacctggatgcatggctaatagcatttcatggcaatcgctcaatttttgtacatattgatggtagtcggtaatggaggcacagtgacagagcccagatagtcggccaacctgctcaagagctacctccgttactaagttcatttccccatgaaagtctcactctccacaagtcaaagcgccgtgctcgttcccaatcaactctctaccaaatcaatcgcgcgaatgcaggatgaggggaagaacagtttattggtagtttgggggtagctcatatttttatcttagagtcaagctgatttcaggctatctgttggagagttattttaacatttgtgattggaattttgagaaaccgttaatcacgctttaaagatgtgagcgtctacgcttgtaccacgcatgcatgttccgttcgtatagcatattcttgtagcatagtatgcatgcgtgcatgcatatgtctaccactgcacgctacggcatcggccaccgaccacatgcaaagcatggatggatgcagaaaggtgttgcagctaacgctacatagctggagtagttgccacgacgacgacgacgacgaaccgatcgatcgaaacgtacataccggccggccggcagctagcacgcaatgaagcctcaagtctgtcgatcgtccagtacttgataggcttcagctaagctagctagacgacgacgacgcctagctatatatagagccaggcctagtagagctatagacccgtctcgctcgcctctgccaccatgccgtgtcgtcgtcgtccctgacatgatcgatgcatgcctgccccagccgcaggcgcgcacggcggctggccggccgaccggccgtacgtgccgccgagatgtttcgatctgggcatcgatcagggacgacgacgagacggcgcctcgccgtcgtccccggcccaataatccggccgacgtcgagtcggcaataattgggaagcacgcacggaagcgtccgtccggccggccgccggcgatggcagggcaggcggcgacaacggcggcatatactaccttcataatagtgcaactatgagtttctgtatccaactttgaacgttcgtcttatttaaaatctttttataattagtatttttattgttatgagatgataaaacataaatataactttgtgtgtgacttatgtttttaatttttttaaaaaaaataaataagataaatgtttaaagttggacatggaaaatcatggctatacttaaaatgagaccgatggaggatttgtttgcactaggaaataataaagcgaaaggaggggttacgcgctatgtacctgtgaattgtgatgacgagcagctagctttcgccatgacaaagcttgaagccatccgtagcttttttatcagatcgatcaccacgtgcagcagctagcaatgcaccatcgatcaaacaagaaaccgttacctacaatgtacatgcctgcacaggttagagagagtccaggtgaaatactacctccgtctcaaaaagacggagcactatctagcatgagatttgatatatatcatatacaaagattcattatattaagatagatcattcaaatgctatcctagataaaaacattttgagaaggaggaaataataattacatgcatatatacaaccacacaggctcattctgcttctaccttgtctttagtctttacaggattattttcttattacaaaacggagttacggaggcatgtccatcaggaacacctgccgcgcgagtgtgtatgtgggctccggggacgacacagaaagaaaacacgagccaagccaagccaggccaggccagcgccggccagccaacaagcgttgtggcgtctcacacgacatgtcacaacgcgcctgccttcctgccggctcggccggcggcggacgacgcgtcccgtcggcagctagcgccgacgctgacgttacagacagccctgacgtacgaatccatgatgcgacggacgcatatgcagcagagatcgatcatcgccgcccccgacacaatgaatataatttcgtcaatcatcacctacggtggcggctgtcgtcgccgtcgtcgtcggcggcggcgacggagacgatctcgaccaggtcgggggaaggtggtggcggcggcgccagggcgctgcgcggcgaggccccgaagtggtcgctcctgtaattgctcccctccgtcgcgccggtggtggcgccgccgtgggacgactgctgctcctccttcttcctccgggcgtccagggcccaccccgcgacggactcgtgcaggcccgacccaatcccttgcagcttgatgcctccgtccatctgggaacgccatcgtcagagagcagtaaaagtgaaacatttcatgaagtagtaaaaaaccttcagaaggagattgggagtttacacgagcgaattgatgataagattaagatgagaatttgatttttaatcccaatatcttgtttggtagaggtgatggatattgatagggagtttagttgaaaattaaatcattaataaaaacggatggctgagatttgcttagataaagtaaaagaggaattccctcccaattacctacccctaccaggtattgaaaaggagggagttccttcctcaattccccatccccatcccaccaaaattctcatgtctcccaaccaaacaaaacacttaataacctcatccctctaaactcccgatccctcctaaaaactccctccaaccaaacggaccgtcaaaagagagagttatttctggagcctacatgtgtaacgatggcgtatagtggtagagtgacgtagctgcagatcatttggatgagcacactgcattaaacagcaaataattagtcattatcaagacgactctaagtaatttagtagaactaagggcataaaaggtcaacggataagtaatgttccaactcttattgtgctagcaggactatgcatgtgagaaagaacgaatcttgcaggtaattcagaatttttactgacccaataacaagcctagaaatggcgtacaccttcttctccataatgcacgagtcgaacccgaatgttacctgtcgagtgattcctttattagctgcgattctgcgaagtcataatcattaaatgcttgcaattgaagtgggagagcgcaatggacaataccaagacccagatgaaaaaaccaatctcgaaagagttctggaacaggatgaaatggatcaggttgaggacaatttcaggtctgccaaaccagaaatgttccttcgatggctttacataaggagttctctctgttccgtgtgataatgatgccactgctgctgcctcttgagctaatcgggtaataatatgctctagctttgcaccaacaacaagcaggagctgcaattttactccattatcaggaagtgcctcattcagatataaattcattctatgtttacttttcaaaaataacagctaatgtagatttgagtcagaatttaaaagtagatgtctcaccaaaaaaggaagaattctaaagtagatagcaggaagtagagtatatgaattcaacggaacccatgtcaaaaggagaaagtttgacttacaaacagaggcaagaaagctaaccagaagtatgtatgccatcctgcattggacaataatcaaaggatgaagagcattacaccccacagaaaactattacaaaccttgctccataagagaactgataccactttctgaatcctaaagttgatatgcaaatggcatgctaattcatacaaggatagtagcatacaatgcagaaacaccatgttattcacaagccaccaatggtagtgttcaaataaagcatgtactggtaataataagaagataccatgccattttaatcatttactgtataccactatactggatccaatgaatcaaggggacatgtagactaaccgtttatattcagcaataggaaaaggatgacaaaaagccacatgtaccagctgcacacaactagctaatattaacgtcatgtacaaatttaagtcaaaggttagaactgttctatgaaaacaccaacctgataccaactactctcttaaagtcatgttcaagagcacgaatcaagtacttgtagaaattgaaggatggatgacttgggaaatgtttctgtgaaaacaaaagcaccctgttcgcttcaatagcgatgtaaatcaatgagcaaggcttgaaataaatgatgtgtcttaccaagccgaatgctgatctaagtgctttataatctgatttactcacagaatcatgaaactgcttaaagaaagcaatctgcaatatatgtagataaaagcttttagaaaaaaacaccttcgtaaagttatagatacatgaggcactactgaagacagtaagcaaacatcataagcattgcaataaacacatacatagaacatagtaggagaatggtaggaaacaatgtcttgcggaaagcatttaactatataataaagaatgtttactgaatgtattgatccaatatgaacatcagacatgtgaccactttgaaagatagcatttttttgcatactttccatactttaatggcactgtggcatgcaattcgtgcaatgatataatcattgcttatttacatcaatcatgatttggatcaacttacggccatggcagcatgcggatatccacattccaaaatatatgaaatgagaaagcacaaaagatttggcagatgacttactatccagcttacaacagccagcttcatccataacccctttgttcgctcactgacaaattcaccctgttgattatgtgcaatacgcccaggtgtagcatctcttttttgtactacaaccaatttctccaataaaaatgagatcattacacaacgaatgaaaatgttaaagtgttagcagcctagtgcttctaacaggaaaatggagacacgatcttttatacagaacttcctaatggtagtaactagtaagtctggaaagggaataatcagagcgtggtgcattaacatcattaagaaacactgcaaaaattggacattccaatatgtggtttatgcatgtcgtggtgactgccttgttcatgaatgattaatcctgggtatcaaccaaaaagaaactaatatttgaccaaaggaattgctcatcagtaagtatatctaaagacaaaaagggtcttcaggagaagtgggcataccagtgaccaaactgtacaaccaccccactattggaatttaaacccatttccacttgtttggcataatgcaaagtgcttatttggttaagccaatggaaaactcaattagcaaacataggttataggtacaggcattggaataagcacaaatccatttttcagtgtagtatagaagcattacatccaagcatattgagctatcatgctaaagtgctctgaagccagctcggtagaaanaaaggggtatgtgaccaaaacgcataagtcataacttaacccacatataggttatggacagacaatgatgcaatcatgcagtcacaattaagaaatttatgaaactgaattcttcctcctatggtaactgaatttcagtgacaatgacaatggttaaaaagaaactgaaaggtgttcagtcgcatgcaaatggcttatcaatatatgcttatgccttaaaacaccttgaaaccaaaggatggcaggaacaagccagtgtgaacaactaggacaaaatacaaaaaacatgggaaaacataagctgaggggatgtgcaaggttacagagtatgttctaacttaaatcagtgaaggtaatactatcttgtgaaagctgaccctttctacgcttcaatatgcattcaagaaaattgtgtatctttatcttttataattatattttattttggaacataagttatttaaaaacagaagcaaagaatagggaaataacacacacatttctgttgcatttcctgttggatttctgtctcccaaagcttccattttcttatctacaaagtttaaccaggcaaagattaatcaatggaagcatggtcacatatcacagagacttatctatgcagatataccttcgctccaccaagtaatattgttgtagcacagaacacaacatggaccaaaccaagtataaatatgaagatgtgcagctgatgcaatgcctccactgataacaaggggaacttcaccctaaaacagagcaaacctgttttgttacaatgtttattgaaacagttctgcaaaacaaaattggcacaaggttttgctaaacaacaatgtgtaatttgtatgccagaatggaatttcaaacatcatagaaccaggcatccactttcaagaaacaatttcccacaaaaaagttgcaagaaaaacaatcagatactattttcatttccaagaaaaggaatccttaatattcgataatggtgtatatccctaacctttttcttgcaaagcttaacaccttctgaaagctggtaagtctctttcttgcatggaagcatcaaatgcatagcattttccgaaacacaaataccaacaatgaaaccttcagagaggctcaggacgaaggaaatgaatcccagaagcattaactctgcatatgtagacactcaattagataagacgttaaagaaataaaattttaaatgaaatagcataaattttgtgaaatacaaatataccgtaagcagctattttgaatatttttgtttaaccaaaataagtgaaattctacaacagatgtaccatgtttatatattgaagtccggttaacaatatcgaaaataagcaactgaagatattcctgaatgataccttcttttagtctctcgagagctgaatacaatgccttctgatctttatgtttcaagaactgtatgagcaagaagaaaagaagaacttagcagtttcttaatagcattgtcgaccattattactaagtcaattcaacaaatgtgttgagtattaaaactcatattgaatattgaacaatgcactgtattttttttaatgggaaaaaatgaaagttaagctctgactgttattgtttcaacagaacataaaaagtttgctttcttagaagtccactaacataaaatacccagtaattaaatcaattaatagaagacacgaacaccatcatttgacgcctaaccagaagagctaactgacacacagcaaggaaacaagggagcgaagttaactgggtcaaaggaggataactatattgagccaacaatggaagtgccttgccaaaaagaaaaatgagattatgcatagcatgtgagctatcaccttacctaacaatgaaattatttgtattggcaaactgtctggtcctagaaaaacggacgagtgtgcttgtgtgatgatgctggcaggaaaaatgttgtgtctgtcaactagtttgtcagcttaggatgtgatgagattaatcatacaacacatttggccataaccatgtagtactaaattactgtgcattcgtagcacagcgagaaaaatccatccacagagaagcgaacatctacacggctagctattccaactgagcactcaaattctagctcctcaatccagtaaaacaaggccatatgtagttgcaaacaagttaaatatccatccaaaaccagcccgcccttatgttgctggaaacaagatgaactcgattgcgatggcgtcaccagttcatcagccattattatgacttagttacgagacctcgattcccgcaggggaagagaagagaaatcacggcgagcgctcggatcggatgcctgcaaacccgaatttcctgatcccccaaacgcgagcataacccacagcgcgtagcaaatccaccaccgcgtacgaatccaacacgaatcggcgggtgcatttggagaggcgagagcatataggggtgggataaaggagggaggaagggaggtgcgcgtgccttgccgaggtggtggaggaggcgctcggcggcgagggagacggagacgatggcgaagcagacgacggccaccacccaggtgggcgtgtgcgtgatcgacgactcctccattctcctcctcctcctcccctcagctcgcgcgccgcggcgtcgtcgtcgcccctcctccggaccatccgcacgcagcgtgcagctccgcgggttaaaggggggcggaggcggaggcggcgacacggaaggaatcgtggtggcgcggcgcggccatccccgcggcgtgagcgtgactgccccgggttgcttgccggcggcggcggctggattccatggctccagcctagcgcgatgcggcgagtacggtggcggtggaaggaaagctagcggaagagggaggcaaagctttgcttccaccgccggtctcgtcccctccacgcggcggcggcggcggcggcggccaacggctaccacccagcctctgcagtttgcgtgggccgggggtaggctaggcccatcaagaggctcagaagctataaaactattggaaataagtccactttgtgtcccttaattagtggctgtatctgattcatatatgtgaatcacaatgccgatatttgacccctaagtattaaatccagtgcaattaaatcgggttaaaaattaaagcattagtctgttaatccttttttttaactcccaatgcatgcttattttggtggagctataattaactcgtgtcgtccttccccttcactgacttgacagccacacatgtcgctcccaactcaggtatttgtatcggagggtgccggtatttgttaccggtccgaattttaaacaaaattttatcaaatttgaatatatattgccaaaattcatggaaaattaaaattttcggccgaatgataccgtatcacgggttcgaaattttgaagatagcctcctcgctatctggtgatctggtcaagcgagagcgttctcctgaccgtgtgaaaatagtttttcactatacgatatccaggttttcactacaatactttcccagtaatctatgcacatgtacaatttttataagtacatataaaaaattcaaaacttttggtgatatttattacttcctctgtctaagaatagttaattttaagccccttccatcttttatagaataattttatcttttaaagtaattattatatcatagtttgtgaaagtagataataaatatattgagaatatataagaaaaaataattaatttaggatttgataaagtggaggtattttaatttttttggttttgtattggtatacatagacgtaggatgagtgagaaatgaatttatgtatagtatatactccctccgtttctaaatatttgacgccgttga

SEQ ID NO: 26832 - DNA, 26376 bp, Oryza sativa
actaatgttgtaatgcatgccttgccggcatcatcacacaaatggaatacgtaggcatgcaattgaggacctaattaacattgaccaaatcgcaatacatcaatccaatatatatgcattaattaactactccgtactagtttactatactcgctgcgtcttggctacatattggtgccaaaacacctgccaaattgcaaaactttacacgagaccaacccagcgacgagtggaacagaagctaagagcagattgaatagcacactctataaacatatttcgaggagataagagaggagagagaagagcagtgggctacagatttatagtcagctgcaacacggactccaagatacatgtgtgtatgataggtggatccaggtattaataatgtagtatatatatgtttatatgtaactattatatgaattagctattaaattgactaaagataatttagagctaatagctggctatactattaaacttgttctaagcacgaatgcagcttgtgcacgactgcacgcaggtaatgcccacttattaatttgaatattctgataagcaaatgataaggttttataatttcgttacacacaaatctatcggagaaaagaaatgacatttgaacaatttttgacaaaaatttgaattttcagcgaaacggtttcgtaacgatggtctgttcggttgaattaatagtttcgtgctgatggtctaaatttttgaaaatttcaaatcgaatttttttaaaaaaattatgtagcaattatctcatatatggggagctgaaaattctttttaaaagttgcagctgctaccaagctgcaaaacagagccctaagagcaagtttaatagtatagcccactgctagctctaatttatttgtagccaatctaatagtcaattcattcatataatagttgcttactatacaattaatatatggtcacacctgtcatacacacattgtatcttggagtccgtgctgcagctggctatagatctgtagcccgctgctcttctttctcattttttatctcactaaaatatgtttgcaggtgactaatagtctgctattgtacctgctctaagggagcggcaatatggtacaagcaccccggtgaacgaaaaacctaacatatgcatttgccatgattgatggagtgtcgtgcatgtacttttttttatccaaattaagtgtacgatatatcaatgtatatattgatcgcttttgcctacgttagatgcgccctagattcgtcaccatccataaagccaatggtgccctttttcgtcacttagaaatttgcctattattttttttaaaggaggacaaaagctttgccacatatattaatagagaaggaaaaaattatacaaagtatgtacatggctagtcggagaagaccggcccgcaagagagaagttcgttaggtgatatcttccaaaattccgaacttctgcagcctagccgttccggctttgactcaagctttgccttcctttttgacctttgcaagaattgaggccggtgttgaggctgtacttcgaaagatccttgcattacgctccccccagatctcccaggtgactagcatcagtagcgttcgcagaggggctcttggggtgctgggggattcgacgacaaggttccaccaatgttcaatcgaggggcagtcattccatttgtccatttggaggtcagtatgtgtccatctttggatttctgcccaaatcctcttagtgactctacatttggccagaaggtgaaccgctgattcgtcgattgtgcggcagagggggcaaaccttttgatttcgctagcctcaattccccaatctgtcagccgtccatagcctattctgggtagcaagccaagagaagaatttgcatttcggcggcacccacgctttccaaatcgattggtagaaaacggatcttgctgctcccatgaactgcagagatgaaatatggatacttcagtcattaagacccacacgtcagtgagacataacacgtaccactttaacacctaaacttaaacatcacaagacccttaagaaaaaaaacttattcatcacaagcaattaacccttcaattaatttttcagaagagaaaaaaatgaatccaaaagacctggatgatgaagggtaaaaccgccattgacgtattgaccactacatgatccaaatgaagcctatgttagctagtgcatgttaagggcatgtgggcatgtttatattgtagccaaaataaactttaccaaattttggcaatgtcaaaattttggcaatttggcaatatggccaagttttgttaggatttattatgtatttaccagagtttcataaaaaaactaaatgggtgcacatatttgataaatttaccaaaatttggtaaggtttatttcgactacaatctgaccaagccttaagtgaccacgtagttttagtgtaagtacaacaaagtgatataaacatattgtaagagtttttatatcaaatttatgtcaagttaaaaagaaaaaagtagctacaacagatttacaactagctgcagtataagctccaatcaactttttatgaaaatgagttgtactatagagaaagtattatatacctaaggagacatcccctcgtatattaaaaactatccaaatggtcatagaaagttctttaaaaaaataacaatattcaaacaacatatttatgccacatcacaaaatcttaactctaaaatcaactcacgtatcgagatataaagaacaaatctatgaactgtattttgcactcaaatttatctctttatttttctcaatgtctaggcgattaatttttttaagtaatagatgtcactatacttataacattattaaaataatttaaatttttctaataatcatttttctctaatcaacattggatttaagtgataaaggatctgtttagattggtgccattttaaaccataccgttgtttggtaaaattaacaaatatatggttgcatttagtttgttaccaaatattggtaatgcatagaaaattttggcacaacatatttattccaacatatcaaaatttggcaattctatcaatttgtcaaaaatttggtattgtcaaattttggtaaggttattttcggaactaatctgaacatgccgaaaggtttagggtgaatacccaacgtgatccttgaactttcgcttaaggatcaatttagtccctgacatttcgtgttgtccaaataagtaccttaagttcattgtgtgattcaatatggtccttagaccctctaaacatgccatgtgtacatgccacatcatctatgcatgcaaattcaatatttaaatatcctttacacccttatgttttcatatgaaataaagaaaaactattgagaaaacacacaaaaaaaagcttttgaccattggcaaaaatgtgtagtaggggtgaaaacggttcggaatttttccggattccggacctgttttcggaaacggaatcagccggtcgaaattttttcggaatttctcggaaacggaaatattttttcggaaacggaatcgaatatgataatagcagtttccgtcggaactcggaatcggtcggaaaaaattccggaaagtttgtcggaatttccgaagttaaaaaggcccatccaaatagtccataattcctccagcccaacccaagtccctactaaccgaggagacaggctaaccctaggatagaggcggcgcatccaggaggttgagtcgagcacgccaccgctggccgccgtctcgtcgcccttcctctctcgctcattttcgccgccgccaccaccgacgatgacgccgacgacgccggccactggccacaccgccgacgccggccacaacaccacactgccgacgccggccacagccacacgaccgacgacgccggccactagccacaccgccgacgccgccgacgcctcgccttgcaggcagcagcagccagtagcccagtggcagcaggtgttcctgcttctgcttatattatgttctgttaattttgtagaagagaactgtattattaatatgttctattgccattcaccaagcactccaataaagacagactgctagtatgtccagctaaagacagacggtgttcttgagcctaaaccgttgatttgatttcttttatcgtacagatttgtgatttgaactttgttttgtgatgactgatgaactatgtactaatggagtgatgtgttatgagattgaactaagtactgaaatattgatgaaattatatgaagttatagaagactatattttgctgtgaagctcagtttgagtggtttctgtattccgataaattttcgttactgtatccgcaccggttcattttcgctccattttcggtttcgataatattcgtttccgttttcgtttccggggtttccgatttcgattccgattccgaaaaaaatatgaaaacgaaaacgataaaggttgtttccgtccgtttccgtaccgttttcacccctactgtgtagcattgatagataaaaaaattaatattttttgttttatgattgcttcttcttgtttttcttttctttatttgatagaaaattgaaggttaaaatggacatttaaatgcacgaatgacgtggcatgttcatgtggcgttttaagtggtctaaggactatattaagccgcatgataatctttagggtcatgtttagacattataaaatatgaaggactaatttaacctctgagcaaaaagttaaagtactgaactgactattcacccaaaggtttacgagggaatacttctcgaggatcagtggtggattaactgaagatgagatgctctacgtcaggtcaacatcggtctttgcttgtagcatcgttcattccacgctggtagtggtactatcttaagctagaaggccggccatctcgtggtagagacgtggacgcctctgcccttgtgtgcccctcagttgtaatccaccacgtctggctccgtttcagcctcccgttgccctatctatctagttatgtaagctagagctggactttgcttgtactccctccgtctcctaatacgagggattttgacattttttgcgtataccatttgaccactcatcttatttaaaaagtttgtgtaaatataaaaaacgaaaagttgtgcttaaagtactttgggtaataaagtaagtcacaaataaaataaataaaaattccaaaatattttgaataagataaatgatcaaacagtggaagcaaaatgtcaaaatctcttatattaaaagacggagggagtagcatatactatttcctgtctgtctccactgaaatttcgtgagatttcagttttcaaaatggggcctagccatgcacgttcgttggcttcttgcaagcactggatgatgttgtccttgtccctgagatgctgaattctaaactaatcacgcattgcttatcttattactacctccatcacaaaatgtttgacgccattgactttttaaaaaatgtttgaccgttcgtcttattcaaaaaatttaagtaattgttaattctttttctatcatttgatttattgttaaatatatttttatgtatacatatagttttacatatatcacaaaagtttttaaataaaacgaacggtcaaacatgtttaaaaaaattaacgttgtcaaacatttaggaaagaagggagtaattctcaagcgtcaagcgtgcacgctgagcttcgttatggcgttgaagattgctgcacagtagcagcagacagagaccttggtcaatcacactacagtccctgtctttacagctagcttgtggcctctggcactcatcagtgaggattgatcaatcaatcagagccttccctttctttttggcttttctttcctcatgcgttagacagcggtaaaggttcatctctgtagattctctacctgactatccgttacttcctccattttatattataagactttctagcattgttcatatttatatatatgttaatgaatctagccttatgatttgctgaactgtgaaggaaatcacttaagctcgtctccccagctcgtctcttcagctcccagatctgcacctgccgccgccagagctgaccggcggctaggacagcggcagcggcgggaggggggggcagaggatggtggaggatggcggcggtccgacagcaggaaggcgggtcggcaccggcagccctagaggctacggcggcggtggttcccgtcggtgccggcagccctagaggctgcggcggaggatgacggcggccctaggggatgcggcggtggctcccgtcggcggccctagaggctgcggcggcggctcccgtcggcggcctagaggttgcggcggcggctctcgttggcgctggcagccctaggggctgcgatggaggacaaaggcggcttccgacggtgccggcggcactaggggctatggcggcggctcccgtcggcgctggcggccctaggggctgcggcagctcgagacagtggcagtctgtgcactttgacggtggatgcctaggattcgggtgaagtgtaagtcaatcccgtaggttcgatcgtgtttggttggctagttccgactatacggcgaatgacgacggttgagagtggggccaacaagcggcgcgtgacgtcaactctcctgaaactgatgaagatggcacaaatggaggtttgcatcgacggcgcactaggggcggcggcgaccggtagacttccactcgtcaaatctaggcagagaagcaggatgtgtcgaggtcgtttggttttcttttcctttttggttctgttctcctctttgttgaggtgtgagtctaagtactcatatccttttggctgtgtatatccttcatggatatagagggccggattaataaaaatctattatctaaaaaaatgttaatgaatctagacatactatatacctagattcattaatatctatatgaatgtggacaatgctaaaaagttttatagcctgaaagggatgtagtaaataatttccaatggaatggtaaaaggaagccatccgaatgttataagattattaagagaaaaaagatacaataaacacaatggaaggttgttgaggttggttgtgcaatacagtgtacatccacgaaccgagtcaaccacacaagcacaaacccctaaaagggaaatatagcaccgaatcgaccgccgctatgtgtggtcgatcactgttggatctataacaataccatagatcaaagtctctaaatacgttgtcttgtaaaagttacaacgttaacgctgtcgttgtcgcccatctaaggaactggacgtagttttcatatagagtttctcgccaaaagagggagagaaaggtacatgtgaaaatcactgtagaatctaacctgagaaggtgacaaaaggtagattctgcttgttcaggaactgacgcacaatccggtagtttggtgctcttcttttgcagcctctgttccagtgttccgggcaggcagcagtacagcacaaacacaaacacgtttggataattgcagaaatgattcagggtttcctgcagaatcatgtcagttaggtgacacacaaacggctcgtcgttctctgtcaccgggggaccttgtgcagtgccgcagttgcgtcttgtgtgcatctctgaatattcattcagtcatcggaaggaagattcagacagaaaatgcagggctcacagcagatagcagcggatagcctgcccctgcctgctctgtgccaagaaagccacaggctagctactctcttcgccgctaaatgtaattatttccagcttatttagtagtaaagtttaatataaaagaaaaagatttcctttcagagtcatcaaatagtcaaaatcttaaatttcgaattacttagattccttctctaaacacctgattagtcaaaaatatttttgattcccatgcagtgaaaataacgttgtcccatagaaatactttatatcgtgtacaaaattttaatcctaaacactttttattttacaagggagtagtacgtagcaaagacagagaaacgcctagaaatcttccggctagcttcacaaaggtgatggcttatctggtataggtgaagtctcactcattaaatttatttgatattagatcattccctaatattcgccttccttttatgtatgtctagatttattaacatcaatataaatgtgagaaatgctagaatgatttacattatgaaacggaggaagtagcaatgatcaaccgtcagtgttagagcagccggccatgcaattaccgtgtgttgtgttgcgcccgagcgaacgatacggtggtggagtggaggacgtacgccgatgcaggatggaccagcattttcaagcgcaaacggcgacagccattggcattcgataaattcgatcgtggctaaccacactagagcaatagctgtggatatatctatataacattaacaggataggagatacgcgtgcgttccctccactcgcgcgggctgagcttagcttagctccccactcactcgccacttgctgcaattgcaatggctgctgctgctgctcgatgcgccggccatggcggcggcggcggcggcggcggtttcttactccggcgacggctgctcgccaccgcggcgttcctggcggcgtttgggctctgcactgctgctgctgatgacgctgccacggggagaggacaagggcatgatcatgtgatgctgagcgtggaggacatgttccctgactcgtcgtcgtcgtcgccgtcgtgcgacgcgccgccgcgaggtttgattcgttttgctcgccatggcatggcatggccacttcttgatcgagctctttccaagtctctgtctgtcatgtcagaatctcagtgtgagtgtgaggtgtgtctgctgctgttgcatttgcatatatcatgcattcattcatgcatggatagatgcttcagattgctctctgcatcagtgcttctttttctttttcttttcttggtttggtttggtttggttaatttgtttgcttattcaattgatctatcacccgtttgtttctggacttcaggtttctctggtttcagagctgcttttgtggttgttttgttgtgctttgaatttatatatacttacatacgagactggaaataattttgctgattccagtggattcacttacagctttgatattgcaaatgcttccaagtaagactctctctaaacaaaactaaataactgtagtaaatgtttctaaaataaaataaaaactaaatagatgtatgtaagactttgtgtcgttatctgctcaagtttttgtcttgtttgtccgttatcagaatactgtatcttccctgttttgtatggtacagtacacaacaagcgtaaggaaactgccatgaatttaaattgatggccacagtacacagggccatatacttgacagtgattttattacaaaaaaaaacaaatcacttttaaagattttgagtcggaattttttttggaagaccgaaagtatgacaaaaatggagctttggctctcacaggaaccccaaacatttgatactcgtaaaaaaaagggttaaatttgcattttaaaatatgttaggtgttaaaacaataacccttttttttaagtgcgagaaggacacacactcaaagcttgtgtgtcctaaaaacgctccaaaacataagaccttgcaaaacatggcacacacgtctgattttttccaccaaacaagcacacttgtatataaattttggtagataggcagatttacataaatctaaggatcggatatgtgcgtgaggaataagatgaaggcaatgatgtttctagagcataaatcaattaacaacgatggcacgttagtgaataaatgagtaacggttttgctagctatttgtggattatctaaacgtggtcaaaatacaaaattgtagctttcaaataactttattaacttttagcttgctctcttgggtttagctagctatatgcatgtgtttttatgttgctattgattatagggaaaattgcaaaaaccatctcataagtcaattgaagtttgacattttacccaataaatcactttgttgcaaatacttactcatctatttgttgcaaaaccacatgttttcataaagtgtgagccgtcaatgtattctttaccaaaattaaatattttcatagtatagtcttgacactttttttttgagattccacaaatagaattgctgatgagagcttaaatgttgatgcattgagtttctctatatgaacaaaaaaaagttcaatcaaacatgaaaaataagtgtaatgcaagcacttggagaagattgatttcgctaacttagcatgtggtgactctacatcagcgataatgggccaatttggttaagcacgtgcgcactgggtggtttttgcaataaaactgagtaggtgatgggtattagcaataaaataacttatgggatgaaatgttaaaattcaagtgacttatggggtggtttttgtaattttccctatagtctctttgttttactagcgaaccaaccgttcgttgttacaggaattagaaaaatcgcattggcatattacaaggaagaaatctattttttaattttagaattaaatttgagttttatttatctttttgtgttttagccataaaaatatttctagcggactacgttgacttcctgtcactaaataaatgctcctcccttcaaaacgttgcatcatagataatctatgaattctaccatatatgcgttttgtttgaggaggggcactgatttcacatatgttttggaggttaatggtgggtggtgaaagatgcaccaccgctcccttttataagaatatagatactggtaagtggtaaagaagttgaccattttttttgttagttaatttcaagcattatatgtttcaccctaataaaaagaggtacgtagtaaatatgtgagttgttttgtgttgacacttgatacaatatttcaaccaaaaagaaaggtgattgacaaataagttacccactcagtgaatagatgcatggtccaacaaatgtctagtttatatgagaggaacgtattttcaacgaagaaatccgggtctatcatattcctgatgaaaaatatgtaatactctgtccgtccctaaatataagggattttgaacggatgcgatatttcctagttatatgaatttagacaaggaatatattcaaattcgtattactaagaaatgtctcatctgcctaaaatctcttatattttgcgatggagggagtagttcactactgcacaaataaacaattataacctccctaaaaaaaaccctctcgtgctttggttgggccaagtgtactttttttttcatttatgctgcattattgttcagacacaactgaatgtactagaaaaatataaagagtaaaatccatcaccggtccctaaacttgtaccgttgtgtcatcccggttcctaaactcgcaaatcgaccgttcaggttctcaaacttgtttgactgtgttatcccggtccctaaacttgcatatcactcatttagatcctccaacttattcagttgtgtcaccccggtccctaaacttggatttgaatatcatctgggtcaaataggacggtttaaagactttatatttaaaaataattcataactttttcatgtgaactataatgaagacaaactttatatgaaacttgtagccctcgacgcgatctacaattttgttgttgaatttttttattttaagtcattttttcccaaaatgtaattttaaaattaaaatttcaaaatctataaacatgcaacaatattttgggaccctaaaaagttttaattcaaaaacttttcaactacaaagttctaggtcgcgtcgagggctacaattttgatataaaatttgtcttcattagagttcacatgaaaaagttatgaattattttttaatataaagtttttagaccgtcctatttagggaccgggatgacacaactgaacaagttagaggacctaaacgagtgatctgcaagtttagggaccgggatgacacagtcgaacaagtttgagaacctgaatagtcgatttgcgagtttagggaccgggatgacacagtggtacaagtttagagaccggtgatgaactttactctaagtaaaatatagacataaagtgatagaaaaaattctgaatttcattttctgaaataattccgattgatccaagctgaacatctccctggaaattcagatcacagacatgacgccacgtcatcaaccactaggatgacgatcgtccaccggcacggcccgtgctcgccgctagccgccgcgcacggcgagccgccgtcccacggcgagatcctcgccgccgaccagagccgcgccgagtcgatccaacaccgggtgtccaccaccaccaccggccgggtgaatccaaagcgcagacgccaccggcagcagcagccgccgtcggcgccggcgccggcggcgtcgctgtcgtcgtccaccgcgtcgctcccggcgtcgccggggcgcgcgctgggcacaggcaactacgtggtgaccgtgggcctcggcacgccggcgtcgcggtacacggtggtgttcgacaccggcagcgacacgacgtgggtgcagtgccagccgtgcgtggtggcgtgctacgagcagcgggagaagctgttcgacccggcgagctcgtccacctacgccaacgtctcctgcgccgcgccggcctgctccgacctcgacgtcagcggctgctccggcggccactgcctctacggcgtccagtacggcgacggctcgtactccattggcttcttcgccatggacaccctcaccctctcctcctacgacgccgtcaaggggttccggttcggctgcggcgagaggaacgacggcttgttcggcgaggcggcggggctcctcggcctcggccgcggcaagacgtcgctgccggtgcagacgtacggcaagtacggcggcgtgttcgcgcactgcctcccggcgaggtcgaccggcacggggtacctcgacttcggcgcgggctcgccgccggcgacgacgacgacgccgatgctgacgggcaacgggccgacgttctactacgtcggcatgacgggcatccgcgtcggcgggcggctgctgcccatcgcgccgtcggtgttcgccgccgccggcacgatcgtcgactccggcacggtgatcacgcgcctcccgccggcggcgtactcgtcgctccgctccgcgttcgccgccgccatggcggcgcgcgggtacaggaaggcggcggcggtgtcgctgctggacacgtgctacgacttcaccgggatgagccaggtggcgatcccgacggtgtcgctgctgttccagggcggcgcggcgctggacgtcgacgcgtcggggatcatgtacacggtgagcgcgtcgcaggtgtgcctcgcgttcgccggcaacgaggacggcggcgacgtcggcatcgtcgggaacacgcagctcaagacgttcggcgtcgcctacgacatcgggaagaaggtggtcggcttctcccccggagcttgctgatgaaatgtgccacgcgtcacccccagcaaacgtacacgtcagcacgcagaatgaattaactgtctgcactctgcagtgtaatgctgcaatccaccaggtggtcagcgactggttttattaccatgatttctgaagatatataatcatatgattacaaatatgctaatattattttctcttcttacatttatgatttgcttgaaagaagggaaaagcgaagattgatagaaaaaaaatatgtaaaacaaaatgagctattggcgcatgattaattgagtattaattattttaaatttaaaaaatagattaatatgatttttaaagtagcttttgtatatatatatttttaataaaaacgcaccgtttaggacgggggagtttttctccgaatccactgctgtagaacacaaacttgtggtccgatgatttctggcaagcccaaaaaaatcattagacgttttatgtaaccatctatactatgaataaatttgatcgggttaattggatcatgccattaaaatatactggttttgaaatatgatattagtattcgcatatctgaaaccataccattataattttccacatatttgagatataccactacttacccattggatgcatttttttttaaaaaaataaggaccaaactatccctttttccccttagtccttctcccttcttccatggcgtgacctgaccaccggcctcctcctgcacgtcatctccctccacctcggcccgccgctggcctcctcttgcatgccagcgtgtcccagatccagctgcctttcctcgctccgagctcccgcggtggacatcgccggcgacaggatttaggaatcaatggcggtggtggtcgctgagatcaatggcagtggtggcgccgccgttgcgtgagcagcacgacgacaacacaacgatctccctaacgttgaccgctgcccggagcctactctgtaggtcgccgtgcttggcaacgttggcgagcagcgccaccgacgcggtcgaggagccgatggcctcctcgtcgagcggcatgacaagcacccgtgccgccaggacgtcgtcgagcaagaccgacgacgctgacgaatcagcctgccacagcgaactacacgatcgccgtggcgagtgcgcgcgccacgccggccgacgcgaggcaccgccgatcctggttggactcccgcgcgaggcgcccgacctcgcacaccaccgcaccgcgcctcgccgcgtcacttgcccatgcagcggaccttggccaacacacgtcggtggcactgctgtagggaagagagaggtagaagatgagggtattttcgtctgatacatgcaaaatacgtatcttagtggcaccattgagattacatacaagtagcagtatcatcgttataaatacgtaaatagtattggtacatttcaaaaccggcaaatttttaatggcacgtatctaattaacccaatttgatatggtacaaaacattgattcttggttactggtacatattcatgttcttttattatttttcaacctatcaatatttgaacaatagagattcaatatgactataaaattatcattttttgtggtttcaacctaatgttcgacctgaattgattttatcagtaagaaactctccatctatcttaaaaaagaatccattcctaaatatgaatctaggtgccagtctatatttatttttttggattggacttttctaaagcaggagtaattcagttcatataaacaccgggtgcggtgatgagcgacgagcgacgagcgtggcggccagtgtgagaagggggcacggcggcggcgggaagaggcgatggcggcaagtccaaaggccggaggcggtgacgacagcgggaagaggcgatagcggcgagcccgcaggccagaggcgaggaggcggcagcgggagagggcgccggatctggatgggacggatccggtgaggcggtagggggttccgtcgtcatcgtcgtcgaccggcgagtgaaacaggagatagggtggtggccggcaaatgaggaggtgaggcggtggcccggagacttggcgatggccggcgaacaaggaggcgaggcggtggcctgaagacgaggcaacggtcggcgagcgaggaggccagcccggaggcggcggccggcgagaagagcgcgaatgacctttttttttatttttttcatttttctcctttcccccttctatttctttgtgatttcttatatttcctttaagattcttttgtttgtagtaattgatattttggtggttttgatgaatttgaagggggtatactcgtcgccttaaatgtaggggtgattgtatccactcatttatcctactcttcctaaccaaaaaaaatggatcactaaatccaccttcatccctacaaccaaataaaaataattggatcgccatattcactccaccaaacaaaaaactggatcgccatattcagtaaaatatggaccgccgtatcccatccaactttgactgtgaaccaaacgcaccctaaaacaaccaatctggatggtcctatgacatttaggttggatcttttttattgagggagtggttgggactagagctgtcaaaaaagcttgaggctcgactcatcctaggctcgattcaaactcggctcgacctccaaacgagccgagcccgagcctagctcgagcttccaacgagcctagtaatatattatttttattgttattcaataatttaggatatcaaatatattatttacatgcattgtattaacatcatatatttattttattctttttcctcttctattaatatgatgaactaggaacaatctcggtagtcaagcttgagcttcatctagctcaaaccaaatctatctgaaagctcgaacattttatgggctcgagtttcgagctcgctcattgacagccctagttagagcaagtttaataatataaccaactattgtttctaaatcatccatagtcaatttagtagccaattcatacacatatgtatcttggagtctgtgctccagctacagcaaatctgtagccaactactcttctgtctcctcttttatcttcttgctggtttatagtccgatattgtagtcatcttaggacgggaggtttttgtaaatcctatcttacaataaatttatcccccactaactccttaaacttaacatgcaaagatgccacatcatcattgacggagcgtggggctcctcaccgggagaccgagcaggcccccctttgccggttcggccgggggcgctaagtgaggttcttcgccctcgatcgatctggagaatgttcgcgagagagcaagtgcacgagacacgggcgatgtagacaggttcgggccgctgagaagcgtaataccctactcctgtgttctggtggatctgtgtgtgaaggatttacagagagccggagagccagagagttcaggctccagaaccccactcgccccctctctcctttttttttttggtgggcaaggtcctccttttatatctcaaggggatactacatgcaccacttctacctacttttcttctgggtggggacctactctatcttgaccaaaacttggcttgcaccttcgcctggaagctaaatcacaacttgtccttgagtgaggctcagcgccgtctctcgcctgacaccggggatctccctgttactccctcattaatgggcgaagatttgccatggctgctttccaaatgaccatccgacgagatgggtcatacctacctccactccaccggaggcagatgcatcgtgggagcacggttgtctgccgatgacgcgaccggcgtcagaccagtcacagaccggtcattcttgtccacaacgtgtcagttcagcatgctacacgtctgcccttcttcatacaatgacttccttgcaatggttgcgatgaagcctggaatgtatctggccggggctgacgtgccaactccaggagttcccacgccggctccggctagggacgagtgcctggaggccctcatcattcagacgggacggggcgaggcgtgtgtcaggccgcctgttgccacctaacccgcgatctgaccggtctgtgaccggtcacacactgtgacctgtcacggaccgaacgagtgtgctgcactgcattaaatgcggcgtggggcgctcgtccaacccgcaataaacgcggttaggtgagcgccgctgtgctcacctaacccacacacgtggcgccaaacccacagggggccggggcgccccagccctcggggccgaaacgggagcggcccgacccctcggggagacagagggaggggcggccacatcaccctcgggcccgacccccccgagggggtcaggccacgtgggtgactgcagctgccccaaacctctagtcaagataccctcggtcccatgtcaccgacaatcatccactaacaagatgccacatcatcatccactaattaataagatgccacatcatcatccactaattaacaagatgccacatcatcatccactaacaataatcacatttaaacatcatgcaaacatgctatatctttatagtttttataatttaagagcttttcaaatacaatcatgttaaattattatccaacataattcacataatgttttaatgtatatctttattatattttatgatatcctatctacttatatagcttatcctcacttagttagtgcttaaatgattaatctatggtccaaattatatttctcattttttcctctaattaagtcatatcacatcaattgtttttagcctttagatgattaatctacggtccaaactatctccctacttttcttcttccgtaaattcataccaccttacattttacgtttgaatcaccattctacatactatttaaatttaaattatcataaatcatattaatttacttaatctgatattatctagctattttacatgttattttttcattgttatcgtactaaatttccgaaacagggtttaacttagttccaagaaaaatggaagcctagcaagcggccactgtttcctcagttgtcaccagacgtctgactcttatgagttctgacacagcgagaccgggacgcatagccctctctcactgaaagtgggcccggataggggacagctctccagaacccaagtgcactgcaacccctgcaaagaccctagtactagtactactctactaccgagtaccgacaaacatacgctccgtaggaatgccaccggaagtactcctacgccctaactttacgtataccgtatcttgtcagagaaaaaaacggacggcccagatgcactgcacgcgccacaccggtcccaaaccttcccaacgcgcgcggcgcatcggacggccaggattcgccgcggatggaccaccgtccgatcttactccccaccctgtcgctgtgtgcctctctctctctctctcccgtgtctctcgccgcggcgtcctccggccaccaccccgcgccgcgccgccgtctacggatccccgctcctcgctcgagcgagcacgaaagccctagcgcgccgccccctgcaccgggtgggttccccaggtgagcactccattcgcgccgcggcgccctctctctctctcgttttgttcccacggatttctgcgggggatctcgttcttgggtggaaatgggaggagggggttggggttctagttcgtttcaaggtggttgttgacttgtggtggcgaattgggtgggttttgggagggttttgtgtaggattggggggggggtgaggtgaggttaggttggtggcgattcttgatttgttcttgcgcggcggcgatcgggctgggttgcgtctgtcctctcctaggttttttttttctctttttcgctcgtgtagttggattctttggtgggttcttagcggaagtttactgttttttgacggagcggtccgcaggaatgggggccaatgttttgattttggggtatctctgcacgccctaaaaacaaaagagatttgaagggagagacttccctccaaacatttttttaagaagaaattgtgagcgttgttggggattgaacacatctttgtagcgagatgtcggcttttatgttgaaagtctgaatggtacatttttttgtatgagcatacatggtttattgtggggaagtataagtgtgtttctagtatatgtttcttttttatttcaccattctgatttaggtggtatggtggatggatttttttgctacccttatagggtcttaaatgactattccgtagaagaaagttaagttttttttttccatatacttttgtttgtctctttatttaggttttttttttggggggtgggggggggctctactagggagtttagttcatataactgttggtgcactagttcctcatttatgaaggaactgctgaatttcatcctttcaggtgtgggcacctatatgtgcgttatattttactttatcgcaatttatttatcaaccagcattgactttgattcagagatcatgtcggctttgcaggtttacttgtttttatttttaaaaataatccaagggttttcagaatataaataattgaatacggtcaaatgtgcagctaactaattatcatgaaatgccatcaatatgtttaaagacttacatagttacgtttagcaggttgttgagctagaatgggagtggcagggcacaatgatcctttgataggtgaaacgacatgtggatctttgctgcagcaacttcaggtgcctttgtctcttccaatgttcttttgtatgtgtgctttataatgactggaactaaggatagcagcaagccattttagttccctatctacaccatagcatctgtgcaacgaaaagttatatgagtagtgcataggattggacaagtgactgactagtgtcatttcagttgatatgggatgaggttggtgaaagcgatgaagaccgtgacaagatgttacttcagctagaacaagaatgcttggatgtttacaggagaaaggttgatcaggcatctaattccagggcacgcctccttcaacagcttgctaacgccaagtctgagctttctagactcctttgtgcactaggcgagctgtctatttctggcattgtaagtatcttgataaatattttcatgaatataattccttattttccccaaaagtacacacacacctacaatatgctgcatctggctcattactgctgacttttgcagcctgacaagacaaccggtactatcaaggagcaactagaagcaatatcacctttcttggagaaactctgcagggaaaaagataagagggttagagagtttgctggtgtacaacttcaaattcaaactatacgtggtgaaatcgctgggagtctgcaagttggtgaccacatggaaacaccccgtgttaatgaggatgatctttcaacgaagaaattaaatgaatttctttctgaattgcaagctctacaaaaggaaaaggttggcactttgtttttcattttcacaatctgccaactgcctttttctggacctgcttatggaataatcttccaaatttcatagcccaaccatgctaaagagattctttgttttgcataataaataataatttcacataatatctgctggtcaaattctcttgataagcattgtataacatcaaacatccctatgatggatgatctctaaattttgacgtaccatattagtaccacagaagcaggcatacggccactgatatagctgatgataatctttgcattatacacacattttcgactatttaaaatttattgacttgaaatcgtatttctttccattttcttgcattgcagagcaatagactgcacaagattcttgacttcgtgagttcagtgcatgatctctgttctgtccttgggatggatttcctgagcactgttactgaagttcatcctagtctcaatgactcggttggtgccgagttcaagagcattagtgacgcaacattatccaagctgtctaagatggtaattcaacttaaagaagagaaatcaaagagacttgaaagggtaattctacaacgagcctcttgttcttactcatccaaccctttttgtatctctgtaacatagtacatcctggatattatttatgattaaatgctatgtttctcagattcaagctctagcttcccagctaactgatctttggaacctaatggacacctctgctgatgagcgacaactttttgaccatgtcacatgcaacatttcctcaacattggatgaagtaacagcaccaggagctcttgatattgatttgatcgaacaggttaggagattttcttctcaaagtgctcctaggaaaatagcataatattttgtctgacatgttttgcgctccaaaggctgaacttgaagttgaaaggctggatcagctcaaagctagtaggatgaaggatattgcgttcaaaaggcagactgaacttgaagatatatatgcccaggctcacattacgatagataccagtgctgcaagagatagaatactgactgttattgattctagtatcttcgagccttcggaactactggctgatatggagaaccagatacttaaagcaaaagaagaggcactaagcagaaaggacattctggagaaggttgaaaggtggatgtcagcatgcgaagaagagagctggcttgaagactatagccaggtaataaaaagtatacagtatgtaacttcttcattgtttgatctcattaacagtcatacatctttacattgatattctgataaatggcaggacgacaacagatacagtgcaaccagaggtgcacatctgaacctcaagcgggcagaaaaggctcgtcttttggtcagtaaaattccaggtatatcctgaatgtttacttggttttgtttcccttgtgattatactacattacatattctaaaagtagcttccactgcctgccttagacctatgctacatctggcataatatgacatggaaaattaattctattcctaatctgacttttgggttcatctgtgactgttacgagtgtagtcattgttgatacactgatggcaaagacccgggcatgggaacaagagcatggtatgccgttcagctatgacggtgttcatcttctcgcaatgctggatgagtacaaagtactaaggcagcagaaggaagaagagaagcgacgaatgagggtacccttctgtccaatccccattaatctttcgcatgtctggctctaaaaccatatctcattccatttgctttcttccaaaactcatttcaggaccagaagaagataaacgaccagctagctgcagagcaggagaagctcttcggctcgaaaccgagcccagcccggccccaatcctcaaggaaggcgcctggcccgcgggccaacggtggcgcagtcaatggcacaccgaaccggaggctctcggcccaccagaacggcggcggcaggtcggtgagccgggacgggcggagggacagtggccggccggctgctccggtgaactacgtcgccatctgcaaggaagagtccagcaacaacaacccggcggcgtcctccccctgacgatcatcctcgccatgattgaccgtacatttcttggtgccagtggtagagagatactccatatctgtgcagtagcaggaaaaaaagaaaaactatagcaagatactagtaggacaagtgattcgaatgatagtagcagtattttggctgtatttgaatcgatttgttgctgtccatttgctggtagtggatcgaatggatcgagtgggtgcagccgtgcaggtgcatccgccatggaagctgagctcatgtcgtcgtgtcccgttggagtttctttcgcctgtcactgtcggttgttgggcttgagcttggcgggacggcgaaaaacgcaatccgtcagttacagtggttatcgcttgaatttcgtcgaatcctatcaaagtttaccgagctgttatcggcagttttgcggttactgggctatcagctgttaggctatgaatttaaatttgaaaatttcatgccagtaatccaaaatttcaagttttggatgatgtatatcaattccgtacattatttaagcactaataacaacttggagtagattacaacgcgacatacatgcaacagcagcgaaacattcgtcagtctttcagacttccgcactcaatcaccaatcacttcatcggtttaggaggtggtttctcgttttggatggataatcaactaaaacaaagcaatcaaaagaagaaaaaaaaggggccaaatttcatagcaatttgattacacaacacagcacagcaattcggtggaggctccacgcaaattgaagaagcatatgtacatcatcgatctgctccttccccggtcagcttttgtctcagtaatccgtcggtggttggttgccgtcgtaggcctccgccgcggcttcttccctctcctgctcctgatctcgccggtgcaccttcttgctcaccttgatccagattgcaaaatgttatagcatcggtgagtggaggagagatttttgcaaagattttgattcttggttgtaaaatgtttcatcagtggagggatttgcaaggattgattgattgatttaccttgtgtgatcttgcgtggaggcggtggtcggaggaagccaccttccggcgaggcaggctccggccgccgcccctgaggcggctcttgctgccgggcttgtagcagctgaggctgccgctggagccgtcgaagctgacgacggacacgtcgttggacccgcagctctccttctcctcgccggcgccggcgccgaggtcgtgccgccgccgcaccacgatcacccgccgccctccggccgccgccgccgtcgagccagcgtccgccgcgttcttgctcatgcagtcgtcggccgacgcctccgacgacgcctgccgcgtcgccatccaccgctccagccagctccaccccacgttgtactccgcctggtccgaccgcgccgcccgcttcttcgtcgtcccgccgccgccgccgccgcagctccgcagctgctgcgagaacgcgtaggccagcgcgcgctcccgccgcgtcgtcgcctcgatcctgctctgcatccgcatcctcgacacgttcgagctcaccgtgctgtcgtcccactcctcctgccacgcacgcatcatcatcagttcatcacatccaaaatctcgcgacacaactcgccgatcacatcactgttccatcatcggttgcagagatttgatcgagatcgaagtctacattgcattgcggacatgttcttgcatggtctgtatataccttcactctgaacgcctgtggccgcgaccgctggctgctccggtgctgcgccgacgtcgccgcggcggcggcgctgtcgtcgctgaggcggaggttgctcagcgactcgccgacctggacctccaccgacgccgcgatggacgccgtagtagggctcctcggctcgtcggtggtgcagcagccgttttctgagcatttgagcttctgcaactgcctcctcgcctgcaacaccagtggatctgcatgatcgatcttttttttctaacctccaatttttgaatttggatcaagaacgcaccatgaatcccctgaacacggattggatcatcgtcgccgcttcgacttggctgtcggtggccggctcggccgccgtcggaggcgcgatgtctttgatggggatgctcatgctcccatgttcttcagggtggccgccggcgtcggcgacgccatccacgccattcgccggtcgagcaaccgtcagcgccgccgcctgcggttcctgcggcattgcgcaggtctcgaagctcttgacggagaccgtcccatcatcgtcgtcgtcgttctcgtcctcggcggccgcgctgatctcgtcgccgcagaggtagagccggagagagctccatctcctcttgtgatcagcagagcccctctcctgcaaaccaaaaatcagaacaatcttcttcactcgattaatcaaactccattttctgttcagattgtttatgtcgcaggcaggcaaaagcatctgcaattgtgaagatccatgaaccgaggtgccacgacaaagtacagaatcgaaagtacattggcctcatcgccggttactgattggtgtaccgagagatcttcactttttctcgtactgaacctgaacccgaacccaacaccgactgcacagttgcactgcaccaccacaaacgtatgccctacacaaaaacagtggacgcaacaccaaaagagcacctacattgtggcaaccacggccgccaccgccggccgacgagcaggggctcttggagaagactcgccggacaatgccgccggcgaggcccatccccaccgtcgccggaacagaagaaaagcctctctcaactatctaggactaggaggcttcacatgtcagtgtagtagaacgacggcgatcttggttggcatcgccatgagccggcggtgctgagctagctgagctctcactccacagtgatggctggcgcgcgcaggcgaggctgcaatggctggcttccccttatagtagcaagggagaggccaacgaccgtgcagtggtggtggtggctaaaatccacaagaccaccagaaccagtttggcttgggttaaaataaaaagaaaggcggtgtgcgagatgcgctttggtgcaagtagt

SEQ ID NO: 26833 - DNA, 2588 bp, Oryza sativa
gtgtatgataaggttgaaggaaaggggcttccggttttcttcatggcgcacagggattcgatggatttccttataccttatctttgtttacatgtactctccttgttgatctttgtttccatgtactctccttgttgttttctgcactgttcttgcactgttcatgatggtgaaccctctctgtctgtagttgattgttacgagtatatggtagcgatcagaccgtctcttcttctagtgtaaagaaaagagtaaaattcgtattattctgaatttaatcagactaggtgagttggtactttagtttggttctggcccttcatgctgattgcttgattgtgtcggctgctgctacaacttgcacaatttatattatcatgctgttctgaaccagtttgccaacttgtcccatgcatgagagatgagatgagccacaactatttgttaattttgtttcaggtacaactgttgtttggtgcttgtccagctaggacagccgagtgaagtgccagcatgggtggcatccttggacgccatgacaccatgaagaggagctctcacggctcgaagctcgagacgaagatggtggagtccatgcagcagagagcgtcgcacgggacttcactcaagtcgttcgatagcatcatcatgaagtttccgaaaatcgatgagagcttgaggaaatgcaagatcatcttcgagcaattcggtgagattcgtcatgctgtctgcatgccaatcattgtctaattacctgattatctcctacttttggatctcactgctagtgagattcagtagagatcttctatacaatggtgaaatagtttgaaaggaaaacatagggactgtcggaccgatatattctattttcctgtacacaatgaaatccttaccagaaataaatatgtagtgttgttgttgttgtttcataaggttcttgtcatggactgttgaatttcaataatgatacattatcagcatgagttgtattatataaatggttatgtcgtctttcaaatatttactgatttgtgcaaacaaacagcttctcactcatatatcaaaaacaaccttttttgctcctcagatgaagattccaatggcgaaatagataaacaagaattgaagcattgtttccaaaagttggaaatttcattcacagaggagagataaatgacctctttgaagcttgtgatataaatgaagacatgggcatgaagttcaatgagttcatcgtctttctgtgcctcatttatctgctcaacgaaccagctgtgtcagaagcagtatccttttcttaataagcattgctgcagagcaatgttgggttagcatataggttaggtattgcaaaaatgatacattactatttactgttctattttcttcaatctttcattacgatgtaaatctgattggagtaatgtttattagatggataggatacttagtaactttctgtacctgtatcctattttagatctgtcttaactcatttctgccaggagcttctctgtttccttgacataatgcacagaagattaagatgggattaggaaatcttgaggcaacttttgagaccttggttgatgcatttgtttttttggataagaacaaagatggatatgtcagtaaggaagagatggttcaatcaatgaatgagactgcaacaggggaacgctcttctgggcgtatagccatgaaaagatttggtaagtcgcttgttctccagctctctggtctctgagtttagggcgaaaacaattagttgtatgcccttagatgtacatgttatgaataaattatatttttgtcccacgttttttatttctctatagtaatctaaaaatttctagattgacaattcccatcagtttcagaattaagtcctaacatgtaacactttctttttttgcatggcaccagaggaaatggactgggacaagaatggaatggtgaccttcaaagaatttctgtttgcattcactcgctgggttgggattgacgaaaatgaggacgacaatgaatgaatttcgtgaagataagttgttcaattattaggacctggccagcctaaggaggttataaagtttggtggtaatgacaactggagcatatgatgttgattagttgatcgttgatattgtgtattatcttataggatgattcaacatgatcctagtagaatatcttaacatgcctgaagactccatgtatgcttacaaatttaaagagttccatgacagatagatctgaacttgtacagtaattctaatggttgtacttaccaatatcctggacttgatgtggagaaatgctataattcagttgcatgctcaacgaaaataagatcatatctttatgttcttctcaccttactacatttccagacctacatgaactgtaaagtgatgtgcacactgcacatctctgattgaataagtataagctacaaacatgcactgaacagtagataacaactaacagtcatggctgggtttacagcattacagcctcactaagatcaacagctctactgaagagataactagcaagtcctctaaacatcactgccctgcccctac

SEQ ID NO: 26834 - DNA, 2508 bp, Oryza sativa
ggctttctatcaggagctgtagctgcctttgcacctgtagacatgtttgaaaagagcagtaagttacattctctggaattggaaagagtagcacctgtagacatgttctgcgttatcaaatcttgtttggcactatcagtgtaaacacctgatgactgaaataatgcatagatgaaacaaatctagttacattattttgaagcagtacagttgagaagtcaaacataaacagaagatgtcactgtatagaattgtttttagttacaggaaagagcttatataattttttaacaatatccatgtacgaggttagaagcagcgtgtctgtaagcaatttaataaaactagactatccgatccaatagagaaaacaacacaatgttaaaggacacgtgttatttgacagcattagcagaaatgcagaattgagatgaagtacaaacatgaagtcagacataaagaaggtgcccgaaaggcaacttgcctctaattgttcatgtagccgcttttgcacctccatctgcaactttaaagcctcccctatttccattccccttcatatataagtatgctttgttaagaactcaacatcctactttggctactcgatccttaaacaagatttctgggagtaaagaattgctaagtagtatctgatggatgcatttaaactagacaatgcaaaattgaactttctacttcgaatactacatcaataagtacagatttgttgaacaatattgaatggatgcctggaaacaagataacgaaaaacagaaaaagtgcatattgtatttatgtttctttaatgcagcagcatatcatttcagctgttcaatttatttgtgatatgcatgtaaacaagcaacgtgatgcagttagtttcaactttagaagttctcatgcacatagtgtgcattgctatctgaaaattctgcacaacagaaatattttcaatgctctatgccctaaatggataacctatattgctacagacctatggagctagacgctttccatttgtattgcttaaccacaatgatcagaagaaggaaaattcagaacagtttatcagcataaacaacaggtttatcattagaaaaaagaaaataataattggttggcatgtacatgcaatgctatgaagtacaaaatgaggcaaccttagaatttatttagggtgatgaatgcgaacggaagatgaaccaggaagtcctcatggtcacgtgtcatggggctaattcctcatggaggtaatagctatgctttctcaccattactggacatacctatgtggtgctgggagatctaaactcacaattagaataataatagtttgtgaatgaatacttaaattcagtgttggagaagtaaaagtttatgcgacagaggatgaccatataggtatgtgtggagcggctccacgtcaaattgtaccagactgttgtgctagtagaatatggcaatagaattagattttttttatttttcttaagaggaacccatcaaatcccatggacacaaacagctaagtgaatggaaaagatagtggaagttcacaactattagaagagcacataggctccagatacataccaacatgcatttttttttgaaggaaggagaaataacttacgaggagctttcaatgtcagcaagcaaatctccgagatctttcttgtcagacttggcacctacacaaattaaatccttatttcttaacttgaaaattgtaacatctatatcaaactcttatgttccacaacagcaattacgtaccatcagctgtgggatctggaatgtatttagcaagccgatatttctgaagaaacaagcaattcaatcagtaaagtctagaacataagctggagaatagactatatgcaggtattgagaatctcaagctcaattacttgcagatggcttttgacatgatagatggtcaacccttgaacacccattattctaagaattcccttcggagttgcccctgaaataagaattgaaagatagtccgttagcataaatgtatttagcatcacagggtttgtgaacaaaaaacttaatggagagcaagcacaggattttttgtactaggagaaaagtaattaagcaggcatagtaacttactgtcgggtccaccaagctgtgttacagcatccacaaaacgatcatggaggtcatcagtccaccgtaagcgctgtctggcggcaaagttgctgtttgagctgttcccaccactattagatactacattgttgttaatacgttcaatttgttgattgtgggaaactggatcgttgtgagctagtacaatgcttgagaagggctttggttcatacatttggcatcctctgcacaagacatatataaactgaattaccatgctgtgaaataaggtaagaagatcaaatactcatcttcacaaaacattaaaacaatattccaccataacacaaaaaagtggtataaggagccatatgaagtgaaaataggaactaatgtttt

SEQ ID NO: 26835 - DNA, 16042 bp, Oryza sativa
ataatgtatttcatacctgtacctatctctagtaattttttcatgaatttacaaaacttttaggtataattttcacaagtttccaacactaagctcgttttcaccatatatgtcctccacatatatactccctccttttcaaattagtggtcgtactagcttttccctaagtcaaacatttgtatctttgactataaacatctagaattatacagtttaacatcataagataaatgttagtacggttttaggttcatcacgagaaatactttcataatatataatgcacatgtccctcaaatgcaagtatgcagccgcgctcaagtagcaagagcacacgcgttgcgataaaaatgaaaaaaaaaagcggaagaggaaatgacaaagtctcaagctcagcactacctctgctggtactcatttcagcagctgccaccaaacactcccctccaggtgcgcctcaacgctgctaagaataggcaaattttaacgacaatggtcaagaacagcatatcactttcttcccaaaattacggcatcaatgcagtaatagtagagaaaagagagagagagagagaaggaaatttgccccttgggggatcgagcaaccctcatctaagtcatcttcttccaccgggtagaaatagatcgaccagtccaccgaacagaaaggattgagagcgaacaaaccacagatattcacagaaaccactaagctagcatcgcggattcgcagtgaaatgaagaaatcaagaacctgcctccttcgaaacgaaaatcagcttgaaaaatcccaagaagcttcgaaatcaggaggcgaaccgaagcgccggcgctaggagaagaagaggagagatcgccagatggggtctcgattcctggagcaagcagcaaagactgcaagcgagggagaaatgattggattggattcttgcgaggctcttggcttggatctctagagctttctttttgctctgttgcttctggtcagagctaggagaatcataggtaggagggagacctgggacccacctgtcagtgacatggagctctcgtacacgtaggagatctggtaggaattggaatattcctgatcaagctaacatggaaatgggaagggattaagggaatgatcagatgaaaggttgacattgcatttttttttcccggatacacaatacactttggttcatgtgctcctatttcagttacatttttgaaaaaaaagagaaaagtttgcagtccttttatgtgaaaaacttgaatgtatctgtgcctattttttgtgtaataaaataaaattatttataagcagcaatcaacattttggatgttagcatcaacctaagacaaatataataactatatgaaaaattctcaacctgatatttgctgtttattaaaccgatgactgaaatttatgtcctaatcaaaacctcctagctacttctctcagtgttcttgctaactaaagcctaatctgagacaccaaaaaaaagaaaaaagaaccaaaaaataataataaatccaagctccaggcctccagccatggcgcatgggcatggcgtccccctgatgatcaactctcctgcgtcttgacgacgatggggctccgcacctggtggttcccgtccgaccagacgatggcgccgaacgcgtagttcgccgccggcgcggggtccctcacggcgaacttcacccagaacgtcctcacctcgccggtgctctcgaacgtcagcgtcgtcggcgtcaccgtcacctgcaccccctcgggctccctcacgacggcggccgtgtacgtcgccggcgggccgacgttcctcaccctccgccgcgccgtcgccggcgggcccgccggcgccaggtcgaacgcggtgatggacgggtagttgaagtcgagcgggtcgagcgggtcgtcggggcaccggaacggcgcgccgttgaagagcgccagcgccgtcgcgttgtagccgatggtgcagaggaagctcaggtggtcgtcgacggtcaggtcgtacaccaggcccgggtccatcgcgcggtgcgggaacacgtgcccagcgccgcagctgaacggcgtcgccggcgacatcgacgagttcatgatcggcctcatgtcgttgcccagctccgtcgctgcccatgacaaacggctcgtcagctagcttaataaatacttcctccgtcccaaaataagtgcagccataagtttccgcgcttaactttgatcgtccgtcttatttgaaatttttttataattagcatttttgttgttataagatgataaaacatgaatagtactttactcgtgacttatgtttttaatattttttaaaaaaatttcaaacaagacgaatggtcaaaattaggcacggaaaactatggttgcacttattttgggacggagggagtagagatttagtccggtcatatcggtacctcgcgataccaaatcgttttcgatcgttgaatctagataggcaggatggacattgttagatctaatggtcggaaacgatttgataccgtgaggtaccggtaccttgaggtactttttgttggatcggagcaaatctctaataaataatgatgagttcgtcgtctccggcgcgcggcgtcgtgaggagagaatttctcaccggtggtcatgatggcggacttgatggcggcggggctccagtccggatggagcgtcttgatcaggccggcgacgccggacacttgcgggcacgacatggacgtgccgctctgggcgttgaatgccacccgccgctggtcgtacggcaagcccgtcggccccgccgcgccgctccacgccgcgatcacgctcacccccggcgccgtcacgtcaggctgcatccacgcatacaaaaagatttacctcgtgtgcgcgcggcgcgacgtcgagctctcgccatgaaaagtttctcacctttaggatctcagggttgacggtgttcggcccctgcgacgagaaggccgccatcaccggcgccggcttaacgccgaccaccgtcttcgccctcgtgatgaaggctttagcgccccttcattttcacaaacaccttccgctcagctcgaacaaatcaagaactcgactcgtaaatttgatctttggaaagaaacggtgttgtttgattacttggtggagttgatgtaggccaggagcgcgtggccgtcggcatggttgatgtgcaccgccgggaggacgtgcgcgtcggcgatgacgtcgttcccggaggcctcgtcgttgacgaggatcattgcggcgccgccggcgcggctgacctcctcgcccttctccaccctcgggttgcctcctcgcatgcacaccacgatcttccccatcaccttcttgccgtccagtgctcccagctcgcagagcaggctgtgacattggcatccatccacagagatggttagtgttcgacgccggcgtcggcggcggcggcggcggcggcggcgagagttgatcggtgtgtgtgtgtgtgtgttttgcttacgcgtcggcgggcgggtagccgggaacggcggcgttggcggcgctgatcatggtgtagaaggtcttcccgcgcagccatgtcggggagaggctctggccttccacccggttgcggttgaagacgaggtgcgccgggaacgccctgtccatggtgctcgcggcgacggtgaggatccatggcgcgacgttggtgacggtgccagggtcggggccgaagttgctggcggagcagacgacggtgatgccggccttgacggcgtggagggcgccgatggcgatggcgtcctcgaggtagtcgttggggtcggcgccgacggaggcggagatgacgtgcacgccgtcggcgatggcggcctcgaaggcggcgaggatgtcggagtcgtagcacgcgtcgctgccgttgaagggagggtagcagacgcggtacgccgccacgcgcgcccgcggcgacccgcccctcgccgtgccgccgccgaggccgaacgcctcggcgccgcgcacggccgacccgccggcggtggccagcgtgtgcgtgccgtggccgttggcgtcccgcggcgtcttgtgcgtgtcgttcagcgggacgccgatcaccttcgcgtagccattgttgaagtagcgagcgccgatgagcttgctgcacacacacgcacgcacacgaaaaatgaatcaaatatatatcctttggagaaaattcatatatgcctacattttgttaaattttttcaaaattatttttactctgtttttttcgccaccgaaagtgtacatcggtggaaaaataggaataaaaactccggaaattcaaccctttttcttgaagaaaaaatccactaaatttattgcgacagttacatttttgaatagttttttttaccaaaattgaaagaaatataaagaaaattcatacttgggagtagatttgtaacataaaattacctgttgcacttaaacgttttgtcgtgttcattccggcaagctcctttccaataatttgggatcggaccaagctcacggtcattaaagctcagcgattcaggccacacgcctgaatgtcaaacacaaaatcagacggaattagatttaaaaaatgaccatgttacacagtatatgtaactttcccattcgaaaatcaaatgcacttaaggacgttttcgaaaatgcttatcatcagacgtccgaggaaggaggaaaaatcggacacctcaacccaacggagtagtagtagcgcaggtgcattacaagtgcatgcagccaatggagcgtgcatgcaagttacatggattcaaaatttaaatgatcttttctattaaactatttattagaattatgaactaattataccattggatttgttataattaactctttataacaaagatctcacatgataataatccgatgatttttatcacataatattattctattgtttcaataagtatttactcatgtttcactaattcagatataatgttgcatgtggtctttttatatgctttagtaaatatattttgtgtttcaaaaaaaatacaacttgacgcttaaagagggatataaaattttaacaaaataaagtatttgcaaatattttgcatcatatatatatttttatgtttccctaggtaggacctagtgtttcctgtaatggtggttattgttgtagccagtaatttttatatagttattgttgcacgtgatctatttatatgtttcaataaataattttttttagctttcaaaaattgcaagttaacgtttcaagaatgatataaaattttaacaaatcaatatttgctaatatattgcatcattttttttatgtttcagtagttgggacctaatgtttaatgtgacggtggttattgttgcatttagtaatttttataagttacatcgctctgaaacattttttaaagtgggttgagttatcggtacaagtgataaaataattttatggtgcaacaaaaggttgatttttctaaaaacacatataaaatgttgcatgggcattattttgatgtttcaataaatattttttctgatgttttactagtttattcatgaatgttgcatgtggtactattggatgttttagtaagtattttctaatgtttcactaattcatttataaatgttgcacgttttgcatgggatgttgtagtgaatattttctactgtttcaataattataactcgttgtttcacgtataatatataaatgtttcaattagtaatataatcatatttacaaattttatcagaaatatagccaagtgagatcttattgtaaagatttaattgtaacgaacacaatgatgaaatcggatgatagatcggctaagtaatttagaaggaaaaatagtttaaagatttattggtagagaagataaaagagagagactacatgtatgcatgtactagagaaggttataggcttgcagcatagcagcttaactacgatggttttttttttgcatgcatcagatatgtggatgaacaacgtccgatcttttgctaaatatcgaacgtccgatgtgtagcagccaccggatgtttgatcagtgtatagtttacctaaatatcgaacgttcgatgtgtagcagccaccggatgtttgatcagtgtatagtttacctgagtcgaggttgccgatgatgatgttctggccatacctggcggcctcccatggcgaccacggcgggacgcttccgtcgggcctctcgaggcccaagaactgccacgaccgcgtggtgtgcatccgccgccccctgtccgggaacaccgacaccacgccgggccgctccgccaccgccgccgcctcctccgcctccagcctcgccgcaaagccgttgatgttcttcgtgtacaagtagaagatggcgtcacgtgccttctccctgctgcatttttgcgcacgcgcgcgtgtcgttcgaccaaatgcgtctcgagaaatcatgcaaaagagcgaatctggagatcaatggagttgggagaggttgcgcttactctccgaggacggagccgaggaggtcgtagtgcgactccgcggccgtgcggtgcgcctcctccggcgagatgacgccgccgtcgtcgccatgggagtggcggccgccgaggtagacgatgtaggacggcttcgtggcggcgagggcgggagcaacgatgaagacgaagacgacgaggagttcgaggcgcgtggacatggatcgagccgacatcgccgtggtgatcaccatggcgatcgagatcacgggagaggagaagagaagagagggtgaagtagagtgtggtgcagcttgtggttttgggctataaaggagaggagacgagtagacgagaggtggtggtggcgaggtgagaggctggactgtgtcttactttggctctgtgtaggcggttttggctttgcgatggagaaagcttcacatggccgcgatctgcactgtgcatgtgcatgaatgtaccctttgactccatgtaactatatgttttttttaagataatagaataaaatatctcagcatttactcaaacgagttataaccaattattacatagttcacacaatagcaaactcacacaacgagtctagaaccacagaatgaaaattttaaacaagcacgaactaatagacaccaacacaagataaagatcccacaactattgaattctatttgagaacctccagctgcataatcgttggctcaagtttacgacatgcatcattaattaggttaatatcttcttcataccttttgtaattgagcccaacactagagccaatacgttgccctgaaaagtaccttcaataagattttgatggtgatttaccaaaaaccatgttattcctactaagtcaaagagcctaacataaagcggatgctccaacaagaataagattcttaatctttttatcaacaccaacaagtcaattcccgaacatatgagacatactttgtggaggatgaaccaaaagaaatgtgaaccgatctccaaagaaatatagaaaaatggtaattgaagaatagatggttgatggtttcatttttcatataaaaacaacatcttaaattaccatcccaattccttctagccaaattatccttagctaacacaattcctttaagtagataccacataaaaattcctttgagtagatcgaactatgaattgactattttgatgaaagtttcatctgaaactatcactttcttctgtcagatcaatatgcacaattgaagcacacaagctatgccatttgtctaagttctgaccaactaatgatcttctaaaagacacattaagtggaacagatctcataacattcgcaaatgtatcatttctccttctgactatagcatacaaagatgggtatctatccttaaaggaaaaatttcctaaccacttatcctcccataacctaacttgttcaccattattacttatccaggaactcatgtttagaaagttactcttaactttcatcagatctgacaaaaaatggaaatcatatgttttttctcaacttgagttattaatttactattaatgcattttcttttcaaaaggtcctccagacaccctgctcatttattaacttcaataaccatttacttagtaaacattggttttgaattcccaaattatgaataccaagacccccctgatcttttggctgacagataatgtcccatctagttagtctatatttctttttatggtcctcaccttgccagaacaaacatgatctacaataatctattttttgggatcttaaaaaaaatatgataaacatagttaagcttgataaaacaaaatttatcaaaaccaatctcccctaacagataaaagtttccccctccaactacttaagtttttttctcaatgtcactatgtaattaattatgcagctatatacgtatgcaaatatgtaattatggggtgtgtgtctgaccaatccgagccgttctagggacaattttttctaccttccacgtcagcaagcgatcgattgatctgggacatttttttttaacgcttagatgcagtcgtacccgttatttgcatgggatttaagcatttatctataactaatataaatatttggatttttcctgtcgtcacaatccgatttcgtccatcaccgtccgtgccatggcgctcgcgcaagtgaaacggatatcccacatcatcccaatccaacccaaaaacaaaatctcaatctcaatccaaacccaaatcgaaatcatcacaaaatcatcaaaagatgatgagaggagatggaggggcgagcgggagcaacaacaccatcatcacataaaaaccccaaaatcaatcgtagcaatgacatcatcatcacatatacaaacaacaaatacacaaccaacaacaatggcggatcgggccgaggggacgtcggcggcgtcaggcagatcccctcggccggatccgccagtgggtgccaccaacgtcgtcgtcgccgccgccgccgcctgatccgccggatccgtggtgggtgggagaagaaacgggaaaggcggcgctcactctcgttgttgagaagagacgtgataggggagagggaggtggagtgccggagagggagagcgtcgccggttgagaggagcgcgaggagaaggatagaaggaagccgagaagaccgagaggaaacgtgccgttgtctcggcttcgacgcatgcagcagaaagggtcgacgcgtgcagcagaaaagcaaagtagtagtagtataatctcagttcaatgtatgcccgtgggacccacgtaaaagttttcaaaattgagcagtatctgccgttctcaatgcaaaggaataggcaatcaaacgaaatcttctgttgtttggtccctgttctcttttttttccgaccttctttccgttaaattcaatttttttctctaataggacatgactaaatacaacgctgctgtaaattagaattaaaaaaatgtgttctgtttttctatttttaaggtaaatataaagattttgccttttgccttgcgagagaaatctatatagttttatgtgtgtggatactaggaacaactagaaatatatagcgaaaggtttcaatgaaagaaaaaaaaggcagagtaggaaaaggcgtggaaggacatggactcctggccgtagaataggtctttgtgaataaacctggactcctggcctgctccggactgacctggactttgtagaatgcgttctctcacgcactttgtccctaccatcggtgatcgctttccccgcggaaaagaaaaacacatctgcacagtgcgggattggattcttgatcgactcggatcgggattgaatggatcgtgttagctccctgccgccactggcatgcctcctgtcgttctgcgcagcggcgaccgccaccttatcgacgccctccctggtggccagcttgtttgccaggagcacctccgcgacaccgcccaccacgtccttgagtgttgtggccttattaatcttctccctgtcatcattgggtggtgcctcatattcgcctcgacggcctgagcaccgcagcaaccacacagccggggatgaccctggacaggaagaatagccccgtggcgctcatctcggcaccctgcactgccgccacattggcggggtctataggcttaaatcccggggaaggtcgccgatggttgtagtagtgacatatcaacactgagatacatagcaaatgcaaattcgttgagctacaccctccaaatttatcaccatagatggctcatcagtaatgctctagatcaatacgacaatatggaattcacacgatttgcacaactcatatgtataaaatttggagatatttgcgagatatgtacaaattcaatatttttgtgcacatgtgttataagtacaaacaatcttacccatcaatatttgtttgatatttacccggtgcaacgcacgggcatatttgctagtatggaaaaaaaattcaaaaacaattgttacgttgatgaggatggcacaattatgtatagggactacctagtatctttcgacatattttttttttcttaggtctcacacgaattttcagtcataggataaaaaacaaaataacggacaggatgtttcgacacattttctaaatgatatcactcggcttttatttcttacgtggcagtggcagtggcaggtctgcaatgcaccgatgcatccacggaagattgttgggctagggaacacttgagtattctattcaggctatttgcaacacaaattatctaagcgacaatgtttagcatatcctcattaaatagaagactggatcttatttacaattcaaaagttacactgtaaatttaaaaattacactgtaagatacaaagaaattacactataagtttgaaaaattacaatgtaatttttaagaattacattataggctataaaaaaacactgtaaaaattcataagtactcgtatactgacacgatagttaattcattgagaataaatataaaaacatggcaaacaaaaaatagtatggctctacgaattaacagactagctaagcatctaacagccacaaaaatttgtgaggcgtaagaaaaaatcacgcgacaaaggaataacaaaaatcgttcatatatagtgatgacccattaatgtaaatatctgagccgggtattcatgacccgacccggtttctaacgacaactacatgcccaccgcacggaggaggtttcaaggagatcgaaacggatttagtacaattaactaaccccttccaaattttgctcatatattctactccgactgggactcgcaaattaagatcattgcgccgtcggactcgggcatcggctgcctacaaattcggccgggaggttgggagttgggatctcaggaggcaaagcgatcgatcggtacaacaatagcaattagagaaaaaaaaatttagaaagccccagccatggacgacgacggctcggcgatgcggcgcctccgcgacctgctcgcgccgccgggggagagcgagctggcgcgcatgtaccggaggtgcgccgccatcgaggagctccacaggcgcaagcggagaggtccacgaaggcgctcaacgactggtacgagctcaaggccgtcctccacgcccaagggctgcggtggagtgctgcgcctgccgcctccggggaggagggcacgccggcgggatcaatggcccaacgacggcgacggcagttaaagattgggagtagcacagcggcacattcaataatactacctccgtttcacaatgtaagatgtatattggcaaatgctagaaagtcttgtaaaacgaagggagtagtaaataaataaagatataggggagacaaattatggtaactaggtgatatctgcgcgttgctgtgggactttataaagtcataagtaaaattatgttatgtgcgtaaaattgcagaacaatgattaagaatgatgactggagatccattcttcctgttactgaggaaattcttaacttagataaattggagggcatgcttagtatttgctatatataatatacttctatattaactatattaaatacaaatgaccacgtgtagtaatgtaaatcaaatggaggtagcaggatgtaaatgaaaaggaggtaaatcaatagtagagtaggagtagatattaattttaatatttgttcctggtaaacgaatggggatgcatatggtaaaaaagaaggaattgatatgggtaaaactggtgtaacaaaatgcgagatagccaaactggaaaactaatgcaattacaattatgtatggagcatgcttacacattgaaatacatgtacgaactgaaatggtggtcctatttttgagaaaaaaaatcagaccaatttgccaaaaggaaagaggaagatgatggctaatatagcttgtgctagctagcttgttggagtgattaaagaagatgatggcgtagagatgcttatgattccagcgagcaaactgcagcaacagaaatggaacaccactggtcctatatattgatgcatagggattatgtaaatttataggcagcatgagaaaagggggagttagagcatgcggcggcggtgtcttctccgacgagcatgtaaatttatttgtttggggatgggaatggtggggaagaggagagcggataggcactcagattttctccagggggtcaggggtagagtggtaattcaatatcttctaaatcattttttcctttttatttatatatttctttaatttaatatgggggatccacctaactgccaaccatagtaggggtaaacggtgccttcgtttaaaaaaaaaaagggtaaattcgcaaaccctagaaagtgagagcaaaatgataattaaagttgaaagttggggtataaacatatttgtccaaaaagaaaatgatgacatccgttttcagaatcaattgctgttgccaccaccatggacggttgctctgtcgtgcaatgctcggtgagaggatggcagctaatggggactggatgggctgttctagccgggtaatttgggccaggcttgactggcaactgagctatggagtgtggaatttggaacgttcagatcgaatggcgtggaatgtcagatcgaatggctcaccattttagatgacatggcctcacgattttacagctttacagtgttattgctctgagcgggtatcaactagtatctaggaagaagttcccacaaaaaaatatatatctaggaacaaggatagactttttctcttttttttttcggagcttggagaaagtccgagatgtcttttctctctaaatctttttttactagttttatatacagatttcaagaaaaaatacttaaaaatatctttccaatataatcatagtagtataattgtaatgcaattatactgtgattacactaataactaatttgtaatgcacgataacaacaaatcaagtatcccaaaatcaatcaaaaggggttgcataaaaaatcgatcaaaattagtggaccagccgtgcttttcttcaggttgtatgaaaagaacgcccactgtattaacagctggaaaccggactgactagtagcagcactacggcaatcaaggtcgaaactacgagtatatccgtattccgtaatgcaccactacagcaccgcgacaacatgtcgagtcagagggcctgtttggtacagctccaactcctaaatataactctaggagttgagtctggagtgaagttgtggagctgcctaaacccagctccacaactctagtacattttgtgagagagctccacccaactccactcccagttttggtggagctgaaactgtttggctgagctccagctccaggaggggtggagctggagctagagctgtgccaaacaggcccagagtatccgtaatgcaccacccacagcaatagatccgagtcagagtatcatcccatccgagacatatcgcaccacagcaagagtcagagtatcatccacaacagtacccagagacatcgcaccacagcaacagtacccaaaaaagtgcgtcttgctgataaaaaagatgatcctgaactccgtcttgctgaaaaaaaaaactgtaaaacatgaattcacgttatcagaataaacatttcaacaataaacatacatatgattcctttttgatgatataggtactctctccaaatagatgttctacctctgatgctgctatttgctcttgctcactcaaccgtagcttgtcacttcgtcttgctgaaagaaaactgcaaaacatgaattcacattatcagataaacatttcaacaataaaaacatgcatatgattctattttggatgacatagatactcacttcaaatagatattctacctctaatgttgctatttgctcttgctcacttaaccgtagcccgtcagtgctcagacgtggtaagtgccactgcaaaagggaagcgacaaagctgcttgttaattgtgtgttctcatgcaaagattaaaaggttctcttacaaattaaattaaaacaaaaactaatgaattagtccaacttacacatctcgttgtagtacttgtcaacgagaatagccatcttttggagctccctcaccagcgtgaactcctcgtggtcctggtacttgagggacgcctgcatgtcgagcctgcgctgaaccagcgccgcggcctgctgccggtcagcgtctcgaagcgccccgttggtctcaacaatggactgctcaagtcctgcttggtgagctcggcactctgcaagctgggtatccatatcgtctcgcttccgcaagactcccttgacagcctgccattaaatgaaaagagaacaaatagaaaacaatatgttatgaccagtaatcttggaagatcgcagcaaagtataagtaagacttcataatatacaaagccacaagagcaagtaatttaacatgttaacgccttataaaatcactaagtcaagatcatttggttgagctctaactagattagaaagactgctatgcggatgttagggttagggtttgggcgctgcccgggcgaccgtggtacggcggcggtctcgcacattgtgcaatggatttggatggggattgtctccgatccactcttgagtctacaaggtatacgcctgctgttggcaacggtgttggatggttcgattctgtcgtttctcttgattctgccctaaaagtctagatggaattctatcgtcaggccaagaaactatgttccctgtttagtaagttgcgttcaaatgatggaatttccatcagggttccctgtatcatattcggtggcctacatcgtttggaaaatcagggagataataggaagtctgatctgtattggaattcctgggcagatttcgtgggaaccggactcaggttttcatcggtgtaaaacggagggcttggtgtggccaaaggtacgattcaggaagtctcccaagtttggatcatcaatctgcaatctaggtttcgagctctacgtttcgccaaggtacctcatggcggctgccgatggtgggggtgataaagggatcattgttgagatggtttcccacccgaagccaatcggaagcggtgagggtgccttggagatcttagggcgggagttaagggtggagggtatggcggaggaaggaggatctatccaaagaccgaacaagacatcgacatacaagaagagatcgaaggagagcccgaatatcaatccatcgcagggaccgacaacctttacagagggagtggttgatgatgaagaggaggatgctctatgtgtgaatctggaggaggtggtgaagatagcaggtcgttacgatcttagcgagattctactcgttaaggattccaaaccaagtagctctctttgatgatatgcgtagggcttgaagattgaggtcggacattagctataaatcgctgcgggatagcatgttcatcgtaactttcatggcagagggatattatgaatttgtcttgcaagggggccgtggatacatagaggggatgctct

SEQ ID NO: 26836 - DNA, 5839 bp, Oryza sativa
cttggtactaacagcaaactatatgaagatagcaatgggaatttcttaggtttgatagagttctatcaaatggagagcattgcgatagagattggcttgtctattgtaaggaactcagtagagtattttgtttcagttgtaaattatttacaaaaggacatagaaagggtcaattagcgaatgaggggtacaatgataccaatgggaatttcttaggtttgatagagatgttggctgaatttgacccagttatccaagagcatgttcgtcgtattacaagtgaagaaactctacttcattatcttgatccaaagattcagaatgagttgatacacttgcttgcttctgctattaagtctgaaattgtaagtaaaataaagagagcaaagtatttctctgtcattcttgattgtactcctgatgcaagccaccaagaacaaatgtctttaataataagatatgtggattcatcttcatataatatctccatagaagaatcctttctaggatttttagatgtaaatgatacaactggacaaggactttttgatgtgctagagaatgaaataaaatgtcttgatcttgatatagatgatgtgagaggccaaggttatgataatgggtcaaatatgaaaggaaaacatcaaggggtgcaaaagagacttttggatgtaaatcctagagctttctagtctgcttgtggttgccacagccttgatttaacactttgtgatatggccaagacttgtggtagagctaaagacttctttggaatcatccaacgcatttatacaacttttgctaattccactaagaaatggcagattctgaaagataacataacaggattgactctcaagtcagtgtcagctacacgatgggagagctgtgttgaaagtgttaaagttatcagatttcaatgcgctgacattcgagaggctctacttcaggtattttacattgaaatattaataacgatacatttcctctggttgtcctcaaaatttaacttatatttttattttaatttcaggtatctgatgttgataatgatgtaaaaactagcagtgaggctaaaggtttggcaaataatgaacttagagaatatgaatttatagtggcaattgtcatttggtatgaggtactgtatgctattaatttagtaagcaaacatttgcaagcaaaggatatgcttattgatgttgctattgagaaagtgcaagggcttatttctttcttcaaagggtatagagaaactggtttcttacaagcattggaggcagccaaaggaattgcacttgagttggatatcagcacaacatttcgtaaaaagcgagaaattaaaagaaagagacaatttgatgagaacccagatgacacaaatgttgccacacagtccgcggaggaatcatttagaatcaactattttatacctattgttgatcaagctatttcttcgcttacaaggagatttgaacgatatcagcattaccaaaagaattttggtttcttatttactgctgactcattgcgatgattggataatacgagcttgaaatattcctgcgacaatcttgaagcaacgcttaaaagagatgaaaaatctgatattgatgccaatgaactatatacagagttgaggtttctgcaagatttcattccaaaagaaaatatgggtcctcttgaaattcttaagtttctaaagcggcatgattgttttccaaatgcgtctatagcatatagaattttattgaccattcctgtgactgttgcctcagcagagcggagcttttctaagttgaagctattgaagtcatacttgcgttctacaatgacacaagaaagacttaatagtttggctatgatagcacttgagagtggattgctggagaagattaactatgagcatattattgaagattttatttcaaaaaacactaagagaataatgttattcaagtaaagattatgcaaaacaagagttcaaaaggtactattcttggaatatcgcatttactctgccgtacatacattattttagctatatttggtacttgattttggtttcacttagagctttgtacatggcctacaaatttgacggcacggccctagggcgacccggggggagggcgcgacgacgcctgctctggagggcgcaccacgaccgatctgagagtgtgcctcacgccgacggacgccaccgtggccgggcgctgctgcgagggctccgccatggcagccgccgcggccgccgggccaacagccgccgaccagtcccgtggccgggcgcgagggggggacggagacgctgaagccggcgccccgctgaccgggctagagtcagagtcgacggagtcctcgctggagactgacgactcccgcaggtcgcggcccccggaaaaccccgaaaggacggcggcgcggaaatccatctcggaggaggaggaggaagaaacttgcgacatggctgagggtggaggcttagggaccgccgccgccgccggccggcggggtcgggtgaccgccgacgcggggggggaggactcaggactttaccgttctaccaaccagagtggaagtaaccctccatttgtgaatggggagatggggattggattttatataattactaaacgtaaaaagtaaaaaactaatgctaacccaatcgaagcatcctccctcacgcacgtcggcggcagcggcgcgccaccgtacggcagtcgcgagccacggcggcggcggcggcgggcagtgtcgcaatcgcaactcgatcgcaagcagggtgaactgggagagggaaacagagattggggaaagtaccaaccacaggagcgtcaggcggaactcgccgtacgtctggtctcctgccgcgaacaccgcctccctctcgccgccgtcgaggtgaagcagcgggtgcatcgataccacctccctcatcggcgagagctccgccatggcgcgccctctccctcgctggaaaactgagcgcttgactggagaggggaagaggaggaaggcaaaggcgagaagcaaagtccagtctggattttttttattgtaccgttggtttaacgtgggtcgtcgaatggatgagatccaacggtgaaaactccttctagtgcatagcgtgtagtagtagtgtatggcatctatctatctatctattctattctatttttaaaacaactttgaaaggagacaccacgttcactgttggggctagaaattcccacattaatcagagaaaaagaaaaggagagtccaagtaaaaatacaattcaaaaatagctgaaattcggaattaaaaataagcaatattgaaagaagtgtccgtataagaacccaatatgagattaatcaaaattcgaaataaaaataaaataaaatccgaaaatagaaaataaaaagagagtccaagtagaaatataatttaaaaataactgaaatttggaattaaaagtaaggaatattgagaagagtccatataagaacccaatacgatattagttaatattcaaaataaaaaaataaaaaatccaaaattagcaaaaagaaagaaagagttcgagtaggaatacaatttaaaatcaactaaaattcggaattaaaaataagcaatattgaaataagaatccatataagaacacaatacgagattaattaaaattcagaataaaataaaataatatctaaaattagaaaaactaaaagagagttcgagtaggaatacaattttaaaacaactgaaattcaaaatataaaaaataaaaatattaaaagaacactatacggtattaattaaaatttgaaaaaaaaaatctgacattagaaaaagaaaaaatatttcaattaggaatacaatttataaataacaaaaattgatgataaaaaataaaaactattgaaaaaaaagaccatctaaaacacatgacgagataaattaagtaacaggcctataaaagagtaaaatggtggctgtcatggttatggatactacatacctaatagtagttgactaaatctcggtaagacccaccacatatcatgtcctatacggaaacaaccttcggatataggaggagttccgataagaaaagacaaccagagttctacatggaaacgacaaggactactcggattgtatccatattggtttacctagttctacttggacaaggggacacttatgggtataaatacaagccccccttaggaggagaggggcgaatccacagacacccaccagggagaaccaacacaatcaacatacacccaccatgggacacgatcaacacgatcaccacgatcgagacccaccacaatcaacaaccaccacaatatacggaacaacagaagccaatacaagcctacatacgccaagacaagacgccagatatcgacttcagggataggcatagctattcccctacggtgtctccggataccgtcaggagagacgaaagcgctatctctgatctcgccggacacggattcgaggaagaaggctaccctgttgtcgactacgagtcagcccttcagaccgccatgtcgacaacagttagataggctaccccacatattgtactggtgtgattatggtgaataaagagcaacaccggctccggccaacaggatgtagggttattacctgacacttcaggggcccgaacctgtataaaaatccctgtctccgtctcttttacctcagtctcgctatatcctagtaccaacgatccccatactatgcaaataacagaattgcgacatcaaacgtcgacagtggcagttgatacgacatataaaaactgttaataacacacaaaatagaatcctaatgatgattaaaaggagggacgacaagcaggccgtgaagcaaacggacaaggcgattgccgggacttctagaaagtaaaaaaaaaacccattgataatcatattcgatttttaaaatttcaatgacaataaaaaggagaagcagcgtgcggagtatataggagtacagttgtagagccgccgacggttggcgggacttctagaaaataaaaataaataaattccaacaatagttatgtttgatttttagaatcccaatgacaataaagaataggcggcggatggccgtagaggagtacagtggcatcgtttgatgggacttataaaagttataaaaataaaacctaacaagacaataaactctaaaaaatataaggttcaatttttaaaggttcagaacttctaaaaagtaaaaaaaaatgataatcatgttggagtttaaaatctcaatgacaataaaaaggagaggcagcggacaagccataaaggggtacaatggcaaagccactgacggtttggtgggacttatagaaagtaaaaaaatgaacccgaacgataattatgttcgatttataaaatcccaataataataaagggaaaaatacagtggacgggccgtacatgagagtataatggcagcgtttgacgggacttctagaaattataaagaagaaacccaacgagataataaaaacaaaaaactataagatctaatttttaaaagttttaagaagaatgaatagaaatagtggtagaccgagcaatcaaataatgaagaatatgatagaagtaaggagtagtagctgttgtgacttttaaactatataattagaaatacggggatatctatttaataaatcttaagtaaaatcatactgaaaaatatatgattttgtttgggtggtagccacataattgcacgggccacccagctagttcttataaattcacccttagaagagggtgtaatttgtaactgccaataagattacgggctgcagga

SEQ ID NO: 26837 - DNA, 1124 bp, Oryza sativa
cttcatagtgcaccagagtatacgtactactttactagagtcttgaacaatctcttccttttgagtactgtgaacttgagattggaagtacacgttttcatttttatcgatatgtactgttacaggtgactgaagctttggcacaagcaggtcttgaatcatcaaatcttattgtaggcattgattttacaaagagcaatgaatggacaggttaacagaccacttcttgttttgaattctgtttctttatatttgctttgtgctgtgctggtagcctattacttgcgaattagtagtgttattatatacatcttgatttacctattattaggacaaacatccttttctaccttagttgcgtatgatgcaaatgagaaatggcatgtcaacttctcttaattctttgttataaatgagctctcactagggctgctgtctggaaggaggttggactttcttgaaaaaagtttattgagggagttagctactcctaataagctggttatttttctgtatctgaagtgcctgtgatgcaaatggcatgtcaacttctcttaattctttgttataaacccctaataagctggttatttttctgtatctgaagtttatgtgaactacctgttatcttttgacataaggagtgaacctgattccgtaacttcacaacaaatgcaatgtgcaatcttttgccaaacaaaaccatttaaagtaaagaaatgtgaaatggggcaattatgcatgtagcaaggatgcctctcatgttgcttgcatatcctacagtcatgctatgtcacaaatcatagcactctcatttaacctgctgagcttttctccattaggtaaactttccttcaatcgccgatgtctgcatgatattggaaacactccaaatccatatgagcaagcaatatctattattggaaggacactttcagcttttgatgaagataatttgattccttgctttggatttggtgacggtaagttcattgttcccattttccattttgatcacttggtgtgtctcagtagcatatttaaagaacaatgctgatctaatgcctcctttgtggctttgtctactggcagcatcaactcatgatcaggaggtattcagcttt

SEQ ID NO: 26838 - DNA, 649 bp, Oryza sativa
atttccaggaattagtgaacaagcagatatgcagtgtgttaaagctgttagcactgttgagctgatctcataaatatttaactttttctgctctcattttccatgaaactagcttgaaaaaaaaaacacatactactctggaatcactcacttatcagaagtattcatattagtttgcattgcaaataaactgcaaagagatgaacatttagacgcagcttttgttaaaatataagagctagaggggaaggaagcagagatcgagagtatacagcagaaaggaacacatgtatatccgcacgaatcttgatgcaatccgcaccgcacgtgggccacgcggattggaccgagaccctactactgtcataggcacggccgcataggcgccacccagtgattgggacgaattctagtaggtgtagcccttgacgtacaagctctcggacgtggcggcgtcgccggcggcgccgccgtacttgccgagcgtggcctcggaagttggccttgcaccgggcgaggaaggcagcctgagcggcggcgacgttctccttcttgccgccccacttcttgatggtgctctgctgcagggcacggccgaaggagaaggtgagcgtccatggcttgagcacctccagcttgttcatggcgt

SEQ ID NO: 26839 - DNA, 10701 bp, Oryza sativa
gttgtactcgtgagtaaaattttatactaatatcacactcagcccacgctctccagtacaacgtgtggccaggtggaggggacagctgattgatcgttgtctcctgcaatcgtaattaaattaagttaccctcgtgtcctacaaaaggtcaaggatcttctgtaggagtggctgttactccaaagttgagacatgttttcgaccattgcgtaaaaccatgttcgatcgattggcaccttttcaaacgctgggaaatcttggctccaagcttgtttcattgagtacttcaatttgaccaagatgttaataacattttttagctgaattgtctaaagtttggctagtaaaattgaacatgcaattcacctagaatgacgcaattttatcaaacgtcttacgtcaacgacacacggagtctatacacagtaatgaataaatatttgttacaagtatgacaataaataggtgcctaattaactcgatcgaacctgtctaaccttcagaacattaaggttctatatggacaagtaaaatatattcataagaactcgttgctcaaagttttctaggagaatttttaaaatcaaaacaagccatgtaaataaagtttttttagcaaagttgggcaagccacaatttgtgtggccaacaatttgttagacacacttctggtaagtggaaagaaaacgagactatgataagtggatccaatttcttaaaaatggaacctctcctatcataaaatttgttcagacttttttaaagagaatttctcggtctccatatgcatctttggacaacaaatgtgttttagttgatctattaacgtatttcgatatttaggatgtaatattgtcaacaaaaaaatcatgattcacatgatataatacttcagtcgtttcgaggctttactaattataagcattgcatggtagaaatgattttttttatgtaagtgaatgaaaacaataccttgcggttgcaacacatgactgcttacctcatctccacagaagatcccaactggaacacctggcactggctatttctttttgtaacaatataaagtcaaccggattttggatttttgaagacaagacttaagcatggagcaaagcaacccaagatcttgcttctatggacataaacatatgctcctgccagtaagtttctcctgaacttgtctgcctgttttctggaaaacaaagacggtcatgggttagtttaagacttgaatattctcaaactgctggtacactgttattcttctggaagaaaatacaccaaaccttttattccttttattttccaattcttttttcttctcaccgggatctaaaaaggtctggcctttgctttttttaaaaaaaaaatctacaagatgtggcttttagtactctagtaaataacctagcagcctctgaattggaatgtagccatgttggcgtcgtgtgactgctggacccaaccatcaggcttcagttgtggggcaggacagaaacgaaaatgagtagctttaagcattcagatttgtcctgccctgaaggaatttcagaattcttctcccattaagggcacaaaggatttgttcttttcccaaacaacgcaagcaaaagtggcaaatgaaaacttcaataatattgctggtcaaatcccactctaactaagaaatagcaggcattctgttgttccctcaaaaaagatatatattgttcatcaaacagagagattaagatatggttccagaagggaataactcagtaatcatcaaggagaaaagaaaaacagagcagcaggcatttcctagaagcaaacacaagttgcacggtgcatcttaagtttgctggtttagcaccatcgagcaatataatagtattgtgtcaaattgtagtcttggtccccctaaaacaatcaattcaactctatgctacaacagtaaaggcatccatcattcgatagacacaaggagcagcaaattttcgcatgaaatggacagcgcatttgtcaaaaaggcagtgctcaatttgtagacctcacctagctaaatagcatacatgtaacatcataaacaatgctgaacatggtccaaagagagagcacaaacctatggaaacatccaacttaagacatgtcttcttggctgtacatacattgaaccctatgaagaggctttatcccttgacctactcttttcatagcacaaaccacgtaatctactactacctttatgtgatatgaatggactggagcaaaaacctcaaggtgctcaacccaagtcatcaattttctaattgagaacttcaaagattcccttatcacattatagttttattgactagttaatatttcagtcctcatcgtaggcacaccgatcattcctgtactctaaatcttcctttccccttcttgatgctctttctgtgagaataaatccatgtaaaaagtcctttggacttttaatggctattatttcaatgggctaaggcagagtccaacaaaggaagatcatgctcaagatgctctggatcaagcagatggcgacattagctttgtgtgcctagtgggggataaggaaaagctggaaattagcagcactaacagcatcttagaaggctgggggtgctcataaccacaatctatggatattattagaaggcatcttgtgattgtggcgacttgtgtaattacaaataattaatcaaaggcatgcatcaaaggcagattttggtcagtaactagatacttttttctatttaataaagtaaaacaattttgtaatgaaagggaagcgccatatactgtatcacaagaatcccaaaattcgagttgcttggtcaaaggaaatattgatcaggtttggcttacttgatggccgaggaaacttgaaacaatctggaacaggatctttcaagaaggttacagatgccaagaggataatggtgagacttctactaaaatccttaatttttaatctgccactagaatgatagaatccttcaattaatccgcattactagttagtggactctggtcatggaagatacctcacgtttgcaagctttcattgtctctaacagtgtaagaaggaaccccattgatcacaacgtagcatgtaatttagttgacatttgtcattaacaaataataaaaaagaagacacaaagaaaagctccttaaagtaaaggtaacaggagatcctgaagcctgaaggtacacagtaggtgagcataagtgctagtagagatttctgctactgtcgatgtaccagtgtttaactgaacatatgtgcactaaaataagcaaagaataagtaaaggaggtcacctttaatttggtcctactacatccttcataagtgataattaaattttgatcctttctttggtatagtactttgatttagtataagtgcagaacaaataaatcaataacagccacagatatgttcagcaactgtcaatagaatctaatattttttccaaatgcaatattactaaaaaatttattaaccttgagacatcttctatttgcacctttttcccttatgtcagtactaatggtgttctgctttgcttgaagatgttcagcttctacagagagtaacaacgatgtcagatgaatagaactttgtactttgtaggataagaatgacataagactcatctaatacacccatgaatccaaaagcgaatcttacatgacaaaaaaaatctaatttaaaaatctaagaaaaatggactttcagagactttctatagtttctagtaggttcaacttaggaatttaacagatagagaagttctcttgacacattttcgattctttagtcactgatttctttgatttacgatggcagcaacagcatagtatatgtcccgctcctgaattcctgatgtagattttgcatcatggtgatcaaattaacatattgtcaccgatatcaagtgaatatttgacataaataagaacatggcgtttaaatgaatcatttatgaactatgacatttcttagtccaaaatcaggccaaattgattgcaactatgaattgtaactaaaaaacggtcgactcttcatatgtctatcagacaattacttccccttgtttaacatcacatagcactagatcaactgatagattgcccttttcgtagctgactgaaccaactaaatccatggttgattagtggttctcatccagttgaagtacaagtttttggtggagcacaagttgacaataaccaagaaaagctactaacattggatttttcatgcgcacacgccacagcccattttcaggttgatgcccccagccactatcatcttctcaaaagaacaacagctacgatgctggaaactttgtccaaaagaaagcatgaaaggaaattaaagcatgctttctttgacagtttgaccctgataagttcatggtcccctttgactacaaagagctacacaaaacaatcaaagtcacgtccaaaagcaacacgcaacgatgcctgatgccgtgctatctaaacaaacacaatctgcacgggctatgaattcatacatgcaaccaccgaagaacaactacctgaagtgctcggtccaaggccaattttgactgtacttgacagaaaccaaatttatacacaacaaacaagcaagcaaaaatgttgtcactcaccaaccttagttcttcctgtttgtcatttattctcctatgactcccatctaaaatgcagcactaccatagcaacattccattctcagaataggatcacacacaaggtgacagaacacctggtttttttagagagtacatagacaaaatgtcgtgcaagagcagcagtatgtgcacataattccacgagatttgttccttccgatacacatttttacttctttctagcccaaaaaaaagtaatgggaaaaacgaagataaattttattcaggcaagcaccgcttgggattaaacttttactactaataaattctcgcgatctaaaaacatatcattcttctattcaatgaaattggcggcctcgtcgattcgtcaaaaaaaaacatctcatccgattgaaataataaggggtggattagtttctgggatgatgatcggagagaactgaaaatttttttttggaacaattacacgaacacagcatgatcgaactatgcacgtacgaggagcgaggattggggccatacctaagacggatgcgcctcgccgagcccgcgccttcagcgcggcgggaggagcgatcccgatccagccatcggatcgcgaactccccggcggcggaggcggaggcggaggttttcccggcggcaaaacagagggcggcgcggaggggcactgtgcggcggacaggtgggtcccacacgatgagcgtgaaccgatggttgtgttgtgttttgggccttgttctatggtggcattggaataagttcactttgggtccctctatttgtcgctcagtccgattttcatcctgaaccacgaaaacgggtatgacccgtcccccaacttacgaaaaccggacaggtccctcggcagtatagagggcggttttggccgacgcgacgcctatgtgactaatttgactcagtcttcatctgacgtggcattgacatggcaattcgatgtagaaaaatattaatccacatgggacccacatgttagtttaacgcacaaattaataaaaatgatggggcccacgtaggccccacatgtcattctcacccttctcttcttcctcctccctccctctccacggcgtcacaaggaggtccggcagtggtggccgacgacgcgacaacgacgacacgggagaaggctgggtgtcggcggcgggagcgctggggggaggggctccgcgtggggggcgccgcccgcccctagaagctactcctcgtcttcgtccgcggcgccggcgcagaccccgcgcggagttcagagccgtgcacgtgggcggaggggtgcagcagtagttcggcgccacgcggtggcgccagagatgtcgccactcgccggcgggaggcagcggcgggcggatctccatggcagaagcggcatcgcccatcaacagccggctcgccgcgggccgtcggcggcggcgccgccatggctaaattctcgtcggcgaaatgctgcatgaaatctcggcggccaccagaagcaacctggtgattttggttagctctgttaattaattaccggctaaataaacacatacttttccacttttttccttaaccatcgttcacgagcacggtgacagcccggccacctcagcctaccaccaacggcctcggcggaggagcgcacctcgcctccgcacgccggctgccgggctcttcgcaccggcgcggactccagcgtcatcagagcagctcactgaatgggcgcggagctgcgcgaagggggagcaggcaggcggtgaggtcgtggcgatggtggagggcctctccgccccgctcgtcgcccgctccgccggccggtcgctccggccgccgcccgccacggaggaagacggagaggagagcaacaatgacgatggggagcagtgggggatagagagaaggagagagacgatagagagagggggatagagataaggggtagtgaagatgacaggcggggtccacgtgggccccaccaattttctattattgtgggtgtgaaactgacatgtgggtcccataggatttattattttttgattgaattgccacgtaatcaccacgtcaatgccacgtcagataaagaccgagtcaaattagccacgtaggcgccacctcagctaaaaccggggtcaaatactgccgagagaccttatttaaacggtttcgtaagttggaggacctgtcgtacccggttttgcgatcaagggacgaaaatcggactgggcgacaaatagagggacccaaagtgaacttattccggtggcatttgtgatagcccaggtttgggcttatgtggcccatttgttctttcacggattaaaccacatctaattttccaaaaaaagaaaaggaaaaaatataatcaccgtcaaatttgaagattgttgaaaaaaatcacgttgtttttaaatgcaatagataacatcccggcctttactcaaaggagctacaactttaaaaaaaatagctatatttatggcgccatatttttcactaaaaattagtcaacatgtatttacattgtaaatctctaaattacatatgtaattttagtgtgtttatagtgtaaatatcaaaattacatatgtaaatatcaaaattacatatgtaattagtatgtaattaccgtgtaaatatgatgtaactaacatgtatgctaatcaccgatactcaaatttgtttatatttactcctactagtaacatgcccgtgctaatgctacgctactattaaataggtcgttcctgtttacgctaatcaccgacagcctacgcacgtactactgctacacgaatctcaatggcatcaatggtctagaatccgactgagatgaggaacaaaatatggcgcaacatgtttagcaaatccgtaaaaaaaatcacgtggatgacttcctaattcctacccaccgaacttcgattacgttatatgtttcgtaaaaacaaattagcgttgtagtactatttgaatttatttaattttttatctcgaggcatgtacttcatttgtagtcacacgtaaagcgtgcaggcgtcctctcccgccgccgcatatgccggcgccgcgtgttacgcgtgacggcgcggccgccggcgcacggtaaaaccggtgatcaaaccagtggaatcgtggacgcgcgcgccagctgcacgcacgcacgccagcgagctagcgctcgccgccgaaatgcacgcgccctcgaacaccaacggcgccgtcgtcttcctcgccgccgccgtctcattcctcctcctgctgctgctcggctcgatccggcatgctcgagcgcagcaagaaaccgggtagctttcactctccatcgatcgatcgcttttatattacatgttgcagcagctaagtactagctaattggtgattgaatttgaatactgctcgatcgattgatcgttgcgggcagacgacgagatggagttcagctaccgtcgcggcgacgacgacgggccggagcggtgggggcacatcaggcgggattgggccgcctgctccttcggcttcggccgccgccaatcccccatccgcctctccgcggccgccgccatcgccgccggcggccgcggcggctacgaccgccgccgcctccctcgtcaaccgcggccacgacatcatggtgaggttcgacggcgacgccggcggggtggtggtcgacggcgagacgtacgcgctgcggcagatgcactggcactccccgagcgagcacgccgtcgacggccgccggtacgacctggagctgcacatgctgcaccagagcgagacacgcgacggccgctacgccgtcgtcgcccagctgttcgacatcggccaccgccgcgacgccaccctggacatggtgatcaccctctgttccacatcttctactatctacacgtaggcagggttggaaatttcggacgtcggtcatttcggtcccctccgatacgatattacttcgacggaaatttttcaattttgtcatgaattttggtcatatttgttcaaactcaactaaattttgttcaaaatttcggaccaaaatttccaaaatttcaggatttcggtgacctccgacacgatcggcctaaccgataaagtgaaccctgcacgtaggtcccgttcttttctccaacaagagttgaatgaacattaagattttcgtgacacgcttttcaaactgctaatcgacgcgttttgtgcaaaaattttctatacgacagttgctctaaaatatcatattaatctattttccaagtttgtaaactcaatcaattatacgttaataccacctcgttttgcgtaaaaaacttaatcttcatcttcaggagaaaagaacaccgccgtagaggaagactacgaaaaagtatacagttgtaacggaatagcaaatatataccaatctggtacctttaataccaaatatgatacaccgtataggtatgatgacatcagcatgatacgtaagtagcggatctgagcatgattttactaagtatcatgttgatgttagcatgatactataggtatcagaatctatatcatgttgacgttagctatttcgctataatagtatatcgttctatagtatttctactacacgtaacattgtaacatgtgatcgatgtctgcaatgtactacctccatattttaatgtatgacgccattgacttttttgtctaacgtttgacaatttgtcttatttaaaaaaaattatgtaattatcatttattttaatgtgacttgatttatcattaaatgttctttaagcatgatataaatatttttatatttgcacaaaaaaatttgaataaaacaaatggtcaaacattggtcgaaaagtcaacggcgtcgtatattaaaatacggagggagtagctggagccatacatcaagagggtggccaaaaggaggaaggggcacgaggtggagatcgacgacgacgtggatccgaggtggccggtgaagggaagcggcgtttactacaggtacacgggccgttccggcctgtcacgttttgtaactaaagctctatttttttttaatatattaacgtgtaatatttttttacgtgttaaaaaaaatctacaggtacacgggctccttcaccacgccgccctgcaccgaggggatcacttggactgtgtccacgaaggcaagccacacacatcacagatcagatcattaatttctttcgtgagttagtcgtctgatggcgcaagcaattgcgagcgtatatgcaggtgcggcgcgtgtcgcggcagcagatggagctcctctgcgagaagtcgtccacgatgtaagtaaagcgagtgcagtgcagtgcattgacgtgtgccacgatcgaacgacaattttgcgcttggctttgtcgtgagtaaaaacgtttgttggtttgcttaattgcagggtgacactggaaggcaaagtaacacgaactcatcgaagacggcttgtcaaattttcatgtttatagcataatagtaatgcatgacagatgtgtgacaaatttcaccttgatcaaaattaacagaatcaaaaaacatgctaaaagcaagtcatcagatgacacactacgggataaacaagctgcgacatagtactaggattttgaaacatgaatcggttaacctagctaactagctggaaaatccatggatcgagattgattgattgatttgattattagtattgcctagtcgaggcgacggaggatgccatcgttgccgacgccgcgcttgctctctccgtagtcctccggcctgaggacggacaagtctatctcgtgggcatggtcgcgggcgaacgccgcctcctcctccggcgtcggcaagcgcatgttgaacctggcgtagctctcggccctcgtcgccgccacccacgcggcgagctccctctcctcgcgcagctcctcctcctccctcttctcccgctccctcatctcgccaagcatcctgaacacgctcgccacggccccgatccagtccgacgggtcctcctctgccgccgccgtctccggctccttcctcttcgccgccatgg

SEQ ID NO: 26840 - DNA, 18936 bp, Oryza sativa
  unsure (1)..(18936): unsure at all n locations
atactccatacactcctccctcatcctcctccttttcttctcttcttactacagtacaccacacaaatttttttaaaaaaaccaaaagttagaaaaaaattatgtatagaaatactatatataaaaaatttaaattcaaattcaaatttgaatcgggtatgtaaacttttgacttataaattttaggtgtataaactttagatgcataaaaatactatatatagaaaatatttgaattcaaattcaaatttgaataagatataattcaaattcaaatttgaatcgggtatgtaaacttttgacttataaactttggttctataaactttaggtgtataaactttagatgtatagaaatactatatataaaaaaattgaattcaaattcaaatttgaatcggatatataaacttttgacttataaacttttggtctctaaactttagatgtgtaaacttgaggtgtataaactttatgtgtataaatttactaaaatagtaaagtaatgcggtgcaaaaaaagaaaccaggtagagagagagagggagagggggattgatcgctacccccggtcccgggcgatcgatcgccgattaggattttcgagtccaagttctagtacgtggagtagttacgtggcaggagatggaaacaggtctcatgagaggagaattcttgagcacagagacatttacccccagattacaccacagaagccatcgttacgccattctcccttggctcagttggtcagggtaactgcaaaacagtaggcaaattctcagaaaataatcaaggcacgcaaactctgtttcattccctccaaattcacataagaatgcgcattgacatacccagcttcttgtacatctcttcctctttaagcaccaccttccgcaactcatgcgctgcgtattgcatacggcgaaaatgaaactgcaccgatttcttcagggtctccatcctggccagcgccaccctcatttcctctccaccagccgccataccttccatggcatcctgaagttggttctcaaaccttaggcgaaggtaatgagcactgtgctcttcatcgagttcatttagatccatccttttgtaggccagggcttttaggctctacacaaatcagggcaattagtcaatttatcattccgcataaatgaatagatatctaatagaggacacaagagaggatgcatctcaaacattattaatatacagacagaacaaagcaaagagtagttcaaagagccctataacttaagttctgggtaactattccctcttagctcagatcatactgagaaatgaaggtttatcttggtccatcacagtccatacaataagtttaaattgaacatgggtgcaattgcagagcatggattaacataccagaaagaagatactacctccatcagtttaaatggaacatggatgcaactgcagagcatggattaacatactagaaagaagatactacctccatcccataatatacgggatctgcattgccaaaatcccttatatcctggggaggtagtattacagtggaggataacattattggacgatctttggaggcagtacagttcttcctagcaaacaacactgaccacttgagtatttcaattcagcatttatttgcttttttcccaagaataaaggggcaataagcctgtagcattttcacccaataagtttgatgcacagttttgcccgaattgtggcacaagttctagctaatcgccttgcccctagattaaatgagttggtgtcaatgaatcaaattatcttcattcataagagattgattcatgaaaatttcctttatgttcaaaacataatcctactcctctcaagaaaaaaggactcattcactcttctttaaactggatatttcaaaagcttttgaaaatgtattgctggccttatttgctggaggttctacaggttttgatataaaatggaggaactgggagtccaacactccaaccacctagccatgttcacttctagagttttgcctacagtaccaggagatgatatcgtgcatgcaaggggtctgcagaaggtttttgaggtggcaaaagaaatttatttactctctcggtctctcctcttaccaaaacatagcccgtttcagatgatcgctttacacagatgatgatgttcacttcactaaacacaacctaaaggatctagaagtaattggtagcattctatggctgttgctgcagcaaaagacccatgcagctgagaactcgctgaggcgacactggcctcataaccagatttgcagcctttgcaatgaagcttttgacgagatacatgccatttggccaaagaacatctacatatgaaatctggaacaaggtttgtcggatgagattctaaacataccttcacaagcaatttgttagtataggatgaacaggaggagcacaattgcacaactacacatcgattagtttagaacaacacatggaggaggaggaggagcacatagattagtttagaacaacacgaggaggaggagaagggcatgagaggaacttaccatggtgacgaagaggaaggggaacccggcgtacgcctggtcggcgagagcggcgaacttggggtcctcgtcggcgacgtacaccacggtggggacgtcgatcagctccctcaagggagagaggggctcgggggagggaggcgctccgagctccacggggtccgccatggcggatggcggcggctcgatccgcgcttcgccggagagcggcgcggcgatcggcgaggcgaggaagagctcggggtcgcgagacgcggagatggggatgggaggcgagagaacaaaaaaaaatgcagcgtaatctgaatgggttcttcctcgcagatgcttgaagcactcctccttcctgataaaccataatctgagatttgaggcttgcttccatatttatttgagatcacaaattctatgaccaaattctactccctagaatataaatcttcttctttctcaagagagtagatttgggctgttcgagagctccaaaggttgaagaagagctacaggggaccaggagggagatgagtgtgggtcccaccgttggtaccacctcataataaagtagcggaaacgatttctgaccgaacgatctagagagaaacagcatctgagccgttcatcggatttatctgagattctccggagcgtgtgggaccggaggacaaaaggtgggtcacgagagctcagcctgccaactgttgcgtgtcagcctgcgaactcttcgtctccatctccggctcccgcaaccgctcattccgatcagaaaatttaacaaattaattaaaatccttttgaacccttaaatttttgtttctaactagagtatgcagatgatttttttaaaaaaaaaagcttaatttgtcgaattttaagcaatccagttggcttttccttaagtacccgacgctgtagaggaagctgaatgcgaagaggtgcaactggacccaaggggaagaaagtccgggcgaagagtcatgggcctcatggctcagtccaagcaaagggaaaggatttcgtatatctttatggctgaggttggtaaacaaatttaggactaagttaaaagcaaacgtctatacaaatttagaatatagctaagcaccacaggtccatgaagtaattatgtcaagtttgcaaatgtacacacttttggccttagctcatcacaaccaacaacctaatgggtaagcacacagatgaataatggctacattgtttttgatatgctaatcatctgcttctacatatgaaccatgggccataacctacattattgatgatctactgcacaggataaggccaccgtcgccaattctttccttttgcctccatcgctccaagagaagatcgtggctcctccgcaaatgcatgtagtcatcgatgtgaaatgacgatctttgagtgttatcggggcagctgcttcggcgagacgcagcctcctcgaaccttgtcagaagtgtatccttggagccagctgcgctatcatgatctccaggactccaactcccgcggctgctcatagtgcgactgctggtgctgcatgcggtacttgctccctgaaatggtcagttaatcaggcaccacaatgcgatggtatgttgataacaattactaacaaagatgttatatgtagaaaacacataacagagagcatttttttctcaaaatattggcattctacttactgcagttaaaaatgtgttgttaaacaatttcgcagaatatcaataacgacatacaaataagtacaacaagcacaacttagcatagagagaacagagatggttatcgtcacctgtgtctttggtttgcatggagaggtttgaaggtcgttgcttgtttcccattgcagccagggaaggacaaccccgtctgcctcgacgggtgaagcaacttttggaagcgttattggagtttcgatcttggtgttttgtaccacatctcttctgcttgaacttgtatcacttctttctccatcaaaagatgaaaaatcagtatcttcaacatttgacaggaaatcttcgaagtattgctcagcctcttcagtaagacgtcttgacaccctggctctatcattgcttctctggaatatatatacataaagtctgaattcgcagattctcaataacaaaggaagaagtagcaatacagtgaagaaaacttactcttctatatcgtggttgcctttccgaattcatattcttcttaggagtaggtagcaattccttgactatttttgtgagttcatgcccacgttgttcttccgctgccaattgagctaacaattcctgtttccgcatctctgactgaaaaatacattggataaagcaataaagcatattaaatagaaatatgattccttaaaagagaacaagaaaaaaacactcatctactgaatattacctcttccaacttgctagtgtaactcctgcggagctcattaataacctgagttggttgtgcatcagcgcttgttgctttttctgaaggttcagattttgtcacgacctagagaaatgcaatcgaaggcaagatgcatgtaatcatactgtcatttacaatctatgtcaaaacatggcaaaggatttcaaaagtcaactattttagagtcaaaataatgaactagaaaaaatagcttacaactgtgcattgtgcacaggatattaacattttaagtgctataacttttttctaaaaggtttagttccgaacataggcaccaagagaaaattatcacagaccaaggaaactaatcaaaggaatatacggtgaatgtcattaggaacttttgctgctcataagttaccttttcaagctgagtcctgatttcatcaacagcttgccggacttctttacgcatcacgtcatacagtgcattttcatcctcattattactcaggcggtcctatcaaatgccataagcatataaaagggatatctgatatattctagttctaaaaatttaaaagaatatagtgagatcaaccttttcaagggtataaactgcccgaatccccttctgatttctgctatgaaaagagtcccgaaattcatcatcagttattgaagaatggctctgcaaaaatcaaggttaagatgagctcacaatgacacatggaagagccagaacttttatgcacgaaccaatggatggcactaaggcacaagatagcgcaaaaattttaatggtgtacagcactcaactctttcttgtgattttaatcaaattacttaaaattagaattagatgtggcttgacaactcgtgctcaggccaagcaactgacggcactaaagcacagggtaaggcaaaaggtttaatgatatacagcagtcaactctttcttgtgatttaatgaaaattacttcaaattggatgaggcttgatgattcatgctaaagtcactgtggttctctgctctagcaatggagttatggaggcataggtttagggtctgggctcaccaaattacggtttggggcatataaggcagcaagggaggtgatggcccagggatgcaagtgagtaatgcagtcactcccagtcccagatatcattaagcaccaagcaacaggttgcactgtggcacaaacagctacattatgcactatggtttgcatcacatggaacatgtcacaattatattgctattttcacatgcaaggggaaccacccaaataactattccattttctgcatccttagaaagcagaatttcttaagtcatcacaatagcagcaggcaaaagaataatatgtgatgtactcactgagctgctgtctcgtgaatgtaagaaatctttttgacttgtagacttcctcaacgattgatttactttagccgtcttatggaatgatgagttctgcaggctattattgctggatttggtatttattcccctagaaccataccggtgagaaatgtccatatcattctgcagtcataaacataaagcacagatttaaacagaagtagaattgcacatactagacaactagtagcaatgaagtgaaggcatataagttacacgatagcaaacaaaaggaaatacgaaatctaggatgccaaaccttaaaaacaaaggtactagtgggattcacagaccactgcaaagcaaaaataaggaaatagttcacctaattttctgatgaagattaaagataatgtggtaccataaatattaaatggtacattggctaacattatatataagtgaacaattacaatcatctatttatgcatccaagcactcccatactgttgggtaaaatcatgatgtgttgaagctatagatagcattacatttatgatagttattattgaataaacaaataatcaaatatgatagctattgaatgcaagctgatgaggtaaaactacctatggtcatcaagatcaatgttccagttgaaaagcagaaaagcaggtccatttgtgcttttgaggacaagaatactaccccatcacagacaatgcgatataagatcctcttgtcgattacggcagtctactatggtgtgtgtagcaagaaacaagtgatctaacacatttttatacagtcaagcaaatatcgcatagataacaaacatcatccaggaccaacaaactgaacggatacgtgtcatacaaaaacatatgaaagcattgtgtatatttttgttgtattacctagttgcttgattttattattcttataatctcaactcaacacatccataaattgaactaattcacgtttcatgaacaagcatgaataataccatataaacttagcaaccagtagaggtacatgaattacaggcatgaagcatgtatcaaatttccaaacagattttaaacatagcacaatgaacaattaaacaagtctaatatcgttaaatagaatcgtagcgagattttgcattcattgctaatacaaatttatttctaaaatgcccgataggactaactaaaaaatttatgacaatatatgacagcaaatccaaagcatatcacacgcaatccgctaatcccaatgaaattaactcggcataatgcaatcaactcctatacaaaaccgaacaccactattattattattacaactaaaaattgcgagttagattgtgaaatgctggtcacacttacatccgaatcacaccatcggtgccgatccatcgaagcgcgccggtcgacggatgcataccgctgccgccccgcggcagcagccccgccattggcgacagcagtggctccgcctcgcctctcggccggcggccgcgacaccgacctcccgcgctgccgcgacgactccgtctccctggcgtaccgcgcggtggagctccgccgaccgccgcccttctccgctggcgccgggaacctgagccgcccacgcgactcctccccgcgcacgaccaccaccgcctcctcgtcgtcgtcgtcgtcctcggactccgccctggcccggaagaactcgtcggcgaggtcatcgaggctgatctccggcggcaaccccgctccgccccggccgccgcccctgaccttgttgacgaacctcgaggagggcgtggccgcgtcctccggggagggcgatggcggcgggaacctactcaggctcctcgaccgccggagcagcccgccgcttcccccggcggccgcggcccgcccgcgcgtggtggcggagccggcgtcctccgccgccgccgcgaaggcgtccctcctcctccccgccgaccggtacgcccccaccgccgccgccgccatcgccgccggcgaccggagcagagagcagctagggttgcactaatcccctcacctctccaccggataagagacggaaatggcgatggcaactaaaaccttcttcgagtggaccgaacaaaattaattaaaaccaaattaattaattcgttttgaattagtatactaccattagtagtagtaacagttaaattcgttcgactttaaacccgggcccacctgtaggtgaggcggatggaggcgggtaagagtcaggcgggtgtcgtgggttgaaacggtgggcggattggggaaattttgaatttaaaaaaaagtgcgccaggttttgaggggaatttacgagattcgacgcctgacacgttgagctgacacgattttgaatttgtagtacaatttggcaacgggtccaaggctgtgtttagttcagcgcaaagtttagattttggttgaaattaaagataatgtgtctaaaaagttgtgtgtgtatgacaggttgatgtgatggaaaaggactgaagtttggatccaaactttagatctaaacacagcccaagagcatttactagaattacagtgacggagtttgaaattggagctgctgctaataatgtggaggagtattatatcgaaatcatgaatgatcattctgaattttgtttgcgtctttgacaggttcggttggtacaggacaatacgcgtgcaggtacaggaggtggccaaacgcggccacgtgacaggggaactactgtgtctcgtgtctcgtctcgtctcgccgctcgcccgtgacgccacaggccaaaggaggagagccgtcacgatcgcgaggcgtacgtgcgcgtggcggtctccgtcgccgactcgccggcgttgggcctcctcgtcggtgtcatcgtgtactccgccgcggcgccgacaaggtgggcaggcagaacggtcgtattgcttcggtgggaaacggatgggctgcaaaaaactagcgggaaagtttgaaatttgaagggtagaaaaaggagctccacccaatgatgtggggggatggggttgcggtgcgaagaattcagatgagtttgcgcatggccgcggtatttttctggttcgggctctaggcaatagttgtagaaaatgcatagccacttgatctcctaagtgggtgggttcactaggatcccgcacttgggaatccaaacgtgtttgacagctataatgaagaagccggcgacgtcgaccacaggagacgagagagagagaagccatcggcggcggttgcaggtggcgagaggggaagaagtcgggtggcagctgtggcaacaacacttgggcaacgacgacatgccctcgcacatttgaggaggtgatgagcgcatggtggccctcctcgacggtggatctgcgtgcacgcaaggcgggctcttgcgcgtgacatcggatccactcctcgccgtcctcgtcctcttcaataaccatgcaccaccgagcctcccttcatccctcgcttctccctcactgtcataccccccccctccgccgcctcattgtgcgccttcctccgccgttggtgccgccgccgaccaccttgagtggtcgaccacaggaactggatacgaaggaggaagacgacaggtagtcaaggagtcgaatctccccgcacggtcacgtctcaatcttgaccttcaccgtgccattagatagacctccgtaggagctggccattggtgctagcgtgggatcgaccttcgtgggagctaaccgctagacatggcgctagccgtgatgaaagagctagagccgaagctagcaaggggagggcacgcggacgtgaggagggcgaacgacttcgaccatcggcagagaggagagggaagcgaagaaagagatgaaggtgggacccacagtgggcccaccattttggccagttgaggtgctcatttggccagctatataggttggcagtccaagtagcaaggctgttagagggagtttttttgctatgcattggctaaaattttgttgggagagtcatttgccaatgttgttggggatgaggggcttattcgaaatatgggataggaaaagcataggaacatgaaaaaaaaacaataatatgataggattgtaggtgtgaaatagaggattagaaaatatagaaaaacgggtaaagctatcattcggatagtgcaaaggaaaacatagaaactttgattcattactagactagaagtagtaacgtgataaacgtattatgtaatttacaatacccgtggttccgccaggacgtgagctggctgccgacgccaacctcgtcttctctttcctagagaagagcgagagagagaaggaagggagagaagaggggaaacatagagtgatgacgtggccaccttgacatgtgaggtccacgtgggccccacgctaaaggacctagtttgtactagttttgtaagttgggagatgcgttatatccgattttacggttcaaagacgattctgtaactcaatgacaagttgagagaccttcggtgtgccttttccatttgtttttctgctatttcaaccaatgcgttccatcaaacaatttagttggaccaaggcccaagaggccttccaacttacgtggagtaaattcccttaactttaggtggagtctgtctgaggtccctaatccacaataccaaaaatctctacccattaactatcacaaatcgtgaaaaaaaaaattccgagcagtatcaacttaattttcctctggtttcactgacggggcatacggtgggccccacatgtgaggagaaaaaaatgggtctgcatctcttcttttctcttttcttccttctcttttctgaaaaaaaatagaaataaaatttttcgcacgacacataaaaatttcccaaaccttccctttcaaatgggccctaatcacccccattacttcccaaacacgtctttgctgtgatcagacgtctcatccaaccccatcatattggcattaacaaactggacctggtttttcttttgatgaatggccatgtcactcaggagcaggagcagcagttggtggcccgatcaagccgacggatgaggacaaccacggctatggtgagttgtgattcaaattcatttgcacttaataaaggccagcttctgctatccgggggtgcgggggcggagccccagcggtatggatcgtcatcccttttagggttccaccatatatatacatcttgtaagccgccatgcggcgatgtaacctcacctcagatatagtgaagatattttgctagctggcgcccgtggttttcttctctcctgttttgggagggttttccacgttaaatctcgtgtcttctgtgattgatatattgttttttatcgtttgttcgcctatcgtttcctaacagtctactgtctactgaacccaacagtcaggctctcaaaaaaaaaacagtcaagctcacacacactcagggtgtgtgtttatagatccagatgtaaagttttaacatgtcatattgggtattatatagggtgtcacataagatgtttgggcactaatagaaaaactaattatataatccgtcagtaaacagcgaaacaaatttaatatatttaattagttataatatgtataattagttatttttagcctatatttaatattttatacagatattcaaatattcattgtgataccatgtaaaatttttatgtggcaagtaaccagggcctcacactcacaatggaccgcctcctttactgcggctttgtccggtgcgcggccaaaaaaccctgacgagtcgtccaccgaagaagaaaagtccaaagtccaaaacaataatcacgtcgccaccggaaatgaccaaactggcccccgtattgtggtcgatgacatgcgggccccacggagagcatctccggtgagatggacaggctagcagcagcagcggtggtggtacgaggcgctgcctttcgatgtggggcccacgtggcgggtgaatattcggggctttcaggtttcgcacacatctttttctttttcatttttttggcggcctggtggatataccgagctgtccttctcttgattcagaatttcgctggtatagccctgggtagatgtgagttttttcaaacagctccttctcaaaaggtcagcgcctaacatttgattttgaagttcatatctcactgccttggtttgaagttcatatctccagtttttctcagcaaaggttatgtggatcgtcataattttagcagcacactttgttaacttcataaattatgtatcgagacaaacaccaggatttatttcattatcaagaaaaataaaatatatataagttaaggcttcgacttcttttaatataattatgttatcatagtacagtcgtgtcaagcaatattttataaattagctaacagctggatatcataactttacgagtcatatatgtcttcaaaaatatgtgaacgatgtcatacgtgtttcttttaaaatgcttcgtcatgcctagtaagaatgtttatattatgtttatatgctttaagcctttcaacatatctttaaaaaagacctttcaacaaacgggtagaagtatttgttgggcaactaagacaatgattacattgatgatgaactataagtcatgttatatgccaaaaatcattataaacaaaaccatacaatgtcccgtcatatgagatttacaagtcacacaaacatttacgatcccacgatataatgcgaaggcatacaaatgcacaaaacaccacgatttcaaaacccacacaaccgtcacatatgtgaagtattcggtaacttagattaaatgatggcctatgttggatgacgaactatatgatgttatcaactagaaatcatcataaataaaaccacattatgtccaaccatatgagattcacacgccacaacaaatcccacaatacaatacaaaagcatatggatacacaaaacaccacggttttcaaaacccttgcaaccgtcacccgtgtctaagaccctgtttggttccatgggctaatgtttagccctcaccttttagcctcaaattagccctcaaggatccaaacaggtgggctaattttgagctaatgtgaattagcccccctcaaaacattagcctttccaaggggtgctaatggggctaattttgtgtggggaccatcaaaaaacagctctctctctctccttctctctcctctctttctactctctctatacctttaagccttgaattagcccatggatcaaaacataccaccctagactaatgtttagcctaccaattcatgactaaacattagctttcaaaattagccctgtgctaatcttccaaacagggcctaattactcctaccctggtaaaccacgtccccaactcccaaggacccatccgtgcacagtccacaaaataaaaaacattccgaggactaaactacaaaaacgcaaagcaaacaaaatcgaaaaaatcccccccataaaaccgattttattccccttattacacatctcatccgcctcattaacgttctcatttccactctcctcctcctccacctcccccctcgcctcgatccccgcggccaccgcgcctctcctcccgctgccgccggcgggcgccgcggccctcgcccccgccggaatccgccggctcgcggcgagcattccgagctccgggtcgcccgaaacctcgccggatccggcggtgctcgacgcggctcccgcgagagcagctgcctgtttcgccgccgggacgccgcgggcgcggatctgagggtgtttggtgggaatttggtgggggggttgagttgatttggccttgggttggggttgggttgggttaggctggttggcgggggaagctgagggggataggaggaggttggggctttgtggctgcgcctggtacatgagcgccgcgagcatcctacgcggctgcgtcttcgtcggggagcttccggcggcgcgatgatcgagcagttcgtaaattttgtcatccgtccgccgcggtaattgcactgtaaatatttttttcccactgaaatgatgcctcgtgctgtagactatcatgtttcgctgtattagctcggttctgtgatttagacggtcatgcttcctaagccgtggttgagtattaatcttaccacttcaagcattgaaaagctcagtacttgaaatatccaaaagtaggagtttgaggctgttatttattaatccctgctgttgaaattactgtactagcttgtcgaacaattagcggagtgttgtagtcgcaagtgccgcaaagggggcttatgcatttagttagcacatcaacattcattccacagtactctttttcctaaagataactttacttgttttctttaagatgcactaatgtctaataatggagttggaactcggaaccccacaaaatgttgatagtcaactgatgctttttatctttatggtatgaggcagttaattggctatgcatttgcagtgcagagtacaatccagatcagtatctgtgggaaccggagtttactcttgcgggaagaaagtacaaacgaatagatttggaggcaagtaaggggagctttttaaggccttctttctctttcatttgttgaagaaaaaatcacccttttactatatattagccttattctgttacttgtatatggcagcttacgaacggaagagaccagaccttaaaatgcagccactatgttcctgctgtcatcccagacaatactgcccttccttgtgtgatctactgccatggaaataggtatttatcatagttggattatgcttataggttctcaatttcttatattaatatgatcaatcttttggtgggaccaacattctgatcatagtttacactctaattcttggagaccggtcatttatctgttagttacagtctctgagttattgagatgaatcattaattttgttttcttcttgtgcttatcgtattccttacaagctctttctcttaactcaatgcagtggatgcagagcggatgcaaatgaagcagctgtcatacttctcccttcaaatatcaccctctttacacttgactttgcagggtcagggctatcaggtggagagtatgtcagccttggttggcatgaggtacatagtcatcataattttttgaaaacacactcttattgttttgcaattgcactaatctgataaaaatacaatcactctcagaaacaggatctcaaatgcgcggtgtcctttttgcgaaacaataaggaagtttcttgcataggcctttgggggcgatcaatgggtgctgttacaaggtatttggttaaagcgtttgtgtttcccagtttatgaccaattatccaatactttatttctcttaatgatacattattttttaagtctttggatacactagaatctttataatatataattcctgttgattatttgaattgttacttagaagtacccctgtccataaaatattttaaatatttaggttctatttatgtattgaattttggtaagttcttcataacttctgtccaaacttttgacagcctactgtatggagcagaagacccctcaattgccggtctggttttggacagtgctttctctaacctatatgacttaatgatggagcttgtagatgtttacaaaatccgagttcctaagttcacggtatgcttgtcatttttgcagaatagtcttgttcactgttactatgaactgaataaaggaaccattcgctttctggagtttgtatgatataggcacatgctttgatgaactttagcttatgcggtaatccgcaatcggtggtttatggtgcttggttataccgcttgtcaccttgttactgtgcttcagctgactgctgtgtgctgtgtgcatgacaaagaacatgtatctataattagaaaataatgtgtttacatccagaaatagtagtctttagggagctttgtgcggttcaaatgttttacaactctggttgcgcaactgtgcatgacactagctaactggtaggtaatgtataaaaggtaagaaaagttttccaaacttcagttcatgctctataatataataaaattctagtattttctggttatatatcaagtataggaataatctaaagttctagttagcgatgctagtttcatgttaattgtctgctaagttaagtgcctaactgcccactgactgttgcaatacttgcatcatataatgtttgctattatttatattgttcaggttaagatggctgtgcagtacatgcgccgtgtaattcaaagaagagctaagtttgatataatggatcttgatgttgttcaggtgtgctttctaaattaccatttgtcagtttcaatggaaatcaaagctaacattggtgtttgcctaatcacctcttctgtctccttattttacaacagtttgcccccaagacatttattcctgcattatttggacatgcatcaaatgacatgtttattcagccccatcacacggaccgtattcatcaggcatatgcggtaagtctaactcttgcttgctttacaaaggctgaacagttaatggatgcatgctaaatacatttataactcattttcttggtgtatttgtctacagggggacaaaaacttaatcaaatttgatggcgatcacaattcccccaggcctcaattttattatgattctgtttcaatattcttctataatgttctacacccacctcagtttccttcagtatgctcaaataagttagataagtactacaaccttggtgcttttaaggttggagctggaacaaatgaggtgattatcctttttttaatgcctatattatcagaaattttgaggaaattaccaaccaatttgcttgtatttttcagagcttactgtatgaaatcatcaatggtctaagggctgctggtcctgatgcaggcagttcatcggcagctgcagctaacttcacaaatggtgtgagtcagttcccttagtaggttattaaattgatatcatgaattatcattgtgatccctaagtcaattcctttttcattttgttagctacaaaatcagtggttgaattgctgacagagagggtcaatcagttgtctattaaaacagataatgacttggtaagttcatcagtggttggtttgcctcaagtacttgagatcttagctgagtatctccatctgaatgcaggattttcttttggatgaaaatcataacctcactgagatggacactcacactgctgagtctcatttagaggtaaaataaatgaggattttgaagcataaaatagtttttttttgcattgtaatttaacactgtgttctgtaaacatctttacatcaacatatggtatagttcccttaatgtggattaccatatgtttgttgttcctacaaaacaccaaaagcatattttgttgctctgctacatttgattgttccctgagtacagaatattacatagaactgttttgctatctcactgatacaaagtattacttccttttgtaggataaatctcacaggcaaaatgaggagtgctgctcatacacaagttcaaaccgagagagctggggaagatgttcttccttgggggcagcgagtgatggatcatccctaggcgagcgccctgaaattcctagtcataagcataaggtatgtcttctttcttttctcatttttgatgtccatctattgcatgaccatactgtccttttttcatagggtacttaccttagatatttttgttaacacatcttttaaatagatcctcaagtgaatgcatatgtcattttgtttgttacctactgaacctctcaaactagtgacattgctttgtccctgacaacaacggaaattttctattagatctcaatctcatcatttgttctgagaacctggtagagcatagaccgctacgaggcccttagagcaacacccactagagaacggataccgaagggaaatccgctcgctataccaaaggagaggaagaatcgactctatggaagaggctcaaacaggagaggcaagagatgggggagagcctaacccagcgattcaggctgtgcctccaaggccaggctcaacacaagagaaccaagtcatcttaacactgtgaatacacatcttaacacggaaatatccgctaggaacacggatgacacgaaggacaggaaatcacccctgattctgactcttggcgccaactgtacacncntnaaagaancacatcacttactgctcaactaagcctatcangcaatccttgtaattgccattttgtaccttatcattttccacgtttgattatgtaaatctgaaggcatgtactataattctagcgtgtgaccacccctggtctttggggtagtagttctagtagcctggtgcattgtttctaagatctgggtaggcttttgagttgaaactgtattgacaattgacatgagaacgtggttcgctgtggtgttggaacagtggaccgctctcattactgtgcccacagtgtaaaagtgtgaaatgagcatgtcagttgcatgaccatttgaagtagagaagtttcatctgagttctgagtcccttgaaaatgttcaattt

SEQ ID NO: 26841 - DNA, 995 bp, Oryza sativa
tatgggatggcgttacctcactcttgaagctgtaagagttagaagcattgccaatatcttttctagagtccatggcctgtaaagagctcttgttagaaactatcctcaggcttggcttcagaaattcttgcaactcatactttgacctgagatattacaaaactaactttgttcaatgtttactccgctatggaagtcatcaacttaagctatttaaatttaattgtatgagacagccttatacagataaaattacttattttaaagggaaacactactggcttgccccagtaattaaattttataaaccatcaaaaaaaagtatgagtgataaaattacttcaagtgattaggaaaaaaaaaagcttcgcacatttcaaattgaatgactagctagatatatgttgttgaaaactaaacctagcaactcatgggtacaatcaacaaaaatggctgatgtgtatttcataaatgcacctgatgaaatctgctctctcttcctggctagaatcgggatgtggcttgtgatagcctcctggaagaaatgcctcatagattgcattggcgtaagagtttccaccgacttctagcatggagttaatctcatcatcagtccactcatctagagtgactgatagaacctgtgtcaagtggatattgatttcaaccagaaaattcatttaagcttgtattgcctctagcaatattgaaaaatgttacacatttcctcgtatcattttgcagtttaaactaaccagcccatggttgttctaaatcttactaaaatatggatatcattgttatcatatcatggattcatcaagaaggtcaaataactttttttttctagttgcagcgagtgaaacctttgaaatatgcgtccccagacttctgtgaattccagaacattttaggcatatgaaaactcctatattagctgatctgtataggaaaaaacacatagttaatttaaaaggagtaaacaaaccatgttg

SEQ ID NO: 26842 - DNA, 1607 bp, Oryza sativa
ccatttttgttttctcagtacagcctgatccttgtggttatatgctgctggcacatagggcagcgcaccaaattcttcccgcattcataacaggtctgcgaatcattttatcaggcatgctgccatttataacaagaaattatgtagaaatagagaacaataaggggaaattttctgcacctgatgtccacatccaaatgcaagatcctttgatttatccatacagatagcgcacacctgaacccacacacaaaaaaaaaagctgcatttagtttgtaatccagtaagattctcagggtttagcacgaaattggatggtacataaaaacttaacactagaggtgtaggaactttccatgatctgcggattaacagtatgcccaaatgacataagaatgtgaaatgcaatagcaatattcagcataatgtagttatcagatcaagatcaaatgggccatttgaaggcacgatattttttttttcataaagggcatccgtgaaataagtaataagccaaatgaacgcaggcagggtggtcagaacagatagagcaatgcaatgcaacttcccctgtttcaattagcctcccgaaatgccacagtacgaacaaaataaaagggagactatttgttggtggtgtacgataatgacaccaatgtagtcttgcagtatatagcttaaactttattttaccaatgctacagtgttgcagtatatatcttaaactttatctattcaacatggtgtgaatataaacaaaaatacttacaagtcttccttctaaagaactttccgaggtataagtgtcaggtgcagtggtagccacaggctgtctctgtttgaagctttcagattgctgaaagccacttgtttgtgggccgaagctactagatcgtgaataaacaccagaatgttggtcaaagctagtagacctcgaataagcattcctcataggtggcggcagaggaattcttggctgtattctttggcgacggctgaaacgaaagaaaacgtgaagaaaatgttcaaatggatacaattgctgcaagcacaaactctagtacatttgacccagtgcagtcctgggaaaacatggattaccctagaagttggagatcaagtgttgccttgtattgtgttgggatttccatcaaggcggatagtgcaaattctgcctccttcctgtcagctgctatgctctttgacatgatgtccgtgaaattcacaaactgcatgaaagcaaacatttttacatgtctctattattgtgaaaaccacacaaaaataagccaatgactggaaattaaatgtagaacagtcacctggaaattgtcaaatgagcgagcaggtatattgtcatcaaactgatgcatcatgtcccatggtccatcacccaccccaacaagaacaatagacaaggggaactggctggaaatttatttcgaaaaaaatgttaacacgtgtgattcgggacatttgatttgggcagaatataccgatattaaattagggactcgatcaagtacctagcttttactatagcatcaatcgtatcacgctctgcgggcttaactgcccagactgtgtatcaacacttcgggctgcag

SEQ ID NO: 26843 - DNA, 15087 bp, Oryza sativa
ctggaactcatttcaatttaggagttggcttcgttccaggcctgacctatttgaaacatgtgatcggtgcttcccaataaaaatagagcatgcttagtttgttaccattttcaatcatactaaatttgggcatgccaaaatttgacaagcggaaatccaaacatgtcttaggccccgatagtttcctccatataacatcagcagccgccaaaatttgatttttcaactaatttttgaagggttttcatcgaagtttatttttcagtattatcatttaaatcgctaagaatacatatgtaaaacttttacctataaattattagtagtttgctattatccgtatttggccaaacgatgggggccttatatatataaactctggtaatatgctggaaactttttgacataacttcatgcaaaaatatctcgtaaggttaaaactaaaaaacaccgacttacctatcttatcttacccaattttggcattgataagctttacaagttttgtcatattttttccattttgtacaatctaagactcactttcgttaaattcatgtgttcatgagttaaattactggacaattggagagaaaaaacattcacatttgaaaggcttaattttggcccaaaaccaaaagcactccaaatcttgtaataatattaaatagctccatcgtttgctctttagtttatcgatcactgtcgaaacgtgaattttaaatcttaattttagaatcattttgattttttttattttagtttattttagtattggtttttaagtcattgaaatatatacataaaaaaatatttttttaagttgctataagtattaccgtttataattaggttagttgctataagtattaccgtttataattaggtgtaggtgaaactatggaactgtggtggcaaaaactatattagtaagctttggccatgacaatttgtaacctatatcatgttaaaggaaccatatgcgagttgtacacgtgttatgactagagaaaaggaataagaaaaacagagtagctaggagaggacaaatggcatccaagtaccacatcaccctgattttccaaatctacaaatcgtcaatatcgtcatttctgcgctctagatctgatgcaagacctcaggccttagggtgacatctcgacagtaacctttaagccaataattcttttcaaaacctttaagccaataataatctaacagtaagaaaaaataaaaataaaaacaagacaaaattgatgattcatatccatagaatcaaagctttttggggcatcttgtgaagtggatggcaacatgaaagggacctccatttcatcctagagatcagataaagtgaactgggaattgtgatcaaaatcttactgaagatatgtgaataaacaaacaaatcaataagtgtcacatgtttggtctagatgctaggatcagaatttctagcaaaaaaagcaggatatatgtaaaaattcagttgatgcactgctaaagtgctactaatatactatgatttgttcttgatgctttattctggaagtggtgtcaagtgaactgtgcaccttgcacactttatgtagaccagtcatcagtttttcaatcctgtcactggtcatatatatagctgaagataataacatatgtcagttctgcctgtggcaacattggccttctctgattggcctgtacttgatgatattgtgatcttaattggatgactctactaatgcaacgagtttccctcaaaagaatactcgtagcattttaatcactttaagtgtgacatttacaatttccgaagaattaatcttcaccttgcgctgccattgtgcatttgatttgaaatagtgtagtaataaatttaccatttattttacggtaatgctaaacaacgtatttcgctctacctattaagtaccatgccttgcagccacccatccatcccgctcccctccctcctctcctcattcccctcccgatgttaaaacaaaaaaaaaaagttactctcaattttacccaaacgttggttctgtcgttagggctttactctctcctcctgatgtaaaaaaaatactatctatttggtgtagaaaaaactatcccgtcccgtccccttccctcccctccccacaccctctctcttttcttgatgtaaacaagttactcttgatggaaatatggtatatgttttggtaactcttatcccctctaccccctttccttctaatgaaaaaaaaaacactccaggggtattagacaaaaaaaatcttggaaatttatttcactagaacatttattctatgctttcccacttccctcccgatgcaacaagaattattctcaccccttcggaaaagggtacgagcaatttattttacattgtaagaagagagtgggggaggggatagatgaagagcctagcataacaaggtgtaagtaactgtacatgtgggaggcgggaggcgtgaggtgcactattgaagctaaacaatgtgctacactctgtatattagttctagtatatttcgtgcataaatattcataatgtcttatctaggctcaaggccatttgaagggaaagcatatgaatttgataggatttcattgtcataggattttttttttctaaatggatctgaaacaaagaaaggacacaatacctctatacatgcaaattttggagaaaatttaatgagtttcaacctcataaaatgtgtcctttcaatctctatcttttcgtaaactcctatgtttttcgtgcgatctaaccaaacatatactcatgtattttttccatttcgtagaatctaagactcactttcgttaaattcatgtgttcatgagtttaattactggacaattggagagaaacaacattcacattgatttactgtactactgtaggtcccacacaaagcacaataactataataaaaatatactccatccgtcctaaaatataataacttttagcattcaaaatttgtcgcaaaatataaataacttcaccaaccatatttccttctcgacaaaccataaacctccactattcaaattcttcaccaacttttatttcctcgaaaaatcgaaaacttcttccatttaattctactaagtattcttgtgtaaggtggtgtttggattcagggacttaactttagtccctgtatttagacactaatttagagtattaaatatagactacttacaaaactaattacataaatgaaagctaatttgtgagacaaattttttaagcctaattaatccataattagagaatgtttactgtagcatcacataggctaatcatggattaattaggctcaatagattcgtctcgcgaattagtccaagattatggatgggttttattaatagtctacgtttaatatttataattaatatctaaacatccgatatgataggaacttaaatctagttttagtcccatctaaacagagtctaagtctaatacttcttgtattgtacagcgggatgtagccacccacaactagtactaattataattagtattttttatttgtgatgatgtcataaatacaagtggcgccacgctgcaggtggaatacaaacggaacagcacgtgccacgcgtccccgctgccaactcgactcgactcgagtccgaccgagcgagcgagcccgactcgccgcgcgtcgccgacgccggacccgacccaccccacgagccgagccggatttattcccgtttcccgagaagcccatttgctactccacctcccggattcgctggcggcccacaacccaccagccctgctgacgaggcgcccacctgtcagttactcgcagagagggagccagcggatcgggtcgggtcgggtggtgggtccaggcccggatcgcgaggcaggaggaggggtggcccaccgcagcagcgcagagccaaggcacagcacgcacgcacgcacgcgcgcgggaggcccggtcggtcgtcgcggcccaccggctgcggccggtcgctttgcctggctttccggttttaccccccgtaaaaaggaaaaatgttcagaagatcgatatgcacgaaatcaccctggattttcgtgaattcttactttcttctattgcaaatgtacgatcaactacacggtaggagtatagtgccgatcaaatttagtatggaacatgtttttcttttttttttaccatccttcttttgggatagttacatatgacgaggtaaaaatcgatctcaaaagaaacagcttatgaaccaagaatagggtgtgattatgtttgatcatttttcctgtttaaaaaatttagtccaaatataaaaatgaataaatcatatttaaagttcctttaatgataaaaagtcgcaatgaaataaatagtgctaaaatattatagttttttcaataactgatggtcaaacttgagaagttaacaccatcacatgttataattataattaaataagtagaattaataaatatgattaaacatgtggatcggataaattttaaggaattttagagggatataaataattatatgaaaatcctataaaattaaaattcatgaatcccaagggagactttagagctactccttgcagtgaacaaagcttctactgtatgcctactagcatgtcttgtgcgcatttacttttttgcgtggaggtttgtttacttatcatggagatgagctggtaattccatttactccctaattaaaatctgatttcataattttactgcctttagactattcccaaccaagacactagacatagttttcataaactctacatcatcaaaaaactagtactatacattaatctttcaatgcaaacaccactattccatacttaaatttaatgttgcttatctcacatgatgttcttggatgttatgtagaaacaatgtctcttttctcacgcaaagacatggtttccttctcttttctcatttatttacttgtcacatcaatttttatcctatgtggcagcttatttaatgttatggacaccattctaatcattgggttgggaatagccataatactactttgcatgtttatattcttaattgcatgcatgcttcaattcatttgttcctctgtgtggagctgcactttcaggaaaaagtcatcactagatcatctcagttgaaaatcttgttccatcaacgtatcgtctgacagtttggaaaaaatgtagtagcagcttactagctagatttggtcaaaagactttaacgtcacaaaaacaaattaagtcatacaaacagataattaattccactctcctccatatcagttaatcaatgacatttgacactttccagaccatattctttacctaaaacatctaacagttttttttttcatcgagcaatagaaatctatccaccagagtggtttcttagcttcatctcgatcctacaaaaccaaacttaatcttcttttagcacgcattccaaactactaaacgatacgttctgtgtaaaaaattttatatgtaaaagttgttttttgaaatatcaaatatatccctttgtcaactttgtaataattaaaacttaattaatcatgtgttaataactttctcgttttacgtgtgccaacttaatcttcatattcgtccgttccaaacaccaccttaaagccatgaagatatatagcatggaagaaatagtttacttatagaaatcgaggatgctgctagcgctttttaagacaaaatatatataccatttattgtttattatcatctactaggctgtgtttagatccaaactttagatccaaacttgtaacttttttcatcacatcaacctttcatacacacataacttttcagtcacattgtatcaatttcaacctaaacttccaactttggaatgaactaaacacaaccctagttttctgtctgtatttcttttcagatgaagtataccgatcatttccatagtcatctaccgctatgtactaatgaacatgtgctttaaaaagtttagaaagtcaaaagaaagaagctggagtagtcttgttttctcatgaaaccagctaaaattcaatgcaccacccaaacttgaccactttctcccatctcatccaataagcatcaaaaccttttcacctccatcaaaaataaaacccacccttctcacctctttggttcaagcaaaattgtgacaagcctcaacaaaaaattaccttctctcaaggtgcaaagctgtaaaaaaaaactgagtaaaaaccccattttacccttgttcccataaagcaaagagaaggggaaaaaaatgttgtgtgtgtaagtaaagccaagagctcactaaacctagttttgcccaaaaacccagagagaggaggctccaaagcaaaagcctcactccctttccccatctcctccctcctcttcgccatttcgtcgaacaccttctccgatcgcgcgccgccgccgccgatgggggagcctgggggcgccgaggcggccgtctccgcgaggctgctcgagctggcggccgacgacaacgcggcggggctcggggagctcctcgcggcgtggccctccctcgccgacgagcccgcgccgtggtacaccccggcgcggggcgcggagccgctgaccccgctcatggtcgccgccgtgtacggctcggtgggctgcctcgacgcgctcctctcgccgccctacctcgtggaccccaaccgcgcctcggcgtcgtcgctctccaccccgctccacctcgccgccgcgggcgggtccgcctccgcccccgcggcggtctcccgcctcctcgccgccggcgccgacccggccctcctcgaccacctccagcgccgggcgtccgacctcgtcgcgctcccgcccaactcgctcccgctcaagaaccacctcctctccctcctcggcgcccgcaaggagtggcctcccgacccctccctccccgacatcaagaacggcgcctacgcctccgacgacttcaggatgtactcgttcaaggtgcgcgcgtgctcgcgggcctactcccatgactggacggagtgccccttcgtccaccccggcgagaacgcgcggcggcgcgacccgaggaagtaccactacagctgcgtgccgtgcccggagttcaagaagggggccgggtgcaggagaggggacatgtgcgagtacgcgcacggggtgttcgagagctggctccacccggcgcagtaccggacgcgcctctgcaaggacggcgtcggctgcgcccgccgcgtctgcttcttcgcccacacgcccgacgagctccgcccgctctacgtctccacgggctccgccgtgccgtcgccgcgcggggcgttggagatggcggcggcggcggcggcgatggggatggggctgtcgtcgccggggtcgtcgtcgttcacgccgccgctatcgccgtcggccggcgggggcgggggcgggggcgggggcagcggcggcggcggcgcgtggccgcagcagccgagcgtgccggcgctctgcctgcccgggagcgccgggaacctccacctgagccggctgcgcacgtcgctgagcgcgcgcgacatggccgtcgacgagctgctcgccgcggcggcggcggcggcggactacgacggcctcgtcgcctcccccgcctccatccggtccgcgagggggaaggcgcttgtgccgtcaaatctcgacgagctcttctccgctgagctcgccgccgccgcggcgtcgcgctcgccgcgctacgccgaccaaggcggcgccgcgttctccccgacccgcaaggccaccgtgctcaaccaattccagctgcagcagcagcatagcttgctctcgccgcgggcggccgcggtgacaccagagccggtctccccaatgagctcccgcctcctcgccgcgctggcgcagcgggagaagatgcagcagcagacgctgcggagcatgagctcacgggacctcggcaacgccgcgtcgctgctggtcggctcgccggtgagctcgagcatgtccaaatgggggttcccctccggcaacccggactggggcgccgacgacgaggagctcggccgcctcaagcgttgctcctcgttcgagctccggtccggagccgccaatggcaaccatgagcctgacctctcatgggtcaacaccctagtgaaggagccgacaccggagaagatgatgacgacgacatcggcaatggattccattggcatcttgggacagaacacaagccgtgatcacatcgtcggaggcgaggatgacactgccggagtcatcagcagctggcttgaacagctccagctcgatgagatggttgtctagaaacacaaaacacaaacacaaactgaacaagaaatgcgccattcttttagatgtgcttcgccgattgctactactactcactacttgttgctacttgctagcatcaatcttgctattgattaccggtgatacattcttttgggggtgatgagaattatttagcggagaaggtgatgaggaaattcttctaccatttagcattgcccgtatgtaaaagaatcggaggaatcggagcctagtcaaattgtatcaaattgccggcttgcctaggtgaaagatttctcctttgtgtttcttttcgatttatccttgtattaatctttttaatctcttttcgctgtttttcttttctaaaatgtgactgaggatcatgaattatgttatctatttgcccccatcctttggttgtgaaggagttggaggggagggtatttacatcaaatgttgcttagtcctaacaaagctcatcattgatgtaatgccctacaaattgtacccatgattcatgattgatgtaaaattcctattgtagtaccaagattgattaatctcccctgtttcctgcatttcttttcttttcttcagaaagcatcatatacatgtgccctttatcctgtgagaattacattatcgcatactccctccgtcccaaaatataagaagttttggttggatgtgacacattctagcactacgaagctggacatgctgcctgtccagattgtccagatttatagtactattaggatatgttatatccaaccaaaactcttaatattttgggagggagggagtatcatttcacctgagatggcattagttttaaaatcacatggattgtgttcagttgctgttctgatggttgcctgatgacaacagctgttggcatgggcttagtttgtgcagtgcttgactctgtggatgtggtcatgatcacaggtcggcagatcggcattgaaaaagattggcttggcctggattgcttcccttctcctggaggcattttgaaagggatttggatattaagatggttaacatcatcgatcaatgcgaggttaatgtttaatgtgttctagatgacctggtccctcactgatgcaccctgtcagaataaaacaacttggggacggtggctcggtaagctcgcctcttgtctttgttcacagtgctgacttgtactgtgacctggaagaaacatgggttggctactattttcatgtatattgtgtagcgtaaaatttccacgaaattgctatggtctaagtaaaattcagattgttgcatatttttattctagtgaagtgtgaatgcttgatgctattgtgatcctggttaaggtagctcttttaatagtataacactgagtttcttggtctttctgtttctttttttagccattcttagttcctaatttctacaaaaaaggaagttgtcttagatgttacagggtagtttctggatgtttaatgatgcattcagatggtgacagtattgaaactggatggaatattgcaatggatgtttggtttgcatttcatctacttttgatatatttggatacaaggccagatatgtggctttattattcatcatgtgagttgttattaaatgatgtaaatattttttttaagaaacagttaggtccataatggctatgattagaatatgggttgggttagggaacctacctctctctgctgacattcaggtgcatctacttaagctaggtcccaacaattaatactcttttttgtaaaattgtcatctcaagcataaattggtgcatagtaattgcatcgcaccatccctactcttgatctattaaatttgccatatgattagatatgtctggaggcaattgatatcggcacatgcctgtcaagctataatagtacatcaatataaaatggtaaaataattaatttgtctttgaagaaatgtttcatggggcccttgagcaagtggatctcgttctattttccacaataaaatttagtgagcaagctaataggcattatgcatatatagaaaattatccaatgaaatgcagccttcctttctctttttcaaatgtggtttggttgggacttggagaatggggattggagggtggtacacaagtgacctcattcagatgttgatttctccattctgagataactaatgttgctatttagagttgatgtgacatcaatataatgtattattaaaaactaaaggggcaccaatctattggtgcaaaattgacgggtaggagggtctgcatcagattttgcatctcctttgcctacatagtttgtatctatacatgatggtgatgtgctcttctgtatataaaatgtttttttctcacaggtatataatagcattctttgtcctactagcactggtagaaatttgttctgaattgctattgtaaatctattcaatatttatgttggacaatatcatcttcggcgaaaaacatttcaggtggctagaactaatttctgcaccaaggaatgtagtatttctatttccgattttgccttttgattaagactttctaggggataacaaaagaaaataagataaaaacaaatgtcatgtatcatgtgtgtcatggtgttggcttcttttttgacatttgttcgtcttgtgcggaatgctttttcgcaagttgcgtccttttggttttggggttgtggatgtggaatttgtcgttatgcggtgtctaatttatttctttgttttaggtattgaatcataggttcattaaagaactatatacatagcataagtagcaaagtctaattgtatgatgcatgaatgcaacaaaaaaaatgtctacataaattatcctatgccactaaaaattttacacaattccttattttcagactagtttttgggtgactaaatatattataagtggcaaaatttgctgcaagacattcaaaaaacttgtaggggacactgcaagaatacgtatctattgtggggacaccgtaaaaaactagtaatgatacatggtgtcggagctatatgcgagccgcacatggcaggcatgagcaaaattgtactttcacgattatttctctctctatttgcgctagatataataaaataaagtcgtgggtgtccaataactaattaccattttttgtggtgtcccaagatgaagggatagacgagtagctcgtcatgccactatcactggtaaaccctcgtttccacattcccctctcttcttgccttccccggtttcctctctaatggacagggggtaggcgactcaatctaatggacagggagtaggtgattgcgatttgccgcctaaaatctagagccccatcggttgccctaataagccgaagacaaaaatttaaattttcaaacttaaaatttgaaaattaattttaagatattttaatgtagtttcttttttagcattgacttttaaatcgttaggaacacatatataaattatttttacttataagttaatttttatttcctaataagccaaaatatgagcaactgatgactcccctagtagcatttttccatttaccattcatttcactgaaatatgcgcttgagcccacataattgaggctgttgctgaaggtttctgtgattcatcaaggtttctgtgattgcagactggatggcacagcaagtcaggaacagagtagcttggcccctggctcctggctggcctgatcaatcttgcagggatccgatggccacgtggcagaatcctgaccctcaacacgtacgggcatgagctcgatctgcaccactatactccaaacatctgcacgcgttgctgcaggcaataacttctttgtctcgatggaatttactaccgtcagaggaattcagtaaatgaacagtaaattcacatttttctcattggcatttttattgcagtagaaaccaaaaggttcagataagtttgttgggttaaacaagaagagagatgtccataagcttattgatgtttttaaataaaaaaactagtagtgttatcttgagctttatcatggccaaaatgatggtgaatcttgacctttttttgcagctgaaaagttgaaataaatttattggattaaacaagaagggagtgtacttttgttccttctttaattaaactatttcagtgaccttgagctttaacatgataagaagagaaggatagtccatattgatatgtgggtccaaatgtccaatacatgccacaagtcggtcaattagcttctagatgcattacaaatgtcttacaaattcctatttgtaagactagaatactagaccttcaagtctatgaatgacaaacagttcattctacagtatttttttcttaaaaaaaaatcattcagtttgaaactagcagttgatgaaatttccatacaatagaatatgctagaggtgccaacaacacatgatccacaaaattcttcacccaaacagtatgagaggcaggaccactacatgagaaaatgtttctgcagttcagtccaaccagtagacaggctactgaaatgctgccaaaattgaatggcagcttttagccttttatggtttgtttgggatgcaaaaaattcatataataccagagaggaaaccttgctgcaaatattttgataagacccataaatctacagtatatcagtatgctttgaattatcagtagaaattagtatcagtattaattaactggagaagaaaatgattgccggtggaatacaatttcgcgcatattttctaggaaaagcttgggattgcttgcaacactggaaagagtacagtggtgagaccaggagatagtacaatcctattttctttagattgatcacttccccatctcaatctatcatgttcagtgagaaaaccaatcattttcatctgatatagagtatcatgcttagtgagaaaatcagcatggcagcaccatttccttcatctgtcattttcagttggaaaaaccagtcagttagaggcaccaacccatgtgcatacaatcactctctgaaaatctagacaaggtatattttccctctcagctgatcaatcaactgaagaaaattcagaacacagccattgtcaccaggtagcaagtgcatcacagaattaaccccatgtatgaggatctagtcaagtaggtttagaaattaatcttcgtgtgaatgaatcagcaggcaactaagcaggaaacaatgcaatgaataggagcagatgagcaggaagattcagagattgcagcgtagggtgactgaacctgaaaggagtaatgtgtctgaatcactgatttttcagaaaacacagggatgctcttgaagaagggttcatgcttggcttgtgtcattttccatgagaacagacacatggctttgtagttctgttggatatggacattgagaaggactactctctggattttgagctggatgcagccatgctttctaggataggttaacaatctgctttgctttgaggcttggatcgaaaggagtttgttctaatagggactaaactttaggaaggataaatgcttcatggaagatatggaggcaagttggctgtaactgtgatctagattactgtgttcttgataagtcatgcaaaagcagatagcatctctctctccctccctcttgaagagaagaacaaaaataaaatagaatccatttacagtgtttatgctgttggagaatgactccatcctcgtagcttgaaaggcccacaatagtctcaaagaaacaagaacaaaaataaatgcctgaaatacactgttccaggccctgttctattattcctcaactagtacaaaagtttcgggttccctcaagttggatatatttatcatctgcactctgcaggacatatcattagcaaaacttattcagacaaaaggagaaccgcatcctatcttaccataaagttatcccccactaacttcttaaatttaacatgcaaagataccacatcatcatccactaacaagatgccacatcatcatccactaattaacaagataccacatcatcatccactaacaatcatcacatttaaacatcatgcaaacatgctatatctttatagttttataatttaagagcttatcaaatacaaacatgttaaattatcatccaacataattcacataatgtttcaatgtatatctttcaatgtaattcaaagtatgaattaccccccacccgaattatcgcggtcgtctgagttacccccctgaaccacaaaaccggacattcttcacccccaactatacaaaccagacgaattacccccctcgacccaatccacggtggttttggtatatgtggcgtacacgtggtagtccagtcagcgttgttttaattaaaaaattgtgggacccacatgtcatacactaatactctctctctcacccttttctctcccgcgcaacgcgcacggtgaggaccagcgcggggggcgaagcgtggaagcggagcgcggcggcgcggacgtcggcgctcaggacttcggcgcggaggcggcggaaaagtgtggcggcgaaggcgggcggaggagcgtggcggcggagcgcggggaactgagccagttgtgggtggcggaggcggcggaggagtgtggcgcgcccccgccgaagaggacgcccgccgcccacggtgcgttcccgtgagcccacgacgaggatgaggaagccgccgcccaccgcgcgtccctgcgcgcccggttggcctccgcctccatcgcaggccgtcatcg

SEQ ID NO: 26844 - DNA, 4614 bp, Oryza sativa
ctccaccacgctccgctgccacgctcgtccgccgcctccgctcgtccgccgcctccgctgccacgctcctccgccgcctccgctcgtccgccgcctccgctgccacgctcctccgccgtctccgctcctctgctgccttcgctcctccgccacgctcctccgccgcgctttgccgccacgctccttggccgcctccaccgcctccgctcgtccgccgcctccgctctggcgccacgctcctccgccgtgctccgccgccacgctccgccccccgcgcttgtcctcgccgtgcgcgctgcgcgagagaaaagggtagagagagaatagagagagagtatttagtgtatgacatgcgggtcccacaattttttaattaaaaaaacgctgattggactgccacgtgtacgccacgtagaccaaaaccaccgtggattgggtcaaggggggtaattcgtccggtttgcataattgggggtgaagaatgtccggttttgtggttcagggggggtaattcagacgatcgcgatggttcgttgggggggggttaattcatactttttcctttatgatatcctatatacttatatagttcatcctcacttagtgcttaaatgattaatctatggtccaaattatctttctccttttttcctctaattaagtcatatcacatcgctgtaaaaaaaagtcatatcacatcaattgtttttagcctttagatgattaatctacggtccaaactatctccctacttttcttcttctataaagtcataccacattactttttacgaatcaccattctacatactatttaaatttaaattatcataaaccacattaatttacttaatttgatgttatctagctatcttacacgttatatttttattgttatcatactaaattcccgcagcaatgcgtgaggtttcacctaattagtttagtttttgggctctctgagactagtgaaatcgtcattaaaacagacaaaatggcatagattgtgttgagattatgatcacactctgctacaaaatataaatattgctgcacgtttccgaaataaaatgtttatattttaaaacggaaatataagtatttctgcacgttttccgaaataaaaatgcttatatattttaaaacagaaacggaaggagtactataacagaagccagttaaaagagcgatagagtttaagaaaaagatgggcgattcatttggtgtgagccaaacattgatatactaacaatttgcttgtattagcttaccgattactaatagacaattagcttgagaatcaggatggacgcacagcataatccagcaaatggattaactattaatgtttataggactacatgaattcttttacttcactgataaaggagccctcattgtactccgttcaacgaacaaaaaaacctctcaagaacaatgaagcaaacaattcctcaatgatacggtacaattcctcactatgatttcacctagttcaggtatgatgaacctagtagctgatgcctctccggcaaacaaataacaaatggaaatgaattccatgttttttttatttcctttgtcctagggtgtttctgaatctgttatctcaagcaggttgatcaaaagtttctcgtcagtgcttctgcaatgccatcagcaacaatgttttgagttatctagttaaccggggatatcttgaggccccttgttcgtccaggagcacctcctgagagagacaagtcgagcgataacctgtaggaatacaaatagagaggatcgtggaatcaactatcattagcttgaaaataaggtgaatcagctatcattaccatacataaaattagggggaaatggcttacaagtttgtggttcctttctctgcttcgttagtctcagattgcaacaaaatttctgagtttgttttggacaggattgagtaacatgcagtttctttcccgtccttgatgactgatcccataatgaaagttactatcagatttatgatgaaacactaataataataaaatggaaggaaaaatgtaaaagctcatgtttcttacaagaatcatttgaatcttcgtggtcatcatccaaagaaagcaacttctgcaggtcacaggtaaaaattaaggaacagaacagcgtattgcaataagcatctctcacaaggaaagtttatgcagccaaggcacaaggttaattaccttcaaattttcataacaagcttcaaggtcatcatttaccaaaagatgatcgaaaagacctggtgaattggactggtcaagctctgcacgagcattcctcagtcgcttctggatttgctcctctgtttcagttcccctacatagccagtgcataaatcaaaaagtttatttcatatggtcaggaattgaataatcaagtacatgagcttaggctatcactgcattttgtaaactacaaatataccgtgcccgaaggcgcttctctagttcctcgaacgatggagggcatacaaagatgaatattgcttcaagagaagaagccctcacagaacgagctccttggacatcaatgtcgagaatacacctcttcaatgaaaaagcaatggaaagatgtagcaattcacctttcagaagttttcatgaaaaaagagtaataactttaccttcccctcatcagtaacagattcaactgcttcaacgctagtgccatagacatttccatgaacatgagcaaactcaagaaatttgccctcacttatctcttcctcaatcttgcttcgttctgtgaagtggtaatgaactccatctatttctttctcccttggagctcttgtggtgtggctaacagaaaatccaaactttgatggatattctttcattaattttgcaattaatgtccctttaccaacaccagaaggcccgctaatcacaattggcttttggccctcaccaattactcccttgctccatgcaacaacaactgtgcccttaattttgctctgctgcttaacaaaaggagtgtctacctaaaataaacaaagcagaagaaaccatgccatctcagtaaggtgaatattggaaaagcaaaagaaaaggagataagtatactgatcaagtgcactgagaatacaatatactcctaggcctctagacagaaagcacacagaaaacatgaaacacaaatagaccccttgtgctggcatctagtgaaagagaaaccatgctttcaggtcaatgcagaaaatatgaaacacaaaaagacccctgagctagcatcttgtgaacgaaaaatatacactttcagattaacaaactggcataatgcaccacaccagcagattaacataataatgttatgacatgaataaaagaatagacttctagcttacaagtaatacaagagacggaagtagcattattatataccatatattatataactatagaacaatcaatatgcatgagagtctacaggaacagcaagaaaattattttcttgttaagtttgtatgaaaggaaaccataagagtatgcagtttccttggtgctaactaaaaactaattactttccgtaaattaaaagagaacagaagtaaagaaaagaagagcgcttgcatcaattttccagctttacctcaaggaaccagatagaatcattcaagggaacacccttctcaataatcagtatcttctcattgtttacgagaaccgctgagtgtgagctggttggatttggaggtgccccaagtactgtaggtacaaccctgcataaacacaatgggagtgactaactaccaaaatgaaagcacagtaaatagagatcgcaaaccaaaatgacagaacacgtaccaagtctgagttagtttgtccaaaattttgatggtaatcgatgacttggggtcatctgatctgctgataacatactgcaaaaagcaagaacatgctgttacaatataaatttagagtactccctagtaagattaacaccgattgacaatacacaggggagtatgctttacttacgttaaatactgtcaatagtactagctggtccaactaagaatgagcaaagacagatataaacttgacttgatattaggaacattatcagtcatgttcaaaagaaaaggcaacactatcagcatagttaattttaatgaatagtggcgctatttatcagtggtgacagattgctacgaacacgttttcttaaactcaagcaacataacacaaagtgacagcacacagcctagcatctcaaacaaggaggacaaccatcatgggtatgtaaaatcaaaccaaagttacagtacataaatgaacctattaattcaacttaccgtcttatcgcctatatctatggcattctgcaggcagtccttggattccaaggcgacgctctcgacacgaaactccggagcctcttcaccctgtggccaaatcaaaaccagagcaagttaagcatgcgggtccccttaacaaactcttcttggcatccacacataataagcagcacattggcaagcccctgaaatatccaccacagctaaactcaccataaaatgcgccgtgatcagggcagacgcgcctccaatcctatatacagaaataaaacaaccgaccaatta

SEQ ID NO: 26845 - DNA, 8224 bp, Oryza sativa
ctgcagccctctgctctctatagtttgacttagtatgggtttgagcttaccgagttcgggcctagggaggttggagtcatcaaccaatcaatttagttcgattactaggacggcaactactctcctccacgtgaaacatcattaatcgctacaacaccaagttctactgccaccgatatgaagaaagatgcgatgcatcaatcttcgtaacccgcgcgctagaatcaagaaaattactcgagcttggacatcttctcaatagttcattggactattgtcactgatgtcaccgcaggcacctttcccattggtacaaccttcatctctggccaactattgccaaccatgttctttgcttcgggatgagtgacttcgtcttcaccaccggctgcctgctgccaccaacttgtgacctcgccttcacggttggcctactccacgccgcttatgggagacttcgtctccaccaccaattgactctattgccccactgactggtggctttgcctccacgccggttgactccatcgctccactaatgggtgacctcgccttcgccacacaaggtcaacctcaaccgtgacagaaggacaagcgacatgctctggggctcaccagctcaaacatgaggatcacacattcaatcttgacttgttctagatacgtgcaatagtaattcatacccatgagcctatttcctatgcttaaggtatggaccagtcattacaccccacgagggccaccgactgagtacttgtgccagttgagactcagataccacctttatttcactatgccccatgagagataaagataaaccattcggatcagaagacactcagatgagatgcacttggtccatatcaccgaagagatatgtcattcgagagctgacgaaaggagcgatacacgtgtcattttatcttgattttatcgggcatggtgggcctagaggctagtgtgttcgtgacccaataactaccatgcattgtgaattaagcatgtcctactattcattaggtggtgttgttccaacaacccacgtgctatttaccgctttttataaaactcagatgttgattggaaaagacccgattatataatcaatatatcactcgagtcatgttactctagtattcacatcgtatatactgcatcaaggtttaagccactcggctagcgggggtattacatagtcgggagctacaccttttaggttcatctattcgatgcacttgtttattcatttatcgacggagccctccacagtctctttgcaagatatcaaaaaagagaactcaagaaagaagcacttaagaagccttcatagcaaatatgcagtactcagtattggtcataaaccatggaaaaactacaattcgactgtgaaggtctcggggacaaccgtagaagatatgggtactaggtacccacacagcctgtatatccgactacagataagaagtgaactgcatccatgtaataagatatagaataggactcaatcgtcatgctaccttatgccataaggcagggtatagaatcccatctgaatactaccttatatagattaggaaactgaagacttgtctggctaggttttcctctttgtaaccctagcctccaacttaaataaggtgggcagggagccccctcaggggttgaccagacaaaagatccatgagatcaacacaaccaagatcaccatgatcaatacaatccgaaatatccaatccatcaaacataaataaagtattatctctcattgagggggttaatttgaacgtgtctaaactctcgtgtgctacccctttattctccacaacatcgatctttctccacaagcatatatatcgggttaaacatattctccaaagaagaaaataaagccatataatcttatatatatatatatatcttcaggacatattctctacaccatagtgatagactagtttccacactataaaagcacggcaaatatcaccaccatgaactcaaagagccaatagcgccaccaacaaattattgacactacatttgagacaaaaaaaaacacttagacacataattaaccatgtctaccaatgggagcagcgtgatgatcagccctgtggtgcaaggaaagatgcagcagggcgtcatgaacggcatgcaggtaatcacttaaattaaacccggttaatatctagagagaaagattgcatttgacatttcgtatatttgccgtaatttaataaacctaagagattaacgaaccatacatgtttttcttctcaaattagaactctaacatcggcaacagcacgagtgtccctgtgtctggctccagcttcaatggcactgccttcctcagtggcaactatgctaatgcacctgcaccggctcggcaggtaaaagaaaatacagagcgaattcgttcatttgggccaataattttccataaattactgctgtttgtttcatttttaaccgattattaactaattaagtagtgatgttatttcattcaggttccaagtttttctattactggcataggagggaacgcaaccttctaagcagctagcctcagatggcaaaaggaccagcatgcataattaagcttgaacgaacgaatgaattatgtgtgctgcaaccaaataaaaaaccgcttaatagcgtgtttgtaatataatcctatatatgtatgattaaataaaatcatgggcctagctgggactaagctaaaaaggcattttaattgatacatatggattaatggattaatggatgtctcagtgtatgactcagaagatataccttgtttacatactccaaatatgttgttatttcgttgttaaatatacaagtcatttcagattgtgcggatgaataagttgtactagctaacttttcaatgacctttagttatactaaacgaatgtgtgagtgtgaacaatctaagacagattacagaacagataactcctggatataaatgaagtaacttcaaacaaaccatactgtccatacataaaggaaaaggcactaaaaatatgaaataactaggggagaggtgacatttcggataacatattttatttgactgtaagtcgataaagaaaaactacaatgattatacttgttttcttcccataacaaccacaaactgatcagcctttgtattctaaggagaaaagttaaaaaaaaaactcatcaaacaaatacttaagagcctcactatggtgctctctactggtagtagaaaccattgatttcatttcattgatttcatttgatcaaagggtttagatctatttatactactaccctaattagcggtaatagaaatgtggaggggcattattataaaaaaaataggtgcagagggtataatcgtcaagcagtgactataccttttttttcctttttttttggattttttgatgatatatgagcgatgctaacgcaatgaatgatcatatatcaatttagtcgggaaagaacataaataacaaagtaactcctcattattgtaataataaattattaatttaccgctaataatactggtagtataatacgaccagtagagaactctggagcatcgctcaatacttaacgtatgaaacacatgttgcaacaaaggtcgacagaagtgccttttaagtggattataaaaatcatgtcaccattatcatatttcacttccttaggaagataactgagagaggtagacaatttttaaagtatttttctattatctctaagtataggtagtataaattaaactaggaaatatagtaactttcttgaaaaaaaatagtactactacctccgagtacctactcaaaaataccgtgaaattacaaattttcagaagaaaaaattcaatacatagctcataaaacaatgcggtacaagaaaaaaaagcacaaaaaatttccgttttcgactagaagcacatatgccactgatttttcttcgattccgtcgtggttgcagttatgtagtcgagtgtttagccatgagttgacacttacaaataccaatttgcccttgttctatccctatagcatagggaacttggttggctgctctagctccttttcttaattattagttcggtcgtgcttgcaagttgcgaggtgatctccgaaagaaagggtgatgacggcggctgcttctaagagcaagtttaatagtcaatgtaatagccaattcatataatagttgcttactataatattaataccttgtctcacatatcatacacacattatatcttggagtctgtgctacagttggctacagatctatcgctagctgctcttatctctccctttatctatttaaaatatgtttatatagctagattatatcctgctattgtatctgctctgaggcgtcacgcgccgatcgaggaaaagggcgacgatggtggctgcttgcgaggcgccgcggggtggggcgacgacgggtcgacgacgtccgacagtggcgcgcggccgacggcggtggcctccgtctcgaacgtacggcggcggcgacgccacccggagacgaaggacaaattagtgcgagcataaatttatctactctgatctaaacgacgtctagcgttcgtttgctcaaaataggaatggtgtgttaggtatcgaaggaaaatcgatggctggtgtttctagtcgaaagcgaaaactttttatgctattttttggtactaggttattttttatgttatggatcaatttttctttttccacaaagttgcggtagaaattaacttatagaacatcaatgcaagagtctgatggtaattcaaaattagaatgctaaatttattaccgtgagactcttgcataagtcttaagtcttatgcaagacttaagaagagatacaagaaattttaagacttaagttataataagtgtttagaaggattaagtgtgtccactatgtatgaatggcaattgcctagtattgtgctatagaaactaataagttattattataatctagtgtgcatgttactaaacgagatccacaaataattaagacttcaaggtacgtgtacgctagctgatcctaggaacaaatgcacacaccattcactacaagcatatatatcaagatcaacatattcgatctcccaagaagaaaaaatgaaagtcatatatgcaatcttatccaggacaaattctctccacagtaacgatagatgagtttttcgcactataaaagcacacacaaatattaccaccgtgaactcagagagccaagagcgccaccaccaaattaacacacctacaaacactcatacaaaaaaaaaaacactttaaacacataattaaccatgtctcgcaacgggagcagtgttatgatcagtcctgtggtgcaaggcaagttccagcagggcatcatgaacggcatgcaggtaatcaattgattaaacatggtaaataactagagtatatatatcagtgaatttgatagtaatttaattaatccaaggttaatggagcatatttttcttcttaattttgttaatgttagaaccgtgacattggcaacagtacaagtgtccctgtgtctggctccagcttcaatggcacttccttcctcagtggtaactccgtaaatgcaccaccagctccagaggtaaaaataaaatacatatcattttcattcatttaggccaataatttttccataacttacttatgttcgttttattttatttgaggatattaattaattaagtatcgcaattattttattcaggttccaagttactctattacaggcatcggaggagatgcgaccttttaagtgctggcatacaacgccaggagggctacaccaaaataaaaccgcttaacagcgtgttgtaataatcctatatccatgagattgaataaatcatgggcctagctggtagtaagcttaaatggcctgctaatcttctatcttctatctatctatcttctatctatctattatctattatatatactaaaagtccattaaactttctataaacgctctcaagccgccacgtgagactcctaccaacgctcctaggccgccacgtggctctatctaatctaaccgttgattttcacttaaattggtggacccaatattttagaccattagattatattttcacttaaatcggtggacccgatattttaggccattagattagatgtattttattttaaagaaactaatttcttactataattcgtacgtatacaggagaaacatcatacgtacgtacaacgagggaaccaatgaagcttaccaattgttggcgtcagaagaaaaaaaaaactacgcacaaaattactataaaatcaataagaaaaaaaaacatacgtagttagtaccatgcgaaaaaattgatgatatttaaaataggattttctattatttaaagatataaaacattttactctataaatttacgtaaatatcaccattgattttcatttaaattggcagaccctatcgatgttttagaatactagattagatgtacccattataaactaaaagttcattaaactttttaaaaataatcctccatatgacatcctacaaacgttcctaagttggcacgtgatgctctaataaattagtgaattttttaaaatttctaaaacaatttggtgaacacattatttacaaccattagattaattttcaagaaaacatttctctcctatacccaggcccacctaagcctgtatgtataagttaatttttttagaaaaaaaacaagcagacgtatgtacgcctcctcttccttcaattcatatctccacacttttacctattccttctccttttttcatgctttattagttagataagtaataattttgtgttaaacaattaatcttctaaatcatacaactaatgatccacgtaaatctctagattatttataactaaatttatggttgaagaccatatttcactattatttagcttaaaaaaaatatcattttggtttatattttctgacttttgcgtaccattcaagcaactaaaaaaatatataataataataatacagattttttcatcatacataacttcgtaataattaaaataggtcgacaatcgtaaaagaaaaatgaatatattatgagtaatatctccaaagtatgttagttaggtagtaaaacttatgtaaaaaataagcaactataacatctaaatcaaacaactagtatttgatcaacttatgtctttagattgttttacatttaaagacccatatccactgtaatatcaactttgagaagaaatatgtcactttggggctatattttctaatttttgtgtgcttttcgaacaattataaaattatagaaagataattacatagaatttatcaccatatatgacttcggaataattaaatttgatctatatggaaaaaagtatgttttaaaaactactcccccagtataacattagaataagtcaaaaaaacattattacaatataacattattagattgtagtgttcgtatttttaatatctactgtgaatatactggaaaagacaagcaaaaaagatatattttaatcaatcaatagaaactaagacactacaaccccgtaaaaggaaatattacaattatatgcacgcgtaatctcttcccttaaactctctcttcctctcatctctcatttaattcctttatctcctaatttttaactaagtaaaaaaagatcaataattagaaagctaaatgattataattattaagttcaataataattttcacttatttgaatttttgttttatttataattaaatagataatttaaaatccatgttacccatatttcactctataaaaatgaaaatacatcatttaacatagacaccgttcctttgcatcgtagccaaatagaaaaaagacaacataatacaaaatgaaaataagtattatattaccataaatcattgtacatcctctgagcgcacttaagacgtcacgtgttacgccttaaataaaaataaaactttacgaattggaagaaaaaccatctgaccatcagtttccactcaaataggtagatccatcagatatacttttaggaaaatcttaagccgccatgtgttacgtcttaatcattagataaaatagaaaaaaccacccctccacttcaccctcccctacacatactcacaacacgacactactcgtcccatcc

SEQ ID NO: 26846 - DNA, 9688 bp, Oryza sativa
  unsure (1)..(9688): unsure at all n locations
cctttgggacaaatgattgggtctttggaattcctttgaaattcctattggaatggcatgtttcatgggaatcgtggaggactcctagcatgagctccaagctcttggaatttttttctcaatgtctacctctctcttctgaatcctatgtttttcctatgctccatccaaagcggttttattgtgtagttttctcatgtttttcattccttagctacgatgacatttaaatcctgcattttcctattcccgtgtttagagaatcctatgtttcaaaggagccctaaattgaatttcaaatattctaaaccttaggaatttttcctacatgtgttgttaggaacaaaggatttgagcatgcaaaattcctatggattgctatccaatgcaccaattccataggaaattttaccgtgagttcatcattcttaaatccgtgtcattcaactgtgcatatgaattaattgtagcttaatgacttttcaataactttcatttataggagaggggggggggttgatgtactacatactattcaaatgtgtgaagctctacattgattagtgtaaacaatccgagataaatttcataaccctaacaactaatggcccctttgaatcaaatgattgagaaaatggaggaatataaaaaacatagaattctgattgaattctactgcaaaacagaggaatgttaaatgcagaaaaaaatacaggaatgattatttgattgagacacaggaaaaacttaggaattaaatgagaaagataggctcataggaaactttctatgagggtagatctcatgttaaaaatcctccaaaacttgtatggattgaggcatttcttaggaatttcataggattcaataatttttaatcctttgttacaaacggctatataggaaaaaattaaataggatcagaatcctacaaaatttctatgtttttcctttaaagcgaaggccctaactcttgtatatatatgtaaacaaagagacttcaaacacaccatacatttaggaaaaggcagttagtcctaaaactatatatatatagactacgggagatttgacagtgaaataacatacatatattttatttgacttaagtcagtcaaaataaagtagaaacagtaatatcttttccatagcaacttaggccctgtttgtttcagcttaagattattgtaatctaaattattaagccagattaatataagctggattataaaaagccgacatagaataagttgttaactgtttgtttctctagattattagttgtatgttagccgttagccacccaatattctagaaaatgcacctttacagtggattaccagattatattaatctgacttatagattgtaataatttagcataataagctatctgtttgtttcagcttactcataataatccagattataataattctaagctgaatcaaataggtccttaaaaggtgagcacaacacaccataaaatatatctcgatagcgtattatttcatattttaaatgtccacatatctttctacaaacttaatcaaagttttgaaaaaaaaacatgacttatttctataaatttagacaaagtttagaaatttggcttatgacaaaaattaaaacaccttagaatatagaacggaagggtgtacatgttgctaaatgagaccggtaagacttcgacagttacactatagctaatcacgcacaccattcactacaagcatatatatatatatatatatatatatatatatatatatccggttcaacatattctcccaataagaatataagccatataaccctatccaggacaaattctctagtacaaacgtagtataatagatgagttttcaacgctatatataaaagcacggccaatatcacacaaccatgaactaaaagaacctagagtgggaacaaaattgacgcgtaattaaccatgtctggcaacgtgagtatcgtgatgatgcacaacgttgcaaggccaataccagcagcgcgtcatcgatcatgagagacatgcagataatcaatcaatgaaaaccctggtaaatatatatctagaggggggagaaagacagatagaatttaacacgtgtatctgtagtactaatttaattaatctataaaatccgcattagtcagattgtccctaactccttatatgtccgtcacatgcttccacagcactttcttgttcagtggcaactctgtcaatactccaatatacaccactggctcgggaggtaaaagaaatacatttatttaggcctcaagttactgctgtttgttgttttattttattttaaccgaagttattaataaccaatgcaactagtgtccaaacgtttcattgaaagctatgtcctctcccttgctgagattaagcaacacccccaagcaagtcctgagaaggggaaacatgttgtggatgtggttcaaaagaagtcgcacagcatcaaacggagtcgagaacctgttcctgacaaatggtcgaagccactcccaggaagcatgaaactgaatgttgatggctcattccaggagagtgacggcaagggtggtataggcgctgtgttgcgcaattgcacaggagaggttatttttgctgcttgtggacatgttgatcgctgtagcagtgctttggaaacggaactccttgcctgcagggatggtcttgccctcgccctacaatggaccctgctaccaatagtgattgagacagactgcttggcgatgatccatcttttccgcgatgcaacaggtgctaaatcggagctggcgtttttagtcagggagatagattctctcttggtgggaaatagggatattagcttcagtaagtgtcttagaagtcaaaatcatattagccactatttagcaaataagggccgttgtgacaagatcacacagttttggccggacaataagtgtacttttatctcgcagtttatctgtgaggaggctaatgagtaattatccctttcccctgaaaaaaaaaactactccctccgttacataatataaatgattttggatggatgtgaactaggatctataatattatatttataggacagagagagtaatcaagtactgctattattacatttaggttcgaagttactattctatatataactggcaacggaggaaacgagctgtcaaatgcagaatgatgaatgagcttagacagacgaacgaattgatgaactattagtggctacacccaaataaaatcgctaaacagcatgtttgtaataatcatgtatgcctgtaattgaataaaatcacaggcctgttgattaattgattcattatggattaatggacgcctaagtgtatgactctaaagaaatatattcatcgcatatatacttgaaggtcccgttcttttttttaacaagagttagatgaagattatgattttttggcacgctttttaaattgctaaacggtgcatttcgtgcgaaaactttctatataaaagttgctctaaaatatcatattaatctatttttcaagtttgtaataattaaaactcaatcaatcatacgttaataccacctcgttttgcgtaaaaaaaacttaatcttcatctttagaagaaaagaacaccacccaaatacacacacaggcaaaagtgcccgtgcgttgcaccgggtgattacaaagtgtacagtgaacaaaaagtgttgtttggtttagacatctaatctggtaaaaaattgtttgtttttagataaataatctgctttatatttgcggaatatacattatgtttagtttggatgatttgtagcatgggagaaaatggatggatgaacaatgcacgtgcagaaaaaatagattatttatttggagttagtacattttttttaagaaaaaattcatgtgcgttgcaacgggaaagatttaaaagaacaaatgaaatttggaattaaaaatataaagaatattgaaagatgggtttagagttcatatagaaataatatttagaaataatagaaaggaattaaaaatataaggaatattgaaagatgggtttagagttcatatagaaataatatttagaaataatagaaattataatttacattggatgagaagtctagaatattctcaaaagaaggtagagtgcatataggaatacaatttagaaaaagaattgaaattcgaaataaaaaagaatattttttgaaaataaacagtcataaacaattaaaatggtattaatgctatttctgaaaattacaaaaatacttaaaatcaataagagagaaaacttatttaagctcggcccaatagagcggccttctgtgcttcgcacgtgcggtcggcccataggatggcccaaaagcacggcggcctaaaacgtcgcccggcctgacgtgggagaagcatggaccgtccgatctgatggatagtctcgattagtcctgacctagataaataccatactctctcgtaaagcaacggtggcggcggcgactattccaacgggcgacgacggcagcggccttccccaccgagcagcgacgacgacatccttctcccccgcaagcgggcagcggtgccctgccctcctgcaagtggcggtggtggtggcgccgttccatctccccactgcaggctccttctctcctcgtcaagcggtggccgccgcctcgctcctcgccagatccggcgggtcgacggctctccaatggcgtggcgctcgggatttggctcctccctctccctctcggcatccagcgcaacgatggattggcagcttcttagcagcgcgatggcacagcggatccctagcgcagcgtcggtcatcggttcagaatctagccccccgagtttgcgacctccactgcagcgaggtggcgagaatcagcacgcgacggcctcatcttgtgttaatatttttttatgttctttgatttcgatttatatttggactgtaattttgtttttatttgggttgtgatgatttgacttttcaaacaatattttactattcattttattcaattgtgtaaataagcaaaagcataagtcatactaaaaatatctttaatgataaaatcctaataattgagctgagtcagccgagcgggtggggcccacgcgagtagataaggatcgatctcgatccatccagtcgccgccccctccccatctctcccagccctccgcccctcagccccctctccccacttccctcctgctccgtccccctctctgagccggccggccggcaacttccctccccctccaccccctctcctagtcggccggccgtttccctccggcgagcagcgacgcatgcggcttctccccttctctcagcttccccacttctccccccactatctctccacttctcccccctctctctctctctgcggcggcggcaagaggggcggcgatgccctcccctccgctagatcggggagaggggaggtgcggcggcggtggcggcggacgtcatggagggggcgggttggacggcgtggaggcggccggctgggcctcgcctccgccagatccagcggcgtggaggcggctgcggcccggcgggggcgggaggggcggcgggccagcggaccggaccttgcctccgccagatccgacggggacgggagaggcggcgtcgtcatctctttctctctctctctctctctctctctgcatggtggggaggtgcggcggcggtggcggcggatgtcatggaggccgcgggtcggacggcgtggaggcggctggccgggcctcgcctccgccagaaccggcggcatggaggcggcggcatggaggcgggaggggcggcggcatggaggcggagatgtcgtctctttctctatctctgtgcatggtaccggtggaggttcatgtgttcttggttgaaagtttgttatgtgtgttattgatggaatgtttcatgtgtgttcttgatgaatttcgactggaatttttcctttggggaggggggcggactaaaaatccccgcatttggttgtgccgattttgggaattgtttcccttgtatccgattgtgagagggattggggattttgggaattgtttcccttgcatccgattgtgagagggattggagggattgggaatcgggggctgcgggcgaaggtgcaccgcgagggacgaaggcgcccttcgtccgacttgtgacgaccggaaaaatccgaatagttatattatatatatatatatatatatttcatcttcaatgatataggatattaagctctaattgtagccaagttacttttcaataaccttcatttttactacttggatatggattgatggttttcgttggattaaagcctcccacgacctccattttaccgaaataacatgttatggagagatttttgaaagttacatacaagttacactatagttacagtgtaattacatgcaagttacagtgtaattacactacgattgtactgtaattacatctgtcaaatttttggggaaaaatttgtcgacaaatatatagcaaaatcgttttctctttaccaaatcgttttcggaggagtttgaaccagttcgcacaaaaaatcatacatttgtgtgttcgaaaggagccctattcttggatgaaatattttattaagtaaatttcagaaatctaaatgtactttgatcaaattattagaaagctaccgatttaacactaaatctatcatacaactacatatttaaggtgaaataccacaaaactatatatttagtaacaaaattatcacaaaattaaaggtttatcgataaattaataaaaaaattgaacaattataagtccaacataacattagtgctaaggatttaaaccgcaaaatctatagatttgtgataattttattattaaatcagtagttttgtgataattagccttaaacttgtagttttgtgataaatttattattaaatttatagttatgtgatacatcactttaaatatatagttttgtgataatttgatccaagtatccgtaattttgtgaaatttactctattttatttcttccctagaagaatccattggcttgtttagccgaaatgctaatggttaaacgtttgagggtagcgaatgttccctccaatctagatatgttgtacgcgatgacgatgacatgtttccccttggccaaacgagtttttcccctttgtccctctgccaattgaaaatagggatctatattgtcaaaaactcgctgtctgtataaaaacacgattcatagcttattcgccatttgttagtacaaaataaattaactaataaaattgttacaagcggaaaaaaaaccttcttgccctagcccacttgcatctctaaattaaacccgttgcaacgcacaagcgtctcactagtgcttgtaaaaattgaagcgattgtacacacatcatgcggagaaagatgcacgagggaaccgaagggtgataaggtttgtgtttggatggtgcccttgtctgaatgctctagctgaggctagaaattaaacggctgagaacgatgcctaaggtggtgtttggatccagggacttaactttagtccctctatttagacactaatttagattattaaatatagactacttacaaaactaattacataaatgaaagctaattcgcgtgacaaattttttaagcctaattaatccataattagagaatgtttactgtagcatcacataggctaatcatggattaattaggctcaatagattcgtctcgcgaattagtccaagatttaatagtctacgtttaatatttataattaattttcaaacatccgatgtgatagggacttaaaagttttagtcccatctaaacagggtctaaattaagcgagattctcagagcatatgatccaaagaggtgctgaatctttgacatttaagaaactgtgtgtattacagctagtgcaaaacaataattgagttgaatttcaatatttcatctataattttttttcaaatttctggtttgttttttatttgacatgattagaatcattaattttgacaataatatatataattagtgtacagatggctacttttccatgtgtttccattaacaggtcttagcagcttggcccctgatagattttattgaatcacacacatataggattacatatacacgccattaagcggtttttatttgggtatattatatagtacatgtaatcgattcattcgtttgtaatttgttctttgaagctcttgtcggtattctcttgccctcgctgggttaaaaggttgcgtttcctcttatgccagtaatggaataagttggcatctgcatgtaataacatcagtaatcttttgttaataacctcgattaaaattaaaaagaaatacagtctatctccgttttttaatatatgacgccgtgttgactttttaacaaacgtttaaccattcgtctaattcaaaatttttgtgcaaatataaaaaaagtttaagtcatacttaaagaacatttgacgataaatcaagttataataaaataaataataattactaagatgaatgatcaaacatattttaaaagataaacggcgtcatatattaagaaatggagggagtagtaattaacttgcagaaaaattattggcctaagtaaaaggtatatggaccttttttctttacctgcggcggcgttggcgcattaacagagttgccactgagaaatgaggtcccattgaagcatgagccactcacagggacactggtactgttgcctatgttgtggttctagcaaacatagttgaggaggacacatcatgatccactaatatcatatattaatttaactacgtactgtaagtatatatgccaaatactttctnntctcgtaataagagattttagagggatgtaatatattatagtccaatctggatgggctctccatccagatttagagcccctttgaatcgtaggaatgaaaaaacagaggaataggaaaaacacaggattctggtaggaatacaattgtaaaacagaggattgcaaaacacaggaaaaacacagaaatggccatttgattggaccacagaaaaaacacaggaatcagatgagagagatacatggcagaggatatgttccaagaggttagacctcttgctaactttcctccaaaatgtgcataggattacccattccttaggaattttgaaggattggataggattcaatcctttatttcaaaggccttcataggatttttttccataggattgaaatccaccaaaattcctacatttttttctacaaatcaaaggggcccttataatattaggatgtgtcacattctttcaaaaccctttattttatgtgacagagggagtagtattagtcatatatgcaacatttaatatatatgttgattacctgcatgttgttcatgatgtccgtctgctccttgccttgcaccactgggctgatcatcacactgctcccattgtaagacatggttaattatgtgtcaagtgttctcttttggtctcttctatctgtagtgtttaatttgcaggtgtggcactcttggttctttgagtttacagtggtaacattggccatgcttttatagtgtggaaaaaaaaagcatatatcatagtggtggtagagaatttatcctggatac

SEQ ID NO: 26847 - DNA, 15798 bp, Oryza sativa
aaatcttgtttttttttaatataaccattatttacaatgagatgtcagattacgtaacatagttgacacttgactgcaatggcataaaagaaatcatctcaatataacaattctcttacgtaacgatatagggggaggggaaaaaaggaatgtataactaggagtaagaagttgattgcacgctgatatgctaacgttcataaagagttttttggttttttttaagataatgaataacctggcagctgcatcaaagacgtacataggccatcatgcattactgtgcaccaagcaaagacagaaaaaattaacgttcataaagatacatcatacgagtattaaacgttgagtgggaggcttggtggacctagcattatataatggctagtacatgaaaaaaaaggttgttgattaggggaagaaatcagcttagtacctgagttagttcatcatcatcgattgtattttgagcgctgcttgattaggatagtccttaagtgcctcttcaataacagccttgctgtcatcatcaaaggaataaatggttgcatgccgaagggagtagagattctccaaacctaaatcatttaagccacccctccttagtctggtccaaatagaaagataaagcctttcaaggtggggcatagctcctggttgaaacgatggcatcatggagctataaaactgaaaatcttttaaactccgaaatgcacatgcacctctgtggatagtgagcttttcctgtagttgttccgaaacaaatgctaactgtagcctgagaaagcgaagagatggaagctcagcgaggcgatcaaggtggtcagactggagatattcgaaatccagacaaatggataaggtggtgaggtgggagagcatcaatgaattgatccaacatgggaatgctttcataaacgaatcgggcatgaacaacctttggagaccggaaggaacctgttgcatgtctatgatttcttcaaaactaatattatttctcaaatctaggtcttgcaaattggtgagcctttgtatagacgtttgaatggattcctttaactcaaatgttttttcactaccgaaaacgatcctaagagtccttagctctgtcaaattaccaatctcttttattacctttcgggtagcttctattacaagctcctgtaaagatttcatattccccagcatcagaccttgcgccagcttcactctgccagcatatagccgcaacagtttccttagtttggcaaaagacattggaaacagtaccttatgagatttaaaagaacttggtttacgtgcacctcttatgtccaaggtttcgagagattccagtttcccaatgctttcagggagctcagtggcactatagtgccctagacgcagaaatcttaggaggcgtagcttatcgagatgattaagatggttcttgtccattccactgcagtcctcaagctgcaacacacgcaggacatgaaagctcgacaagggtggtatcgagtcgaccttgccgaagatagtaatggaccttactttggacaattgttctcttgcttctggtgaggcataggatttattgctgttatggagagataatcggcgaatcttcttcttttgtgctgtacatgtatgtttacctgtttgttgaccatctgataaatacgttgtaacaaaatcttcttctactgacagctgatttattagctcaagcaccatgtcatgtactttgcatgcatgcaccttaccatcttcatcccaaaaaacatgcaccttaccatcttcatcccaaaaattgtcctcactcatcggctggatcaagcttcgattgatgagctcgttgaagtagctctctccaatctcctgcaagcttgtccctacaggtcgtgtttcatctgtaataaaaccctcagctaaccaaccccatatcaaaacatcttttctaattagttcatcctcaggatatttgcttagagacaacaagcaagtcttcaaatgaaaaggtagatcgttgtaactgaggcttaatatcttccgcatcttgtccacatcaaggttgttctcaagccccaaactgatagacttattgaccttgtcccattcctctgaattccttggtttgctagcaagtaggcatgctgtagtgatgattgctagcggtacaccaccacatttcttcaaaattttctcagtgacaccacacaaatcagcaggacagtcatcgttagagtcaaatattcgtttgcagaacaattgtctggaatcatcatcagataagggtttcatttcataaacaccactgcctgcatgttctgcaacgaccttgtttcgcgtggttacaattattttgctaccaagtttagcatcttgcacagcaagtttgatagtatcccacgctgattttttccatacatcatcaatcacgcacaagaacctaaagatggtagcatatacacatgttattgaacctagatataaatcatgtgaagcctgtccaaaaaagataggaatatgtatcttgcacattgaatatcgaaaatgatgtgcagctttaaatgtgtaattttccaacaattttgacacaataagtgcagctttgtgaatttctattcacaaagttacaaagatacttaattatgcgtaaatagggcagatttctgaataactatgtgttccattggaaaaccaaaactttatttacaagccagttatattataatagtataaaaacttgagctaggattcccggttatattagaatacaataaaaacttgagccaggactcttattcgtacaacaaaaggtatcttcaaataatgataaaaggtaggtataacatagaaatgtaccttctattgttgaggaagtctctaattttgtcgatgagctgcttcgtttcccatgtttcatctatgtgggaatacattttctcatcaagttggagaagaatgttcttgagaatcttgtttatatcaggattcaaggacaccgaaacaaaacaatagctgtcaaattttgccttaagctcctgaaataatgaattggcaagagttgtctttcctaagcctccgaatccaacaatagaaattatatttgattgttggctggatgagccgtcatattccaagagttgcttagttagctcattttttggcttgctaatgccaatgagttctgtcgcctttcggtacatagcttctaggcgagaatcaacatccacaacagttggcctggcagcattgtcgtcgactatgtacctatcacgacgttcgctgaccttcttgacctggtccatgatgtctttcatgacaccgtggatctgatggttggttttgaacttgttgaacaaattggtgaccttcttgaagctcgtggcaggttcatgccccttgcactttaacatgaaggtgtcgatggcatcctcgatgtcgtaagatagctctctcacctcgctggcccagatcttgacctgctggtcaagttgatccacaggtgtctcagccaccttgtggagtgctgcggtcatacctttcaactctttctcaagttcttcgatctctcccttgacacccttttgcagcttgtattcgccaaccagcagctccccaagcttggggaggagggtgttcattgcccctgtggcgatgttcatcttggcctatctgatgttgaatgcctgcacgggtacacacagatgcacttaaatgagcctcttgagtttattagtatgtatcaggattcaggaatgatcaagcaaccgcaaaaacatggagaaaaacgacatctgaataattaagctgctatgtagcatgtcaaatcgagactagattgaggtaacaaccgtgtgctgcatcacctaatcgatccaagcaaagctcatcaccgtgagcagcgcaagatagcgacctctcaacgctgtacggtatactagtaacaggaaggaccaagcaacgacgcccaaacacacatggagaaaatcagcatctggatcaaccgggccgtaccggaatcggaggtcgatcgggacagtggatgcggtcgcgccgtcgctggctccgctccgctccgccccgcccttgctgcgccgcgaatcgggtccgccgccactcagccacgtcgcccgcgatcgatcgatgccgtggtggaagcggccggcggcgagagtaggggagctcgggtcaacgggtgggagacctggagtcaagcttgctccagccgaagaggatagaataatgagaggataaccaacggactccgcttcagtgacttagctaaggcaagtcacagcgtgacataccatgtatctcggccgtccaaaacgaatccaatggagatggcgcttggtcccgcacgcaggcaaaaaaaaatctccgtttcggcctaacaggaagcccgcacgcgcacaggacgcgcttaacctcgccctcgtccgcgtacaccggcgcagcctgagacggactcaacttcgcctcgccctcaggtccgcgtacgccggcgcttcatctcgccctcgtccggccgccgccgcgagtcagctgggaggcgcgtcgctgcgaccggagaggcaccaggctgccctgccctgccgccgcgaccgggggcgcgtggaggcggccggccgccgggcctgacggcgcggtggtgcaggcgggcagccgcgcagcccgagcccggcgcgtggaggaggccgcgctgctcctgccgcgccacacgtcccgatttcggcggcctcaactccacgatggatttcagcgtccgagcccgcatccagagcccgcaccagtcggccgcccacttcgtcgccggcgagaggtgacaccgccgcccggcttcgtccaaggtaggagtcactggtggttgagtttgtggagaacgacgcaccttttcctgtgcccgcgaggtgtttgtggaaatgacctgccgtctgggatgatgcagagtcctgattgaaagtgaattgttattgtttggctttgtgagattagaagcaaattgattctgtaatctttgattgagattgatttggttgtatgactcatatatgctgtaatttgaatgaatgaatgaataaatcagtaacttctgacgatgttttctaaaaaattttgagatgtttgagatgttgcccaggtccatgatttgttcaggtttaaagtctggaatggacttatagtattgtctggtttatactggacatgagttgtgctgccatttcctccttttcgctatctctgctgtaaatttttagttcatgctaggtgggaggttccatgtcttgttatgatcagttgtcctatgcagcaatgttgctctgaatctctctctctgaagatgctgaatggagtgccgtcgttactgtagtgctatcgtgaaatttcatggtcagtagttcctgtgcatggtcgccctgatcaatagtgggtaggacatctttggagctgtttttatgcgagattcctgcaaaattcctagtacaaattcatgcgttgcaaacaagcccgtatgtctccttcatttcttgatacgatagggatggattgtgttttggttgacaaaatccaaagagagcaattttgtgcatgaaatgagaatgccagaatggggctgttgctttgagcgatctgatatccatcgtggagttgaggccgccgaaatcgggacgtgcggcgccgcaggagcagcacgacctcctccacacgccgggctcgggctgtgggccgcccgcctgcaccaccgctctgtcaggcccggcggctggccgcctccatgcgcccccggtcgcggcggcagggcagggcagcctggcgcctcccccggtcgcggcggcggccggacgagggcgaggtgaagcgccggcgtacgcggactcaagggcgaggctaagcgcgtgcgggcttcctgttaggctgaaatggggattttttttgcctgcgtgcgggtccaagcgctaccttcgttggattcgttttgaacgggcgagatgcatcgtatgtcacgctgtgacttgccttagctaagtcaccgaagctgagtccccaacggaccacggtagttgagggaatgataaaataagacctgtccggggtacggatgcaagcgggtgggcaagcaggcttttttttccctgtttattgcacttttattttatttttttcttctaaattttatactactatgcgatagataaactagcaagcaggtttttatagagtagcgggactacccatttgcatccctagtccgggggaggaggaaaaatcgtcctccccctccctcccctgacgctcacatgtccacatgggccccaccatgtgtaactgtccacctgccacgtgtctcacacacatattccgttgcaacaaatcaccctctattaaggaaattcgttttattttttattccaccaaaaatattttacctagtggactcacaatgtttcactatgtatagatctaatattgcagtagattaaaacattcttttctaacaaatcagcaacatattaagggaattcattttattgtttgttccaaaaaaatgtttcacatgttttaccatgtatggatcaaatgttgcagttaattgaaacattctttcgttatttgctgaaacattgtttttatataaggtgaaacaatgccaccaaaaatgtttcacctagtgtacttataatgtttcactatgtatagatcaaatgttgcagtgagttgaaacattctttcactatttgctgaaacattgtttttatataaggtgaaacagcgtccgatttaaacgattggaacattttcgatctacttagtgaaacaattccgatatacttgatggaacagcatgcaacatttaaaaataattcaataataagctaaaaaattcatctgaatatatacatgtgtggtcttgttttaaagaattaattgtaacgaatttaatagtgcaatcggatcataatttggataaatattttaaaagaaaaattagtttaaagtggttttgtatgcatgcgtcatgctgacgtcagagctcgattttttttaagcccggatcgggcactcgacgggtagtgcctccccaatataattactgttaattcataatatcagtattgtacttatacgaataatatgaattggtacttgaatttgtttacttgtaattttatttatttaatagcaatatagtataactgttacaaatatataggactatagtttttttagttacactagttagatatatatcagtgcaatatatctgttacaattgcattatcagcacagaatacagaattattcacatatacagaatacatatgaacgaaatacaatccattcacaatccataatactcactaattaattagcacaacaatattaacgcaaaaaacaaaatacgcgggccgatgggatcgacttggaaaattttcgctggctgaatccgtctatgcggtggcaaaatacatatgccaacattttaagataatatttaaacattgagacaaaacttaaacattaaaagtaggtatagttttattttttttattataaacacagtccaaaagcaagtactaacaacgtcacactcacctctatcaacagtgtgtttggttgagttatggcttttggaaaaatagcagtggccagtggcttttcgcaaaacagctatggaatatgggctgtggctttttgaaatgactagtccggtttacaagcgggtcccacgtgtcatacacactggatcttatctctcccctcttctctcttatcttatctctctctcccctgcttgtggccgaagcgggcgacaaccagggtgggcgcacggccggcggagtggggcgagtggcagccggagtgggctacgggcgaggcggatcggccagcttcgccgctcgcgatggccgaagcaggcgcagagagggatgaggcgaggaggacggtgagcaggggtagggtgcggagggaggagatggggcgctccgcatcggccgacgccacccgcgttgaggcagacggaaacaatcatgtcataactttcgcagtaaatcaccattatacgataattcatttaccgacgaaaacgtctacttacaacgtagtagtaactcaattactgcattatgcgaatcacctcatccagaaacaacaacacatttacgacaaactcggtcaccatagttactaaacgagtaacccatttattagctatggcaaacaatttaactacccagtaaatcgattaccacaagcctggctgtgacaaggtgtcgaaacatgaattcggcaataataaaagggggtagcgcacgagacctaaaagtggatggatgcggagacaaaggatttagacaggttcaggccctctcaatgagaggtaataccctactcctgtttggggatttgaatccgccgagtgtgtattgatctgacgatcaggttgtctcatgccccctagagggcctcctgcccaccttatatagggtggggggcaggattacaagatagaaaccttaaccaataaggtaccgatttcctaaatctactttacaatcttatcaaaccaggactttaggccgttccataatatacagggaaacgtaatacccaagtcatgatctgttacatattccatacatatatgttatcccctattactagtcggataaccatgccgtgtgggtatggggtacccataatctccacagtagcccctgagaccttcacagtcgaaaatataatcttctctcgaactagattactctaaagccgagtgcttcaatcatcttcgccatggtctcccgagtacttttaccaaatctgaagactgtggagggctgaaaaataaagtcaggtgcatcgaatagatgcacctaataggtgtagcccccaactatgtgattagctgaacaaactaaacatatagtcaaggaataaattatccaattaaccgagtggtttttgataattatagtcaaccaagtgacttgataccaatatatagcatatgcggtgtgaatccccgaataatatgatccaagtgatataccgactgcttggcaaaatatgatgcgtataacctaaagttgacaacatctttgaaagttcacatagcaaaacaactataaagaagcttgaatgctgtgaataaagaaatttccaaagtattgggcatacgccatgcgcacactgctttaacagatgtgcttaagtccctaaaagacacatggtttcaccacacctggaaatatatggcatatatggtataacatccgagtaagtaaactcataaaggatttaccaaccgcctgaaaaatgaccataatatataatcagcctaagccataatattggtcaataaaaatgcacacttacgtggcaaaaagcaatgatattgtatccaatcaattgcttgataaacccaaacagcaccttgactatataaaaaagtcagcggggcagctatataaagctttactgtttgacaccttttaagatgcattgtaccaactcctaaaaagtcgagtaactgcggtataaaaggattttaaggtattgggcacttgatcacgcgcactttggcctaagcgaaaagtgcctaagtccctaaaagaacgtgacaggccacacctgaaaatatgggctgcagacatattaggcctaggccaaaaaatatgccttcgacaccctttaaaggatgacgcatgtaacatgctcccgagtaataaatcttccgggtaatatagaccaagtgtagctcatatgaatagcttctgatctgaatgattatcccttatgggatactccaaaataaatataataattgaatcccgactggcgcaagtattcggttgatagcccttacggggaataataattggtccagtctttgagcatagaaaatagactcatgactatgaatccatgtggaatgtatccggaacaagtccaaattggagatataatcctcacgcttgagttgatgagcccccgagcatatagcttgtccttctgtcatagtcaaaattgtctattggcaatagctgacgcagtcggcatggagatgaaatgaccaacatgaagacgaaattgctcatcagaagtaacggaagatgtcagcggtagtaaaaacagtgacaccaatcaaaggtaatgaagttgcataaccatggaggcaaagaaaccagtcggcaacagtcaggtcagctagcagtgaagatgtaggcgcccaacaacaacgaaagaacagtcggtggtgacaaaagcaaaccgacgatgaagacgtagacgcgcatcaacggtgatggcgaaatccaccaatcatgaagatgaagaaaataatcggcggcgacaaacgcatccgacggtaatgatgattagcggcaacagagatagccgactatgatgacaaagtttcccatcaacggcagcagagtaggctatgttgaagaggcttgacaagatgttgatgaagatgacgatgtcggtgatccagtcaatagcgatgtagcagccgatgataacgatgagatcctctattggcagttgcgtagtaggccaaccgtgaagacaaataattggaggagagttgatgttgttgcccaactcgtctaaaccgaaatatttgaagttgttgaagtagaatgtctgctccgaagcaaagatgaagataatgactcctggagttgactcgtgggttgatgaattgatttcttcagcttgacataaaatttgtcaaattttgagccttgtatttgtgtagcccccgactctttgattagttgggaaacaactgaacatagagtcgagaactgtagcctcttgtcgtcgaatagttattgcttgagtgaagataaatattgaagattggaacaccacttgttgtaataaaataacacggtatcatatttggtgacgtatgccgaggtgtcgaaacactggtagtcgtcgtggttgatgaagtagcaaagcttgcgaagtagaggcaatagagtttgccgatgccgaagataataaaaatgaagttgctccaccatggtgacaaagttgcatagtcgtgatgaagtgaacacgagtcggcggcaacagaagcaaaccggtagtgaagacgcgcagttgtgaagataaaagcaccagtcggcggcggcataaccaatcggcgacggaagacgatgatgtccatcagtaatggtagctgtataaaccagacgtagaggcgagggcactagtcagcagcagacgagacgaccagcgatgaagatggtaaggccaatcaacactggcagaatcatgcagccatggaagtgaagaaaccagtcggcagccatggcaaacgtaggcagcttgtgttgaagatactgatgcctattagtagtgacagcgatgtagccagccgtgaagaagatagcatcagttggcgttataacaggccagccgtgcaggcggtgacaccagtcagcggcggatgcggcggccggtcggtgaagacgtagacgcccaacaacggcagcataataggccagccgtgcaggcggaaacaccagtcggcggcggtcgaggcggccggtcggtgaagacatagacgcccaacaacggcggcataaaggccagccgtgcaggcggaaacaccagtcggcagcggcgaaggcaagccggtcggtgaagacgtagacgcccaacaacggcggcataataggccagccgtgcaggcggaaacaccagtcggcggcggcgaaggcaagccggtcggtgaagacgtagacgcccaacaacggcggcataatagaccagccgtgcaggcggaaacaccagtcggcggcagacgaggcggccgatcggtgaagacgtagacgcccaacaacggcggcataataggccagccgtgcaggcggaaacaccagtcggcggcggtcgaggcggccgatcggtgaagacgtagacgcccaacaacggcggcataataggccagccgtgcaggcggaaacaccagtcggcggcggtcgaggcggccggtcggtgaagacgtagacgcccaacaacggcggcataataggccagccgtacaggcggaaacaccagtcggcggcggtcgaggcggccggtcggtgaagacgtagacgcccaacaacggcggcgtaataggccagccgtgcaggcggaaacaccagtcggcggcggtcgaggcgagccggtggtgatgttctgactgatccattcctggagcgtaagagataagcttaaagccatgaatcccttttatgcatatctggatctggatcctgcagaacaaacatataggatgagtagtatctgatataaatataatactcgagaaaaaatcaagtattttaaaatatttataaatatgtatttctcctcttgtcaattttgatttccccgagcagatgactctgtacgtttaaacactctgtccgactagtcatagcccccaagcatcgggagtcggcctaggcatttccctattaacccacagtaattgatttacctccagcggtgtatcttcaacaactaccccgaattcaaatatatctaatctacatagaacgaacatgggcaaccgaacacggattttgcagactctgggcgcgacgtgcggtgctcggaacaatattccatgcgcaagcgctaccgttaacacaactcctttcagcccagtctaactcttttaccactcatccgatcaccaattcaccactaccccttctccgtacatcaatagaaaaattagtacaatttcatgtgcttttgacacatatgtatgaatgttctatatagatatttgcaaaataaaaatattgatatttcaaaattttaaagttcaaggaagttacaaagacttgaaaaatctgaatacatgaaaacctaatctaaaacaacattttatttgttagtggagagtaagtcatagtgcatttctgtttcgtaggtatgactacaaccaaccgtccgaatgggatttctccataccaagttcacataaaatactgatttttttaaaaagaaaattcaaactttttaaaatttaattttaaaggaagactatcgcaaaagaggcctaggatgtagaagatcatgacatgagcgattcggcagattctcattttcaaactagaacccggtttaggaataaaatttgggagagtatattaaaaactaaaagttactaaaaaggtttttaaaaaaaatctaaaatttcatcaaatttcagatgggccggattactcgtgggcccacatgtcagccacacgccacctcgcacgtgcgtcacgtgacgggctcctcggcccattacctcgcgtaccctcgcacccgtctcccgcagacagatccgcctcgattcttcgccgccgcgacgagctccctccatggcgccgccggccgccgccgcgacctcctcgtcgtcctcctacaccgacacctcgggctcctcctccgactcgtcctcgtcctcggggagcgaccgacgccgacgccgcgcccgccaccgcagcggccaccggaaggatgccgcggcggcggcgtcgtcctcgtcgtcggcgctgaaggcgcgcaaggaccggaggtcccgccacaagcggcgccggagggagcggcggcggtccccgtccgacgacgacagctacaggcgaggctctccccctccccctcctcctcctcatccttcctttctaggtttcttgtgctagggttaggcccagatcgatctctgtgaatgaattttgctcgttagctcctctgatagtttatcttgacccatgattgacgctacatcaggagtggtattaaggggataacgaattagttgcacaaggacgtgaagaattttcggttgttttacaactaacaaaggatttatttgttcagtttggtttggtcgtgccttacttgagcaacgagagccctaaccgtgagaaaaattttaggatttcacttcaacttgatacttcatccgtttcataatgtaagattttctagcattgtccatattcatgtagatgttaatgaatctagacatatatgtgtgcctagattcattagcatatgtataaatgtggacaatgctagaaagtcttacattatgaaacggagggagtagtaatgagcactgaatgctagctcgaatctacatggtttggagaatttctgtgatgtactttttcaatgtgtaacaatcgcaacagtagtaggacaaagcctcattccttcctagtttaatagtcagtgatcggttctatcagcagtaggacaaggatttcttagatatgatttgagctcactattgaagatgagtgttcgcatctccatttaaaattccttttcagtcagttaaatattctgtaagcctgagagggtggcaatccatggcatttaccggagctatgatgctttgttcttttgaattcaatttatctgtgattaggagttatcatggcatcaagtttaggcagctaaagcatagttcagaatctaggtaccagggaagttttgaaacaaaaaatgccatagtcttgcattacattgttacggcttgaatcattcaattggatgacatggatcggcatagcaacaagtttttccctagttttagccttcaagctgtcttggctttctctgctacactgaaaaaaatagagatattttgcttcttgcgaaacttatattcctgtttgctttatgccaccactgttattttgaagtttctggtgctttttgtagtagctcaagctcttacgacagtgaacatgagggcaaatcacgcaagcacaagaagagcagatcatcaaggaaggtactgccccatcaatgcattcatatttgatttctcatttagattttttctccatgcgtcgaatatgtggcctcattgtatttacttacctgacagtctagggagagggagcgaagcaaggataggcattctaaacgagacaagagcaaacataaagaggtaaaaatcctatttattcagaaaatacctttttcttggtttaacttttcagtgaattgaatctgtgttgcatgtaataatcactctctagaaatcagcaagtgttggttgcatacttgcgtttgattgctgttacagtgccatgctatatctattaatagaaatctacagggtcatgtcttatgaagtagatatgtagacttaaaatatatgtggtttacatttaaatacaagaggtccttatatatcttgctgcctgtttctgggttggctctttgacattggagctgggattcgtgaacgagtgacaacatggtggattggcttgctggttggcttgttggttgattggttggttttgttctcttcaatgcgggagctctacacagaagaaaatagtgaacgtactagtggccccgtgcagctctccaaggtatattagatacttggctttacatttttcttttctatttgttttatttaacatatgaaacattctttattctgtaaatcagtttcttggacgtgacaaggatgaaggtgttcaaaggagtgcaatctctggtaaaaaggtgagaatagtctcttgaccacttcaatgtacaccttttgaattgtacaatagaggggggtaagggggggggtgcctgttgaaataaaaaatcttctgatcaaagtaaggttatgaaatatgaacaatttttcagtatccaaactgttccatcggttgttaaattcaataaaacagaatgggctacctcgcatatgcccccctcataacaaattattttaggaaggcaaaagatttgatgcatttgcattgacagataatgatg

SEQ ID NO: 26848 - DNA, 4611 bp, Oryza sativa
cctctaaccctaatcccgccttcctcttgccattgccgctcaacaccgaatcttctcgccttctccattaccaccgcctctctacccctgatgagcgacccctaaccccgtcggcgtcctgtcgtcaatggcaccagtgaggcccaacagactggcctcctcccttcctgtcctctccctacccctcctctctccaagtgacagcaatggcctattctcgtcttcttccttgtctttggctcccacagcgccccacctcctatgtactctaacgagaagagtttcacccgccaacaccaatacaccttttctcattttcttccatggctgagacggcgccgttgcgtcgccatcaccttcgtcctagccatccctctaagctcgagaacacctcccacttccccactccaaaatctccttcctctccctacctcaaccctaaaaacctaatccataggtcctctgccggattcatcaaagatgaagccgaaacatagctattgaagcagatttgaaggttagaaattcacacagtttcctctaaaatcacgtgcttgatgtatagtaaaatctttctttttttttcatcagaggtttcatatcatacaagtcaaggagccaatgaggtagtgttgtttattttactcccccccccccccccccggcgcaaaatttgctattggacaacttttctaagggtactgtgccaactttgggacttgtgtcgctgcgggtggggccggcagcatttctagagggcccacagacagcgactcgtgccgaccttgtgcaagttttgcttctaaagtggctttcgatgttatctatgactaacacaaaacgacggtcaactagatgtttgttttcagttggaaggagcactcggttggcatctacagagttcagacaccggagaaagtcaagcacaagctgcccatgttcaggcaagctacgccagtaaacgtcaggtacaaaacttgagcgaaattcgccattttgaacttgaatttctgaaaaagatggcaaagaacaagaacaaaggcttctccaaaataaattcagaacaaattgtttagctgcaatgaataacatggcttctgtgaaactgtaaccaaagctcaacatgtttctgtatgatttttggaaaaacaaaccgtattttgtgaaagcacaacgaccaactcagcaatctgcaaatgcaagttagtaaatgcactgtatagtgcacaatgagaacagcaataaagcttaggaacataaatgcaaccaattctgatcataatatagaggcacaagggtcacaatctgcaggttaagatcaccaagatccattcaacataccaattgttgccagtaaaactgtgcccaggctttgcaattaacagttagaaccccagggatgaaacaaatgtattggtacaaactaaaagaatgggttgctggttgcaaaatcatgtcgacaaaatttgcggatggctgtacctgtgctaccgcaatttcagctaggtttctttcagtcttctaccgaaacagaaacggaaaaacccgcatttactttgctcctcaccacaagccgagcatcttccaccagaagcctccagcaccaagccagatgatgatgttaacgatggaaatgacaaatccatacccccaccactgagccagtggaacatagccagcaccgtagaagacaggagcagacccaattccatagtgcgtgagtccacccatgatgtttgagaggaatgaaagaaccatggcagcaattagaggaggagtgcccaaggcgctggacactgacaaaaatgcagtgaacattgctccaatgtgcgctgcgccactggcaaagaaatagtgggagtagaagtacagcagcaccaagacaccaaacgatagttgccatgagagaccaaggccaccaacaaactgagcataaaacacaacaatggtcagtataggaaatcagcaaagacattgagagaacacttctattttaatatatttgcagagctcgagttagaagaaacaaaaatagcagaatatcaggtgagaataatattaaacatttaaactgctcatctccagctagtgccatttgtttcaagcttaacaatgataaccacgaggaccattcattttaagatatcttcaaatttaacaattttaaacacctccctaacatagcataattgccagcctatccatactattgacagtgttattgtttcagtatgaacaaacagcagtataagttgcttctcatttctatagaaggataagctagaaagattattcaagaaatttaatatctgatgtaatgaaaaataaattgctttgatttcaaactgctaggaactaacatattgtggaaaattaagtcaccatgctcaatgtttataatatgcttaccagttagttatagtcacaaagcttactgatcataaaatccttacaagcataaagcagatcatgtgatacgatttgacctgataagtcaagagatattgttacaggaggggggagggacataccttcacaacagtctcactgaaccaagagatcaacccgtatttgttgaggtatccagccattgcaataagagcagcaaaccatgtaagggtatcccacgctacagcctcccccaaacactctttccatgtaacaactccagaaatcaggaggacggataggccaagaattgcagcagacactgcatccacattcagcattccaccaaagatccaaagacctacctgttggcaagatgacaatgtatagtgaggaaaaggctcagtttttattcaagttggaggcaatcaagatgatgcaagaatgtagaggtatataaacaggtcgttattgggtttaccacttcttatcttttacaaaataacatgtttcacagtaataaggtgacccaatcacaaaccactgtagggttctcctaaaagatggcttgaagcttcgcaaaagaaaccacaaaacggtacctttgctattcattcactgataatgtaaattagtgaaagtcttttaagtgaaatcacatagtaattctacataggctagtcagagcacaataatgatccaaatctcacggatacctaaataacaattaccggtccctacctctatgtactaatcccagacaagacccctgctaaaatgagggcacaaacaccagattcatggaaatctccatttccgaacagcccactcctttaatatcaatcacttataagaatcctagtaccccacaggcaacatctttgtactgaaaatcataaacacctactacacatatagtacacttcgctagagtactgatattgagggcctatttggtagagctccagctccacctcttctggaactagagcgcagccaaacagtttcagctctacccagaaagagagtggagtaggctggatcactctcacaaaatgaactaaagatgtggagctgggtttaggttgctctacaattcaacttcagatccaactagtggagttaaatttaggagttggagcccaccctaataccccaaaagcagcataacaataatataatactagcaattgttaattcctcaacaaaaatggtagaacgaaaggaaattgctaataatcccatcaaataccgtgaggaacagcgttccagccatgatcttctcctccttgctcataggccccatcttctccaaccgctccttcgccagccgcggcgcgtcggggctggtcttcacctccggcgggtagatcaggtacagaatcaacggcacaaacaccagcgacagcaagcccggcacaatggcggccttcgcccacagcgtccacccgatcccctgcccgatcgtccccgccgtcaggttcgccgccagcgggttcgctgccatggcggtgaggaacatcgccgacgagatcaccgacgtctggaagcacgtgagcatcagccacgacccgagcctcctctccgtgccgtcgccggcgcgcgagccgcacgcctcgcacagcgacttgacgagcggcaggaagatgccccccgcgcgcgccgacaccgacgggatggccggcgccagcagcgcctcggcgaacacgagcgcgtagccgagcccgagcgacgagccgccgaaggcggagacgaaggcgtaggcgacgcggcttccgaggccggtcttgatgaagccgcgggcgaagaagaaggcgagcgcgatgagccacgggatcgggtcgccgaacgcggagaacgcggcggcgaacgtgagcgtccgcgtgagcacggcggcgccgaggccgagcagcgcgacggcgccgagcgggagaggctgggtgatgatcccgacgatggtggcgaggaagatggacagcagctgccacgcgttgcgcgccacgcccgcgggcggcgggaccagccatatcagcaccccggtcccgatggttgccaccagcggcttgattgccgccccctgaagcaccggcttcggcggctgcgacggcggcgccgctggagcagcggaggcggaggcatgaagggcgcggtggcgaggaggaggagaaggggtgagtggggtggggcgggagagggagagggagggggagggggagagggggc

SEQ ID NO: 26849 - DNA, 11944 bp, Oryza sativa
gcctctccccctccccctagccagccgcctctcccaccaccggcgccgcttcccttcccttctccctcccttctcgccggcacggcggagacggcgcccttcccccacgctagctgtggcggcggcggcggcttcccccacggcgagcggcggcggcacccttccccacgctagcggcggtggtggcggtggctctccttcccgtctcgccggcacggtgcagcggcggcggggtgcggtggagacggcggcggcgaccgtccctccccctctccctctccctctccccgttggcctcgatggcgacggcgccctctcaacggcggcgtcgacgacgtcggcttcgtccgagggtggatccgtcggcagtggtggccaccgcgggtggatccggcagcggcgctccctccgccgcctctcttctccctccggcggcggtggaggtggcggtgcccgccgattttttttttttgcaatttttttcgatggctattgctaaccgaatcagattgtgtatggacgaaaaacggacgaaaattagatgtgacgatcggaaaaatataaatatttatattagtcatagatttctactttttggaagggtatattttttgcctgctcaattcggcatttgtttcatcaattttgtggtgctaactaaattgggccgtgtttagttttaaagtttttcttcaaaacttctaaatttttcatcacatcaaaacttcgctacacacaaactttcaacttttccgtcacatcgtttcaattttaaccaaactttcaattttggcgtgaactaatcacagccttggcctgcctgaaaatggtgttggtatagaatccagacagttggccaaaacagacaacgggataaacgcaagcttgcaaggttgattgttgagcaactatatctgatattatgcattagcagcaaatacaattgatgcagtgcagaaattaaacacaatatatctctacaccaattgaattatcaaaacactgttgctgacaaaacaaagcagaggctaattaaaaaaaaagagagacgtcctttcaaactatttttaagaatgaattgtgagcatattagagattgaacaagagacctggttaaaatcacacaaccttgtcactgcatctcaagcagaggctaattcgatcactactagaaactccgtgaggagtaacctttcttttcttatcattgtacatttgttcttcggcaatttttctatacaacggtagctaaactgcaattaatgtttgtaaaactgttaaactgattcagaattcagatggcaaataatgttctgtgggagcatgagaagatacttttgtatgcatgcctactcatttccaatcataaaatatgcaacaaaaatcttctagctagatgtaagaaagatcatatatagtattaagaagcaagaagaagatggaacaaactgcagattacttctgacataatctgatttctatgggtgtgctgaaacaagaattattaattctgatttcttctttttttttactaatcgtattattctgtacagagcctagttattgcttctttctattctcctccttttcatctacggagtactactttctcgaagaattttagttcttttttttactattattttacattgatcaatcatttgacctacaagacctcgcacaaaaaaaaaaagaaaaaaaaagaaagaaagactggatctacaagggaggaattaattcgatcagatcgacaaatcatatccaggccatggagtttgggcctgggctgagaaattagggaagaggaatgatagatttgggctggttgcattaggcccaacgtaaacaactgaacatttgaacccgatttgccattaaaatgaaatatgcaaaaggaaaaatgaatttgaaagatgtgcttcagttttgtccatgcactctggaaacatggggaaaaatgtctagactctttgatccctcaattcatggagtctaatatttcattaaaattattatttatgtagtgtttgcgatacttgtgcacatgaaagcattatttaggtgaagatagaaaatcaaatgcgattagctggtatatatatatatatatatatatataatataccttgtgatattgtaatcatgtttgtggacaggattagctacatgcctgatgacaacatcatgcattgcaatggtctagagatcataaccaatctgcaaattaaaataaatataagtaacatcataacacgcacatatattgcgtgatactgctatatttcagaggataaatcattgtttgaatgataattaagagttaaaattatacccatgtgcttcaccaggctagacaactcgatctgtgtggatcacgtgctttgaaaacctttttaatcacttactatattgtgtcacaatctaatattgggtttcactctcatttctggtcccattgtttttccagataaactgacaagcctccgtttttagtggaaaattgctggataagaataattgtgttctctcacgaggaaacagaaatgcttcggtttgaggcatgcatgcctttaaatcattttcaaccggagttaaatgcatgaaaaataaacttgtgatgatagatcaaacatgatgaacaaaataccaaactaatcacccaaagcatccacgccgatttgttaatgaaaaaaagaacttcctccatcatagaatataaggagttttagagattaacgtggttattaagaaagtaggtaaaattaaatggatgaatattatgattggatgagaaatagaggtagagaaaaatttgaattgtgaagggttatgattggttgggaagagaatgtcggtagagaagttatattttaggacaaattctaaaggttaaaaattattatattttgggacagatggagtataaatttagtactaaaaaatatataagtctagtttcctccatgtagcattgttagagaccggcgtggacctatcgccggtaacacttgactcactttagctggatcaactaaatgaactgatcatattttttttaacaatgtaaatcaactaagtatccataggtccgccaagggttttttttcttcttggcggttataagggttttcctcctttggcctttgcagttatagttaccacttttaccgcagagctatggtaggtgtaattaccagaatggtttggggaaatttgtttgaattgaaatataatttatagaagcaatgaaaatattaaaaaaaaatcttacaagtaatacataatttctagtgatatctagtgaaaaccttgtgtgaaagaaaaaaaacaaagttaaattcatttttttcgagtcaaactgaagttgaaacagagaacagggaaaagaagatcacaaagcccatttaatcccagcaaagggaaaaaaatattttctttctccctcatttaatctctccctacacaaaatattatataaaatgttttacaagtttcctcaacctttttgcaatttttttattttttctaaaaagcataccacggcgcggttacctcgaccgactgagggaggttgaaaatcttgaattcgaaaatttaaagataaattttatgcgataaccttcgtaacttcgtgtggtggtaaaataaacccttgcgcacggtatggcgaaacctgactacacacgcccatctccactatatattatgaccaaattgttggcacgagtccctcaatttgatcatagctgtaaccatacttcttttaagtgacaattgacagtcgttgggccccataattcacgttgtacactgtagtacgtgtacttccatctcacgcatgacaagtggacaacaaaatctttggagaatcacaaccatacatgtatactagctagtactatctacacctacttgtaaagttgcaagctagctctacataatccatatgcatgcatgtatagctttatcatcttttgctttctaatttcaacgattttaactaaattcttttctccatgagagagagtagagtagaggagagagagaggagatagagagaggggccagcatgccagacgtacactccatgcaaaggcttccacgcatgcaagttttgcagcttactgcagcagcttccatccatcgatcgatctgttattgcatgcagcatacaatagggactgttttgatatgtgcccctggctagctctctctgtgtgtgtggatgaatgatgatgatgatgatttttgatggcatttggaagctgtgtgagagggacatgaaaagagagagaagaaaaattaaaggagagagagagatttatagctagatgatgggccaggattatgtgaactccaagcaattatgtgacctatagctaatagctctctctattgtctatgcttcattgcaaaacaaccccacaggggcatgtatgtatatgcacatatctctgtcccctcaactgatctccctgcccctcaggtggccatgataaccttctggctcaagggaagtgagaaatggaaaaggacaacaagagctggagtcaaagacaagaagactagagctctatctctctctcatatctctccttgaaagagcatggaaaatggttggttcacacataccagctacaccgtagtacaatgatgtatatactaaattgtggggttattatacgtacattgaagccgtacaaactgtagcagcgaataatttgtatgtataagtagttgctttcaatatgtagaatttatgcgtagacgcctattctcatgatttatatgaacacaaaccaatggccacatttatttattgatccaagcatgtcactacatacaaccttttagtgcattagtttcaatgcaacagatatactcagttgccttaagcgcttccttaggatggtgtattgctaaattatagtgtaaattttggttcctcgtccacaagaaaatatatacctcttggtatcgactccctatgtcaagtactataaaattcctcttgctaaaaacattaactttctcatatagaaaatccacgaatcacacattcgagaacaaagaaataaaaacgcaatggcttacacataaaggggcatcctataattaagctacatatatagaagccacatgcctagatgacctatgcgtgtgaacctagcattttacaacccttcttttatttcctctcttgtttgctctccatctacttgtccagtttctaagcaaagcacacacacgcacccatcgccatcaccatcatatcatcccctctcctcctctccttcttcctccctctcatctctctccattgctagctcctcatcactccatacaaacaacaagaacacaacacacttgatatatatacctcacacacactcatgtccatttctccctagctacttatatccatcatatctatctacatacttgatcaaaatcacagcaagatcggcaatgaggaagccggattgcggcggcgggggaggggcggcgaagggcggcggcgttctgggtgtggcgggagggaacaatgcggcggtggtgggggggaaggttcggaaggggctgtggtcgcccgaggaggacgagaagctggtggcgtacatgctgcggagcgggcaggggtcgtggagcgacgtggcgaggaacgccgggctgcagcgctgcggcaagagctgccgcctccggtggatcaactacctccgccccgacctcaagcgcggcgccttctcgccgcaggaggaggacctcatcgtcaacctccacgccatcctcggcaacaggtgcagctaatcagttaactataagctcctacgactaagtagtacctaattaattaattaccatgattaattaagctttaatatattaggagattgattcattaattacttcattgtctttgtaatgtgggggttcatattgtgtgttcttctttgttcgttcgtttctcatcggtttttcttaagtagtttgcttgtcttcttcctacattaatttgtttcttgtttttcacaaagtgctagctttttctgtgtgtgtttaatttgttttgttttctcgtttggaatgttgttatattgtgttgatagggctagcaagtaatgtagcataatctttcaatgaatttccctcgcaattaaaagatatatatactgttctttttttaaaaaaaaatctctctctgggtgtgtattaattgttttcctctggtttctcttttttttttgagatggtgttgattttgtttataattctctgtggtgctctgatctacacatgcatttctccaaaaaaaaagtatataagagattacgtgaatttgacacaatacgtcgtacgatatttttttcccatgtacactgtcctagttcacaactgtcttaggtagatctaccgtgagcgtacaatttccgtattctacagctgaagcattacagatcacgtacagcaaaacgttgacgtgcatatactcatgcatgcatatacatttataatatgtgacataagttaaaaaaatttgattattagaatattaatatatatacagacatgtgtctcaagtctcaaagggctatgagaacaacatgagtcctggatatatcaatcaaaatatttcttgattaattcttttttttcttctgcttaattttgcatgaaatgtcgtacaccatgcataattacaaaactgatatatatgtaacgtagaaactaaaagttgcctgaaaagacaccgaaagggatacttcatacttgtatacgttctaattaaccctgaaagacatatgcaaatttgtcggatccaatcatccataattattgattaatccttgtcttaccagaaatgagattatgacatcgactaattacctctacgtactttctcacatgtaaaactaacctatatatatatatatatatatatatatatatatatatatatatatatatatatatatatatatatatatatgcttttcgttttacctaaaaaaaccttttcattttagctttgtataaagtcaaatattcatcataaattttcaaaaattcgtatacagtttaacatgtgaattatatattatgaaaatatttctcatatataatgaatttagaaaataaatcttattatggtaataactgtataaatttctagagaattgatgatgaaggttagaaatgtttgacttactgcaaagttataacgacaagtaatttttttaagtaaaacaacaagtaatttgaaacggagaaaatcatatatattttatctttatttttttttggaagtaaatactagattaatcatgcttatgcgcttatgcatgcatgcatgcatgcataaaaagaagattaattaaggcgcattgacatatatgtgcatgcagctaattaacctttttatttaattaatcttttgtactacaaccatagctatagctaagcttggataataattcttgacagaaacatctcgtttgctcactgatgaaaaatctaccgtactacgacgcatggaattattgcaggtggtctcagatcgctgcccggctaccggggcgcaccgacaacgagatcaagaacttctggaactccaccatcaagaagcgcctcaagatctcctcctcctcggcgtctccggccaccaccaccgactgcgcctccccgccggagcacaagctcggcgccgtcgtcgacctcgccggcggcggcggcgccacggacgacgtcgttgtcgggacagctaatgctgccatgaagagcatgtgggtggattcctcgtcgtcgtcgtcgtcgtcttcctcgtcgatgcagagccggccgtcgataatggcggcggcggcggcggggaggagctacggcggcctcctcccactccccgaccaggtctgcggcgtcgacacctcgccgccaccgccgttcttccacgaccactccatctccatcaagcaagcatactacggatcaaccggcgcccaccaccaccaccacgcgatcgccaccatggacggatcaagcttaataggagatcatcaccatcacagcagcagcatcctctttggcggcgcatcagtgccacctctcctagaccaccaaaccattctcgacgacgacgacgaccaccctaacaaaaccggcagcaacacgaccgcggccacactgagcagcaacatcacagacaacagcaacagcaacaagaacaacagtgataataacaacaacatcagcagcagctgctgcattagcctaatgaacagcagcagcaacatgatctattgggagggtcaccaccaacaacagcagcagcagcatcagatgctgcagcagcagcagcagcacatgagcaggaatgtcatgggagagtgggacttggaggagctgatgaaagatgtgtcatccttgcctttccttgatttccaagttgaatgattgagagggaggggccccatctatagctgccaaaggagtacattgcatatatatacaattatacatatatatacatacatacacattgaaggtagtatttttttccattgacacatatattctctcttccaaatgtacaagatttctcacaccaactccacttttgatcttgcatatatataaatatcttgaaattcatccttgtacacaaaattatagagttatgtagtcatgcaaataactaaaagaacttgagttgtatatatactcagtatcaagatactaggtaagatcgttttttttatttgtagtatcacaggatcgaaatactaccagattttagaaagtacataatttaatataaagtataaagtatgttgtataaattaaagcatataatattgattttgatcaatttaattggttttatgtaaacttgagcgtatttattcaaattattttcaatccaccttattttaaataatattttgtaggattgtatggatcgtagaatcgagatactacctaagatttcatagaatcgtctggaaataaatagtaagatcaagatactataaaaaattaagatactagatgagatcggtatcattttgatttggtaggatcgcagcaccataagatactaggatacggatcagaatatcgacagccttgcatatatagcgatatcataattaaatatatagttagatgccttaattatgtgggtgttcatgtttagaagttagtttagaattagggctaaacactgtagataatgcttcacctttttataaaaattttcttcagggtaaagtttcccctgttttgtttctttgcttcctctttcctttcatgcaccaactgcttcccttgcacatgaagtcacattgatgagcttatgaataaatatattgaagtgtctgaaaggtgcatgcagctagtacttgcctgagtgactagtgatcagtgtggtgttggagagagatgatgagtatcatgtgcatgcatgaatgaagtaggaggaacagtcactgtcactggtcaaaatatatgtaggttggttgcaattacaggtcgttagcagatgcaattagctgctagggtccagaaagataggaaggggaggcaggaaagtgagtactccatgtactatctttgccatcacatctctctctttctctacccctaatatcatgctgtcatctagcacattgagacaatttaataggatattccagctagctttgatagcttctcctgaaatttaataaatataaaaataatttgtaagaaatttaataaagcaggctccattgggtttatcttgaaattagagaaatatatataggttccaattgaaaataaagattatgagagttctggtaattaaaatttaattctttgtttcatgcgaaactgtcacgagataaatactccctccattccaaaatataaggcataaccacccctaacacaaagactaagaaataattattatcatcttgtagtttggatcatcctaataaatacaatgcatgcatccaatagaattaaagaacatgagagtggaggattaaaaaagtaataatttaatggagaaggggtcatagttaattgcctatatgcatgcatgccttatggagtattatggaacatctaagaaaagtggtttatatggaatggagggagtacatgtataactaatgagccctgtctgaatgactatttgacactatgcaaactgcatgtagaaaattgtttatcaaaccactaattaatttgatcggagtttgaatgtataataaaccgtgcaacttgtcctcttgcatttgacacaataacatatataatttgtcgatgtttgatgtcgcgattccgatatttgtatagtgtggggattgttgataccagggtatatacgagattgtagtaaaaaagatggagacggggatttttatacaggttcgggcccctgaattgtcaggtaataaccctactcctgttgaccgaagccggtcgttgctcttattcaccataatcacaccagtacaatatttggggtagcttatctatctgttgtcgacatggtggtctgaagttctgactcgtagtcaacaacagggtagccttcctcctcgaatccacatccggcgaggtcagagacagcgctagattcctctctttggttcccgtaggtaccatatggggttttcctagacttatctctgatgtcgatatctggcagtttgacttggcgtatgttggcttgtattggcttgtggctttgtggcgtctatgttgtccatgtagaactctatttatctttctttatccggaactccttctatacccgaaggttgtttccgtataaaacatggtatgtggtgggtcctgccgagatttagtcaactactattaggtatccataaccctgacataattattctctaagttttaattttaacagcatatgctcatgttgttgacccaaaccctatgatgtgtaagtgtgggtaatgagccagctcgattcattaaggctcgacttattaggctcgataccttaataaacgtgctagcttgcctcggtttgcaaactggttcattaagattgttaggtttgtcaataaattttatctaatttatattaatattactggctctatagttttaaatttaccgattcataatataataataaaatattaactaataaaaaaactaaatacaaatagttttaaaataaataaaggactaagtattggttaagaagcaagtataaaaagaagatatgatgctcgtgagctagctcgctaaactaaagagataaaagcgcagcttgacttgcctcgttaggactatgagcttgattcgagctgagccgcgagtttttagagcttttattcttacccctcccctagtgatgtgacacactaaaattgaattagtgaacggtaaaatttctatttgctgtaattattaaatatattcatactatagcattgatcatctggtgatcagtatatacactacaccgcaacaccaaatagaaggcaatagtttgttgggaaaaatggactattggtacaagtcagtctgccggtaaatatcctggcaaaacaatctatcggtaaaaagataactatgtcaaacaatctgtcagtaaaagaaagtgacggactatctgtaggtactcggtaaagatcttggaccgacgagctgtctgttgctatatcactagggcgtgtcagatattggggtggataggataaggttcctgtgacaagaaaaaacacctgtctccctcaccacactgctaggcaaggcgtagcctctagggttttggcacgaggaggcggcgaagcaagccagccgagcgagtgggtagaggtgcaacggagctgctacaaggtggacatggacgagggtgtagccaccgggaggacgacatggtggagatccccatctaccgaaatacaatatctgtcggaaaaaa

SEQ ID NO: 26850 - DNA, 4773 bp, Oryza sativa
gcatcaaaattgaggaaaaaatcattcaaatctgtatattcgcttaaagcaaaccgttacaacaatcattccgtacttattcgctgtccacacatttcacacgtactccctctatcctataaaaaatcaacctagtactgaatgtgacatatcctaatattacgaatctgtacatacatccgtccaaattcattgtactagaatatgtcacatgtattagattcgttttttagggacggaggaagtagctctatttttcttacaaattacaatcatacagtacgtatacactgtctacgcatttcacccactacatggtatctctcttttccttctgtatctatactccctgctgtcatctgaatgtctagatagagtaagccataagaatttttttaaggaaaggcaggagattttgccttatgtagtaagccgtaagattacgtagtatagaggtaggaacagcacagcgagaagcatcccgataatcaccctgcagattgaattaattaagcagttaggatggtaacgtcgaaacgaggactctctccgtttctaaatgtttgataccgttgtctttttagcatatgtttgaccattcgtcttattaaaaagaattatgcaatatgtaaaactatatgtatacgtgaaagtatatttaaccatgaatcaaatgatatgaaaaaaaattaataattgcttaatttttttaaataagacgaatgatcaaacatatttaaaaaagtcaacggcgtcaaatatttagaaacagagggagtatatactttctcacttaattagtaaatcagttggaagatcctacgcggtgataataatctcaggatgcagcccgtattcttttgcaaatatgaatgatgaaatggcttgtggtacagcagcctgcaaaatgtttgcacagatcaagagatcatcagttttccttgcgtagaacaggattacaatggcgagctaacataggagagtccgaaacgttccaatttgggtaaagctaagattaactctgagtctctgaccattatgtttgaacacagaaaaaactggccattatgttcttttaaaaatctgaccattgtgaacttaactatttgagtaaatctaagctaggaagtgatcaagattaaaagttatcaatctcagggaaaaaaagattaacaattatcaatcgtcttgccatggtaaagaaaagctactttcaaccattatcaaccgcgctcgctttctgaatattcaagcaggtaattaagaagggttggatttccatcatcgaagcaagaaaagaaaaagattaaagagcgtagttggaaggtaatatggaaatgtgtcgtgagaaagttgcgtttggtctctaaacgtctgactacaaatacattgtattagatacctgtatgatggcagcccggagtttgttgccgtgaaggccaaccattttggatgcaatggtcatcgcaatgggtccaagagcaaacttcaaaacctgtcccagaagccacccgcacagatcacaagctatgatactttcctgacttcccatggacaaacctgcagataaaatgagcatgaccccgccccaaaaacaagtgtccaagacatgcatatttgttacaaaggaaaataaaagacaatctgttactgttagtgggaaatttaaaaaggaaaaataatgtatatcccctgtacctggtgtatcatatactcctatgatatatacataggcagaacaatttatatttatgcatgtatgagcacatgtcaatgttttaatgcgagtataaatttgtacttacccgtgctgatcataggcagcgctcctatgcccagtgacaaggacgcgatattcactggtggagaaaccctttgtagtcccggttcgtaacttctctttagtcctggtttctaaactgggactaccaatccgaaactaaagatcgctatctttagtcccgggtgaaataatcgggactaaagatcgatctttagtcccggttgataacatcaaccgggactaaagatcgagctaacctttttttttgtatggccctattactgtatggtttatatatatatatatatatatatatataaaccatgcatatatatgtttcaatacatatatatgcatatataatatatgcatatatatatatatatatatatatatatatatatatatatatattatatttatatatgtttcaatacatatgtacatgcataatatatatgtatttatacatatatatgttttgcaaatgcatatgtatgtatgtgtgtgtgtgtctatatatatatatatatatatatatatatatatatatatatatatatatatatatatatatatatacacactcatatagggcaccatggtgcccggcaccatggtatcaaatgcacaaaatcactcaaatttttcaaaattttcaaattgtgagtatatacctagatataataattcgattcatacctatacctatcaacaaaacaactcaaatttaactttatttcacaatccatgattacatacctaactaattatatgtatggatgctatatacctagaatcaaaatctaacaaaaacaagttcaaattcagttcaaacttgctttgaactagttagtaaagtggttaatgttaatacctaagtgctttgaactgcttttgctttgcgcactacaaataaatgacaaacgacgagagatctaattaatatacacttgtatgtatttgaatcgcagaaatatatatgtagagcatgtgtactcacagaaaatttgaacttttgtctaagtctttctctccagttgccggggaccaaatgacggaaccgataccaagccctacatggagtttaaagctatgattcgtagtagcaattaacataacaagattttcttaattaacagaggaacttatgacagtacctgtctataagttcgaaaaccttgtcaaacgtagactcttttttatccattgagtcatatacattgacggtgcaggccgacaggtcgaaagtaaaagcacccagtggaatctacaatgtgcgtgggatgcattacatatgaaacacttagcaagttcatacgggaatgaaatttggtataggaagacagtaaaattaaactaactctgtgttgtacggcaacagtatgaacgtcttgtaatgctgcgcctttaggagatggacgagattgtcctctgtggcttgcggatattggtcgagcattgcgacgtttactttccgagggtcgatgaatccagtatcgaaaaccccccgccgtcgggccctttgaatctccattctacaatgataaaagggagtatattattttctatagtctacttatatacaaggacctaattaattaaaggagacgtagtaagaaatctaactgaacgatatacttacaaaatccagcaactcataatagagacgtcgagggcatccagctggtatagttcgtagattcccttgaaattgatccagagaatgtcatcctttaattaattaggtctttgttcttggcggcgtcaactttcgccttcttcgttgcccttgtgtgggcaagcggtggagcttggggggcccttgactttgaaggtgccggaagaggagcttgcggaggagtcggtgcaggagcctaaggtggagacggtgctggagcatgaggaggagtcggtgcacgagcctaaggtggagacggtgcaggagcctgaggaggagtcggtgtaggagcctgaggtggagacggtgctgaagcctgaggaggagatggcagagccggaggagatggtgcatgagacgccgcttgtcgcccagggaggatgatgtaccgcctgcgccatagaataatggcatggcttgtgtctcgtagatgcgtctcaccgtctcctccagggtaatccagcgcgaggtcctcgtacgcgccttcgaccaactcaacttcgaccttggagtatcctgctggaatcggctgcagtggtaagtacctgaaaggtccattgggatggccatgcccgacgccaccttcatgtggtgagaggttatttattagtaatcaacatatataagcagcaactagcggaatggccaaatctaaaatatataaactacgagcttacctttattgataagttcttgaaaggaatatgcagctcacatggtgtccactgaatgatgtcatcaacggggcaagtggattcgtcctggtttgtatggcgtccatactctgtgatcctacctgccccattgaggcgcagctgctacggtttcctgacgggctcaccattgcaggaggaatggtcggctggggatcatgggaccgatgtgcggccatgcgttcatcaaccttccttgccacctcctcttgcatgctgcgctcgtagctcgataccctgaactctagatctgcaatcttcaccttggtatctctcttgctcctcatccgactcctgtacgtgtggatgtcctccttgaacctaatcttccaaggaatcacccctttcgctcgtgttcgtcctggatgctctggagtctgcagggcgagtgacagctcgtccctctctctgtccggtcggaacgtgccctaagaagaggcttccactgcgtctgctagtcaacgcgcagcctcttgtatctgatcgccgaagaccagtgggccatcagctgggttgagcgttccaccgtgagcatagtaccagaacttcgatcgttccggctaattagcggtggccggttcgatacccctctcaag

SEQ ID NO: 26851 - DNA, 602 bp, Oryza sativa
ccaagatgacaatgaagacaggaagactcaatggtgtccttctggtatctttacaaaaaatcagaagagaagggtttaaaggttgaggaactggaagcgctttcaggaggttgagcaagaaatcaatcatcggttgaagaaggcgaagccgagacaggtgtggcgtgttagaaatcaagctcctgtagccgatgaagccgcagccgatgaagcgaagatgttggctaaaggaaaaagtgttgtgaccgcatcggttacatggttttcatattgcctgctgaatttggggtcaagcaagccgatgtcgatgaagttgaagaagaatcggctaagttgattttatcaccagagcaagcagtcttcgagaagccagaaggaacagagaatcggcatcttaaaccattgtatataattggctatgtcaatgggaagccgatgtctaagatgatggttgatggtggggctgcagtgaatttgatgccttatgctacatttaagaagttaggtagaaatgctgaagatctcatcaagacgaatatggtgctcaaagattttggtggtaatccatccgaaaccaaaagagttttaaatgtggagatgat

SEQ ID NO: 26852 - DNA, 589 bp, Oryza sativa
cttatgaatatcttctttggccataaagatctgattgtaccctgcattaccatccataaaacttaaaaccttgtgtcctgaagcagcatcaactaactgatcggctactggcattggatactcatcttttggggtagctttattcaaatccctgaaatcaatgcacaccctcaccttgccgtttttcttaataacaggaactatactagaaacccactcaccatatcggcaaggacgaataaaaccagcatcatatagacgtttaatcttagccttgacaggttcgagcatatcggctttgcatcttctcggaggctgctgatgtggtctaacccctggtttgataggtagccgatgttcaacaattgatcggctgagtcctggcatctcacaatacacaaaagcgaagcaatctttgaatcttttaaaagctctatcaacttggttctaaattctggagataagtttttactgataaatgtcggccctggtcgatcacctggacctatatcaatttcttccaaatcatcggccgacatgaaaccctgtccttgtttgtcatcgagatcatctactgtgtccttggtgt

SEQ ID NO: 26853 - DNA, 542 bp, Oryza sativa
ctagaccccgttcatcaaaatctgacaaatttggcaccagttttttattcgaattccgtacaggttaacaaataaaccaatcaaatctctactactgaattgcaatatgtgttggttgcttgtgcttgaattttgatacagagggtcagagattaagtttgttcatcgcaaatcgttaatctgtcactctcctaaggtcaatctattacgtactctctgttggatagtatagaaagagaggatactgcgaatattggacacattgtattgagcctcagggggccgatatatataggagtacatggggaagagataaggaaatattacagatatggaagaaatccaaacaaaccaatcctatcctaatatgactctaactaccatatactctaacatcccccctcagtccaagcgtgagcagcgcggacacttggactggagaataaaccggcaagagtgctcaacacggataatagccctttgtgccatagtcgatgtagccaaagcgaaggagccgggagagccgtggtcgctgaagccgt

SEQ ID NO: 26854 - DNA, 1359 bp, Oryza sativa
aattaaggaggtaccatgatattcagtaataccactttcagtttccaaatgccttgttctcaaatcttatcaaaccaactcatatatctcgtgaggaaaacaagatcctttgtgtgtgtgtgtgtgtgtgtatgtgtgaaaatcgtctgacttaaatcagtcccataccacattatacatgcaatatatgcaaactataggtaacactcttttatgttaacattttcaaaatcacccatgcacaaacacttcaaaaatattttctaataaagaacttatggttatttttgaggaattccattagatgctttcgtttgttccttatagaactatgatttactagctttatcttcaaaacatctccattcttttccttaaaatgacttacagacgagttagcagtgccacttgaaactaattggaagctttcttaggtttgggagatcgaggaaggaaagcacaagccaggttctgtgattcatactgtagggtggcctttggactcgaaaacatatggaggatcatttatgtatcaccttgatgatagacaggtagttcttctgttatttgctacaatatccctttatgagttctcttttcttttgcaaatatatgttcagtgaagtctgtcatctgtgtaaagatgtaaaaatgtatttatcttacatgatagatgcatccttctccacaacctaagttcacagcttacagattataatttgggtttaaaggaggaaccattaattcatcccttatcataaggccttttgtttgcagagtggataaatgtataacttgctcagttttttccccggaaattttgattactttatcgcttagtggtgtttactttatctctgctctgatatttcagttagcgataggtctggttgttgccttgaactatcaaaatcctttcatgagcccatacgatgaattccaggttagtcaaatttctatgggtatgttcttttatgatggtagtgtactagtatagtcctgaactcctgatggtcgattttttttcttctaagcattatgcaatcatattttatatttcagaaattcaagcaacaccctgctgtcaggacaattttggatggtggaacagttcttcagtatggtgctcgtacgttgaatgaagggggttttcaagtaagtggcatgtcaaagaaatgaaaattttgttgtaaatagattcatatgatatgtaaactctgcgcataactatattgggcatctgccggtttatgacattacaagcattttacatcaaaatcaattcacctggtgtttccggttaactggtacatgaactttgaacacagcattggtatagtgttcttgttatgctatatg

SEQ ID NO: 26855 - DNA, 2455 bp, Oryza sativa
acgagaaaggtgaccagaagcttcacataaatgctcaaaattgtcttcattgcaaggtatttgcctccatgttgattcagttgtccatggacatttgcatcttttgtttcctgtaactgaatgaaatgttgacggtatctgcaggcttgtgacatcaaagatccaaagcaaaacatcgaatggaccgttccagaaggtggaggcggtccagggtacacagtaatgtagacgatagcaaaatactgcctgataccatgaaaacattaaccgaaaggcaataaattatcatcatgtatagaggacatcatgaaataatgtatggtatatttcttctggtcaatgtgaattcaacctatacttgtcaattggtcgttccaaagtataccaaaggaaaaaaggaaatacatgacaaaatcacagacagactacatcaggactagataatttcacagtgacttttgttcagtgtagtttcaaaatattcttgttttgaagaaatttaaatgccgtcaaagttgcaacatattttcctgttacaaaccataaaatgcagtggtgcgatgcgatggcccacaaggcccacttcgctggccacgtccaactctgtcggtccggactggattgcgaattacttttggcccatttgttgggatgcaacacgtgcggcctatatagtaattgggccgaaaagggagtgcgggctacgtgcggcccgtacttgttactccggaaatggaattgagagtttttgctccatcgatcagcgcggcgactcgattggaagccggtgggcggcggcgacatccaccggccgcggagaagacgattggcctccgccgccgctatctttcatttgctcctcagtcttcagctgcaacacgctcttcctctgctgtccggatgcctcaactccactcttcaaggtttcaaggtttgaggtactttatcgatgaacataatgtgttttagcctcaaagatgcaaccagctcacaatgatcaattcctctattgaagtttacatgtggtatttctgaatggaaatttacacacgttgtttggaaccacatttcaggaattcaagcaactcatcagattccaaccattctcaggcaggaaccaatgtactgatccattctggctgtgctttctgtgatccatacggcattttgcaacgaattcagtattcagcttacagccaagacatgtgcacatgcattacagtgggctcaaaacagcaaacccaacgtttcagtacacagttgctgactactgacaccaattgctgctggttccaagcttcagagttcagagagaccagatactttgctttcagatcacaagttcacaacatgttgagaaaggcattgatcaatgggataaattgttcagcaatccatccagcatgatgctttgcttgcatccttggactgaatacttaagagatagctaaagtttagcccctctctcccaaacacccccttatgttttttgtgaaggactaaagtttaggtgatgtttggatccagggacttaactttattctctatatttagacactaatttagagtattaaatatagactacttacaaaactaattacataaataaaagctaatttgcgagataaattttttaagcctaattaatccataattagataatatttactgtagcatcacataggctaatcacggattaattaggctcaatagattcgtctcgtgaattagttcaagattatggatggattttattaatagtctacgtttaatatttataattagtgtccaaacatccgatgtgataatgacttatttagtccctcccacccaaacaccacctcagtcagctttggattctcttatcaagagagaaaattcaggcgaccagaatacagtgatcaccagaaactgcagtgatcactgagatctaatagtagtactgtattgtgtacactacacgtgattaggagtacaatgtacggatgacaggacacattttaagctggtcttgtccaatctccaaagaacatgcatctgtgatctgtcactgagctttaatttaattagtagtaacagatatataaaacgaaggtatctcttcagattatctgtatcggctgtacggaacattctgaggttcagatcaccaaatgaaaatccaatctcctgaatcggttgaatgcagacatcaacatatgaacataatgctacctgcaaactgatgaaatgggcacaaaatcttcactgcaaaaggaaaatgatcacatttcattccctcacgggacactcgagacccaacctgatttctcaattccagcattagagaaggctagccagtatgatcagtattcagaaacagcaaaaacaggtacatggtcaattgatcaaaggccaaaagaattaaaattcctgaacattgaggactcatagatagattgatttgccgctacac

SEQ ID NO: 26856 - DNA, 4946 bp, Oryza sativa
  unsure (1)..(4946): unsure at all n locations
gtgcgctaaatataaggcaccgcctgcatagggtcactgccacacatcgtagggtgactgcctcgtgggccatgtggtgcgggtcggcgacgtggacccacctgtcagcgagtgtggcggtgaaggataatgggttgacgcgacgacagctgtggggaggagcccgggatcgcggtaacagcggcggtgaagtctgtggactttggaccgtgggttgcgtcggtgacgggagcgggcgatgcggccgcggagatgtcggttggattgcatcggattggatgccatggcagcatgggccgcacgcccgcacgggacggagtgcggccaccgcgtggaatccatggcgcggccggtacggagtgggccgcgtgcggcgtgccccgtgatgcgcccgagctggacggccatgtgcgtcggtgaaggctgtcgcgtcgtgtgactcgcgtcgtcgtcgtgtcaacctctgacttgccgaatggaaaatgtctattgtaactcccttaaatataggccgtatttctcgatcgtaaagctgctggatacaacaactctactaaccgttaaaaccggaaaaaaaaacttataagacactactccatctgtctctataaatataagggatattggttgaaaataacacatcctaatataacgaatcattataccaggatatattatatccgactaaaatctcttatatttagatacggagggagtatttagaatggcattagctaacgtggcaaattaaccacggtcaaaaacaccaagccaacaaggatgttaggatatcaagtggaactcacatgtcattctcgcttaccctccttcctttctccttcctccctcctccccatatctctctcctcttcccgcaatactatcttagaaatctttttcaactctcttaatagttagaggggttattatatctgattttatggttaaaagacgaattagatccaacctaagaaaaattagacattttccgcagcgaattgatgcccgctagtcgcatggatagatctagcccgcttatcctaatggatgcggcccacggcctcccgtagttggttcccgtgacatttcggcctttttcccccacgccgaagatccatctacacgggctccttcaccactgaggccaatcaacggtaaccggacgggcccatctacacgggctgcttctccagctgagcttcttgctgttgggcccgtgacgaagcacacggcccgctgaagcctctgctcgtggggacggacggagcgaggcgagcgccttcgccgtgccgcgtcgcgcggagcggcggccggccgaacaagccggccggcggggcgcggcgtgcgtgcacccactctcggcacggcggtgagctcctcctcctaactcggctactcccttcaaccgccgcgtcggctccgctccggccgccgaccccttctgcaccgttgggttcggggggttgccgggttgggggaaggcggctcctcctcgccggcgctgctcggttcgattcggagggggaggagaccagccgcgagcactgtagtggcgatgtgacgccccttcccttaccagtaaccagtactcactttgtgcctctgtttatctattattcagtttcactagatgttaatttgagaggtagggcgctaggcctgtaaaattttacccaataaggtcagttgatattttttttattcacttcatgtagtgattaaccctaacacgatcctagttgatggctgggcatgggcagaactgcacaagtagtgcttggagttggcaagggaattttatagagggattctgcgaaatcgagtgaaaggaatagttatgtttgcatcgtactttgattggtacaatcggctctctcttcaaagtttttatcgattattacccccttattgcagtgcctcacttggtcatagctatcttttgttcatttattagataagtgatgtcccagcattgtcgtttcagacattctgtaagtattccactgtctacctctccaatacacaatcacttgattttgagttctctatggttcccggcagttgacttcacagatctagtagtgctatgctttacacttacagctgctgtgcaatagatttttgttttggctcctactattgtgaactcaacgaaatagtttccatcaaatagaaagtgaaatacaggggtcaaataatttcaagggaaataaaagatattggagttcagtactttttgcagtaacaataacctgtcagggttgcatgacagaagtcatattccctgaagggctgaatggggagatgaatcttccctgattttcatatactcttaggctttataataatgatagcctctgaataaacccttcaaaatgttaagtttgactaggatagtgattgacagcatcgatgtaagtgaatgattattttgtttttgaacaatctttcatgcatcacatccagcttgcactgtcatcatgtaaacgttatttaggtcagtagtcaagttgttaagggcatgtaagtttgtttcattattgtttaaagtaggctttagcatatactgcaagttatgtctggtgaagcaataataatttatttgatgtgacgtgtgtaaaatatgataaggaggattaccgtgtgaaactcaagtaacatagttttttcagtttgttttatactttatatgtgggacccaaactagtaatattgaacttatttctacatgcttcaatacatacaactgaaaaaattttaaacccccaaannaannccaaanaatgacttccatatatttattattcatttgtaagccagttagtcctaaaagaaacaaggaaatatgtggagctattttgatcactgattcctctgattctgttctttttcctttttttctttaccccctgtgggtaattatatatataagaattgatgatatgtgattcgatgacttatttggaataatcctttgagtttcatctgttctattgatatctatactacatcagtttctgtccaaatgtttatttcaggtgaagaatcttacactggcatttgctgttcgagtagctgcgtgactcttatcagaactccggcatatcaattgatgaggcccaacttggtgagaatcttcctattttgggctatgcggtgataatctaaagatttcctttaatggttaatatgtaagcggcagactccttatctaacttctagtttacaatatctctatcaaagttgtggcaattgtaagtatggtctgtgaaaatgacccctcaaaggccaacccacttgtatggctggaaagttacaggaatttttatgctcatatgttcctatcagtcaacagtaacgtttcaatatattgggattctttattgcagttcctactgtagcgtgcaattccttatgggctctaaagcctcccctgtgattatctaattaaccacctggcccgctagcccgaatacttttgtcatatcttagtagatgatattatgacacacctccaagattgggctgacaacgaaagatagtgtagatggacatgaaagtaaaatgataaaacatgtccttttcgaaagaactgggactccaccaatttcgaatatttatcttctacagtagctgtgactaactgagctgaagtactgtatatggtacagatgctcattataaagatccccttaatctcacaattaagcgttaggcatttttagcatctgtatattaaattgcatgaatttctttatccttagcttggttcctgtttataacaagactatttagtccatgcaataattcataaaagtttgcaatcagattcacctcatgaattgattttatagtggtagagatattgctatacaatgcttagaacagagcactgttccaatgcagaagtctagggtacagaggagttgggaaaaggaaggtggtgataattgttctgtataggaatggggtcccatggcaatgttaactataggagaggaggggaggaagggttggttatgaggccatgtgcaacgggagggcacaagtggggaacaggggttgcacgggataacatgggagccatgtctctccatgttgcctagtgagtatttgtgtatagctttcgttcttggctggactcctctggcatgggaataactatcaacaactcacaattcccccacttctactttacattacttacccttttcctaccaatattagaaaccaaaagaaatggaagctttactattttttccttttccgttttacttttatagatccgatttcaattggcggtcatccctgtaggggacatggaagagaattcattccctcatatgtgatattttttagctggtattttgacaaagtgaataaaatctgattccttgatttctaccaagtaatcagctttaaagtttaagtatttttcccattgtaccattctgttatttcttactggaaccagatggattgctggggtgccatgtgtgctatggtcatggaagaaggattttgcacgctgtaaataaagttttttcaccacctaacactaacggatatcagaaagagtttcctagtgcactacagcatcggtgcgctcgcctaatcatgagacaagacaaccagagcaacggtggcaattctacatgtaattgagcacattaaggtgaaatggacttctgactgataaattcttttgtggtttggtcactttgtactgccctgtaatgacagtaacactcaagtgtgtgctttaggtgatggtaccttttgtgaaactgtagggaatctttgctggaaccatgatgtacaagcgaaatgttggcactttaacctaatgagaaggaaactagtagttctgattatcacatgggtcaggctcttatttgagtatggatgagatgcccaagataaaaataccttgggacactggaagc

SEQ ID NO: 26857 - DNA, 3397 bp, Oryza sativa
tcaaattcgttgtattaggagaaaaagttatattttcttttaagttattttttgttttgggaccgagggagtagagctagagctacgaagggcagcaaggtgaacgagcgcgcgccctgcaacctccacgttctcccataatttaaacaggaggcatcaatcccacagctccattctttttaaccttttatggcagacacatcaccccacacttcaaccgtttttatacggatccccagccacagccaagccagcctgaccccaaaactaattttgtatgcttgccaaaggatcagccatactcactatagctaggcaaccccccccccccccctgctggctctaactccgaggcatccaagcctaaaactacagtggtagggtatctcacgtactaggagcacaattttaattacaggactagtgctactgggagtagtatacagtagcatagtgtgtataaaagtgtggtttaagtagcaagaatttgtgcaagtgataattaatcaagtgtcactttgtagcacatgctctcttagctagcactcgaagttgtcatgatagggcgatctacacaagatccttctactagttgattttgtgctggcaatttaagttgatcaagatcataccgaattttatcttttgatctacctaaatttttgcaggcattttttttatttacatgcatgcatgcatatgacaacataccgtgacatctagcttggatgctacctagttattttaatgagtttacctcggttataatttgataattacttgctttaaattttataccctatatatcaagccttccttgtgctatactaatctttggcatgtgagggctatctccccatgcttatactaatcgtggcatagcaatttatattaatatttgaaagatcgagatcgatccttatgggatctaaaactaaaaagtttacaataaattaagcattggatcctagagtataaccagagctgcacatgtaatttaaatcgttgcatctgcctctaatccttcttttctctaaaaataaataaagtagacaaagagcatcacacttatttagaaagaatgctggtataagaatagcaagaatgtaacatataatatgtcgcgagtatacactgtaaaacttcggtaacaacagtttgggaaaggaagaaaaaaaaactcaggtaatacataatggacagtttaggtaattagaaaaaacaaaacaaaacatataaaagaaggagagaaaagagaaaaaaaagagaaatgggaaaaattccggcatacaccagcaccagctctcttgctttttcactgccacttcacttgatgagcacatctttaatttttcaccttcgatttttttttcaccgcgcccttgcaacatgccacagtagatcgagcagtagtacacatagccaaacaaatttttaccgaggtgtaataatttgtaacaaccacaaccaccgcaacattttgcatatatacccttgtcttcctttttttttaaccgcgagagcgaggtgttattaccgctcctctgtgccgtttttcaccgcaccaagttttaaaccctctccgtgaaccctcacgaatggagggtccttattaaatttaccacaacaaatcaataaattaccacgccaccaattcctttttttttgcttttaacactagctaagaggagacgcgagatgggagagaccactgtaattaacacaagaacgaatcaagaaatggatcgatgctactagctttttcttgctaggaacatccagcgacgaacgatcgatgggcatgcatgcagcttgaaatgggcgaatttttctttcttggcatggagatgtatagctgctagcttgcatgaggaatcaatggagaaatatgccggaggaggaagagaattcttgaggttttaggtttttgagctttttgatggtgttgagatatggacgagccatggaggaggcgacaggtaggtagatacaaatggtacaagagatggaggaggaagaagaagaagaagccattgacgcgcatggaggtatgcatgtgtaggaaggagagagagtcaccggatggatggatggatcactggaccattgccaagaaagatccggtggtcgtcgttgcggccgccgccgtggcgggggcggcggtgccgggcgggttgccgccggcggccgcggaggcggcggcgttcggtctgacgacgctctgctggtggcggtgctgcggcggctgctggtggtggtgctgatgctggaactggatctcgtactgcatcttgttgccgtcgacgtcgtcgtcgtcgtcgtcgtcatcgtcgtcgtagtcatcctcgtcgtcctcgtccatgttgtcgctgtccacgccgccgccgccaccgccgccgtccgttcggttgaaggcgttgttcgccgccgccggctgctgcggcctctgctccatcatctccttcataatgtcctctggctttaaatgcgcagcgttacgcaatcagcattggatcaccaaaaacgaacagcagcgtaccacatgtgtacgcgccaattcgctacggccacacggggaaatgcacacggatggatgcacgtagcttagcttaccttcttcgccgccgcgccggtgaagaacttgttgccggcgacgacgctgccgttgctcgcctgcatttgcatgcccccggagccgcctcctcctccttcgccgttcgcgccgtttgtactgctggtgccgttgccgttcttggtcgtcgtcacgggctgtggcggcggcggcggcggtgtctgcgagatcggcgcggcgactgtcaccgccggctccgcgtgctccggcggcgggagggccggtgcggcggcggcggcggaggaggaggaggagttgagagccgccttgttgcggtagagggcgtcgagctggtggaagtaggggcaggtcttggagtcctcggggcgcttcttgttgctctccttgaccttcttgaagtacttgttgatgttctcccacttctcaaaacacctcttggagctccggctgtagcccagccgccgcatgccggcggagatctcctcccacagcgggcccttcggcccggcctcctggtaccggttgtccaggttgctccgcagctggatcagcgcgtgcacctccgccttgggccaccgcgacgacgacggctgccccccgccgccgccggacccgtcgtaccccgcgtcgtgcgcctcggcggccgtcatgacaatgtccatgctgctttgcgtctgcggcgtcgccggcaatggcgacttggtggcctgcggcgatggctgggatgctgctgctgctgctgctgctggtggcggcggcggcggagctggcgcgacggaggtgatgggggtggggtgagacggc

SEQ ID NO: 26858 - DNA, 2784 bp, Oryza sativa
  unsure (1)..(2784): unsure at all n locations
agctcatcacgttccccatcaccaccgcgggcggcggctcggcgggggcgcgcaccccgccggacacccccacagctgtcgccggcggcggggccagcgacgtcaccggcgatggcgctgccacgacgccggcggcggtgccgtgcagcgcctcgagctgcgtgaagaagcggtacgtcttgccgtcgttgcgccccgcgcggctctccttggtgcgcttgtaatacttgtgcacgttctcgaacttctccttgcacttcttcgcgctcctccggtaaccctcctccgccagcttcctgcacccaacccaccaccacgccgccattaaaaacaacacgaagaagaagaagcttaagctcgagctcgtcaatggcgagccaaaatttgaaggaaattaagctgtaaccctcacaggaaagttgcatgcatggagtagaattttactcgatttgggcacccatcggaaaagataaagaaaggaaggtgtgtgcatacatgcagcaatagctagctaaactaggatgaatcaaatcccaagaagagactagagagaatgctgcagggggggagtaaaaattccatctttttttcttctcctgtgcttgtgcaaaagaatgcatttttatggccaattctgcttgcaaaattggaattgatgcctttcggatctgaagcgtatgggcgtgtgttgtattgtaccaccatcttgataagagatggccatgaaaaaaaaattctttggaaaggtgaggaaggagagtgatacccgtattattttaaaatggaaaaaaagtcactgtgctcgtgaacgatggttaagggaaaaaaagtgaaaaggaggtgtttattttagccggtaattaattaactgagcctaaccaaaaatcacaccaggctactgcttctggaggccgccgagatttcatgcagcatttcgccgacgagaattcagccatggcggcgagatcgacggcggagcaattcttgaggggggctcatggcgttgaattttttacctggagacctcctcccagagcgggcccttgagggtggcgtcccggaacgcggcgtccatgtccgaccggatcttgagcagcgccagcgtctcctgccgcggccaccggttcccccccgcgccggccgcttggcttttcccccccccccttttccccccttttttcccgcgaccgcgncgcgcagcgcctgggtaaacccacctcgctccgcctccgccgcctacgccgagctcgtcgaactgctgctgcgccggcggcggccggctgctgatgggcgacgcggcctccgccatggagatccgccccccgccgcctcctcccgccggcgagaatggcgacatctccggcgccaccgcgccgaactgctgcacccctccccctcctccccctggctgctgctgctgcatgctactacctcctcctcctcctcctcccccacgagtgttaccactggggaatggaggtgatggaatgatcagtacatcaggagagctagtagaggtgaaaaggatggcaggagagagaaaacccaaaaaaaaaagaagatgaggaagaagaagaagcacaagaaagggaggaaacaaggaaacaccagtacaggaagaagcctggcaaaaataaaaattatactcctgcaacagcaagggagagagagaggaggaggaagaagaggaggcagagaggaaaaaagaattaagataccatcacttagccttgaataaataatagggtggatggatgagagagaaacagccagcagcagcagcagcaagcaggaggagaatatgatagctgtgaagagagaaaggaagaagaagaagaagaagtgaaagttgagaaatgttgagtagagtacaacaaagagaggaggaggagagagaaagatgaagaaagagagtttgtgttgttgtgggtgcttgcaagaagaggagatgatgatgatgatgagggagatgatgtgggagataaaacaaacaagatgctgcgctgtcaggggagggagctttgagctttacctcccctcctaaccacctgcctaatgctagttaaaaccgaaaggacagagagagagagagagagagagagagagagagagagagacaaactggtgaagaagaaaggaggggtaggaaactgtgggatgagagagaaaggtggaggcttgtaataaaagggagaggagcacaaatacctctacaaaaactcctctacctcaatccccatgggggaatatattggattctgtgattcatgatctactgtactaagctggaggagtatttttcacactggaaatttagtcataaattatcctcaaaattaccctttttattttacctcaccatttctactctcatcaataccttttcttttgagatgaaaaatataaaattcatctgagttagaagccattggttgcactggtgaccagtactaaacccagggccattggaggatccaaggggcagcagaaaaacaattacaccaagattggttttactactttgcagcagcatcagcaacaggcaaaaaaatcattacaaaggcaaaattaaatccccaaaaaaccaaaaaaaaaagtttacatgtgggaacaaaattagttaggagaattggagaaaaacaaaaaaataataattaaaggagtagtagtaggagtgagaggaggaggcagacaagaccacattataacagctgtaatgtgggcccttccggagagcgaaagaggtgcagaacgtgcccggcgataacgcggaccccccccccc

SEQ ID NO: 26859 - DNA, 1391 bp, Oryza sativa
atgcatatccaagtctcagaacttgtcatagtgtgtcacaacccctttaggatcctacgtgacgttgatgtggcatgccacacgaaatgacgtgtcatcattttgactaacaaatgggtctcgtttaagatttttcctttttctttttttcttatctttttttccctttctactgctttctctgtgacccgagcagaagaaagggaaaaaaaagaagaatgagaagaaaacgaagaagaaaaaaaaatggcacgtcacatccatgtggcatgccacatcatcgccacgtaggatactagaggtgatgtgtcaatttgggacctagatgatacactttgacaagttctgggacctgtatatatattttgagagtttagtgacctatacgacacaaccctacaagtttaaggaccgccaatgcactttactcttttatctataatataaaaaattataaaaatcaaataataaatagtacccgtacaatgcagataaaatttattattattgtttcttcatgtgtagatcgaatttagacttgcatatttgtatagcgtcttatattattatagtctatattatcaaattttatgatttttttatataactgtctaaagtaggtgtcatacatagcagtatggcaggtaagtgtagaaaataatttctaaccgtccgtccgttctcttcgtctccgatcgatcggccagagatctctataaattggcgccgagagtgagagctagccatgacaaacaaacacacactcagtagctcgtagtgttcgtacgtggtgagctactagctagctaagctccggttcaccatggacaacttgtacttgatcctcggtgcaatcctcgccgccgccgtcgtcccgttcattctgttccgcggcaatggcggcaagcgcggccgccgcctcccgcccggcccgccggcggtgccgttgctcggcagcgtcgtgctgctgaccaaggcgctgaccgacgtcgagccggagctgctcctccagaggctgatcgctcggtacggccccatcgtgtcgctgcgcatggggacgcgagtgtccgtcttcgtcgccgaccgccgcctcgcgcacgcggcgctcgtcgagggcggcgccgcgctggccgaccgccccggcgtgccggcgagcaggctcctcggcgagaacgacaacatcatcacgcgcgccgggtacgggcccgtgtggcgcctcctccgccgcaacctcgtctccgagacgctgcacccgtcgcgcgcccgcctgttcgcgccggcgcgctactgggtgcaccgcgtcatcgtcgacaagctggcggcgtccggccaggcaccccacgacgtcgtggacacgctccagtacgccatgttctgcctcctcgtgaata

SEQ ID NO: 26860 - DNA, 6190 bp, Oryza sativa
tacatggtccaataagcaggatgctaacagtaatagcaaggtccggcttgatcgtgctgtcgcaaatggcgagttctcgagatactttgaggactgcctggtggaaaatgtgataacaacatcctcagaccactacgccatctctattgacttgtcgagaaggaaccacggtcaaaggagaattcccattcagcagggattcaggtttgaggcggcttggttgcgggcggaggattacagggaggtggtagaaaattcttggaggatctcttctgctggatgcgtggggctgaggggagtttggagtgtcttgcaacaagtcgcagtgtctttgaaggactggagtaaggcttcctttgggtctgtgcgcaggaaaatcctcaagatggagaggaagctgaaatccctgcgacagtcaccagttaatgacgtggtgattcaggaagagaagttaattgagcaacaactctgtgaacttttcgagaaagaggagattatggcgcgtcagaggtcccgagtggattggctccgtgaaggggaccgcaacactgctttcttccatgccagggcatcggcgagaaggcggactaatagaatcaaggagctggttcgtgatgatggctctagatgtatttcccaagaagggatcaagcgcatggctgaagttttctatgagaatctgttttcctcggagccctgtgattcaatggaggaagtcttggatgctatcccaaataaagtaggcgactttatcaatggggaattgggcaaacagtacactaatgaggagatcaagacagcactgttccaaatgggatcaacaaaggctccggggccggatggattcccagctttgttctaccaaacacattggggtatcctagaggaacacatctgtaatgcggtgagaggtttcttgttaggagaggagatcccggaaggtctttgtgactcggttgttgtcctcattcccaaggtaaacaatgcgagtcacctctcaaaatttcgcccaatcagtttatgcaatgtcctgtacaagattgcttcaaaagttcttgcgaaccggctgaagccttttctcccagatattgtgtctgagttccaaagtgccttcgtgccgggtcgcctcatcactgacagtgccctagtggcatatgaatgtttgcataccatccgtaaacaacacaacaaaaatcctttttttgcactcaagattgatatgatgaaggcatatgatagagttgagtgggcttatctttcgggttgcttatcgaaacttggtttttcccaggattggatcaacactgtgatgcgttgtgtctcctcagtgagatacgccgtcaaaattaatggagagctgactaagccggtggtcccttcaaggggcattcgacagggggacccaatcagcccctacctgttccttttgtgcacagaaggactgtcatgtttgctacacaagaaggaggtagcgggtgagctacaaggaattaaaaatggcaggcatggaccccctatctcccacttgttgtttgcggatgatagcattttctttgctaaggctgacagcaggaatgtccaagcactcaaaaacacgctgcgatcatattgcagtgcgtcgggacagaaaattaacctgcacaaatcttcaatcttttttggcaaacgatgtcctgatgcggtcaagatatcggtgaaaagctgcttacaagtcgataatgaagtcttgcaagactcttaccttgggatgcctactgaaattgggcttgctaccacaaatttcttcaagtttctgccagaaagaatttggaaaagggttaatggatggactgaccggccgctgtcaagggccggtatggagacaatgctgaaagcagtggcccaagcaattccaaattatgttatgagttgtttccgcatccctgtctcaatctgtgaaaagatgaagacttgtattgccgatcattggtggggctttgaggatggtaagaaaaaaatgcactggaaatcttggagctggctttctactcctaaatttcttgggggaatgggctttagggagttcactactttcaaccaagcaatgttaggaagacagtgctggaggctgcttactgatcctgattccttgtgctcgagggttttgaagggaagatacttccctaactcgtccttctgggaggctgctcaaccgaaatcgccgtctttcacttggcgaagcttgctgtttgggagagaactgctggcaaaaggagtgaggtggggagtcggtgatgggaaaaccatcaaaatcttttcagataattggatacctgggtttcgacctcaattggtgacaacgctttctcccttcccaacagatgccactgttagctgcctgatgaacgaggatgccagatgttgggatggagatttgataagatccctcttccctgtggacattgctaaggagattctacagattcctattagtagacatggtgatgctgacttcgcttcttggccacatgacaaactgggtttatactctgtgcgttcggcttacaatctggcgcgatcagaagctttctttgctgatcagagcaacagtgggcgaggaatggcgtcgagactgcttgaaagccaaaaggattggaagggcttgtggaaaatcaatgcgccgggaaagatgaaaattactctctggcgtgctgctcatgaatgcttagcgactgggtttcaacttcgacgacggcatatcccctctactgatggctgtgttttttgcaacagagatgacacagtggaacatgtcttcctgttctgcccctttgctgctcaaatctgggaggaaatcaagggtaagtgcgctgtcaaactaggaagaaatgggttctcaaccatgaggcaatggatctttgatttcctgaaacggggatccagccatgcaaacacccttttggctgtcaccttttggcacatctgggaagcaaggaacaatacaaagaacaacaatggcacagtgcacccccaacgtgttgtcatcaaaattttgtcttatgtcgacatgattctaaagcacaatacgaagacggtggatggccagcggggtggaaacactcaagccatacctagatggcagccaccgccggccagcgtatggatgatcaattctgatgctgcgattttcagctcgtccaggaccatgggggtcggggctttgattcgtgataatacagggaaatgcctggttgcttgctcggagatgatcagcgatgtggtgctacctgagcttgcagaagcgctggcaattaggcgggcactgggtctagcaaaggaagagggcctggaacacattgtcatggcatctgattgtctcactgtaatcagacgcatccaaacttcaggaagggatcgctcaggggtgggatgcgtgattgaagatatcaagaagttggcgtccacctttgttttatgctcttttatgcatgttagccggttgtccaatttggcggctcattctctagctcggaatgccgagctgtctacctgtactgtgtaccgttctgtaataccggattatatccgggacatactttgtgatgatgttgcttaatcaatgaatggcatgccgcctttgtctcaaaaaaaaaaacaagcttgtgacttgtgagttgtgaggcttgtctttccgaggagagttgtacagtagtcggtcagtggtagactggcagtaggagtagtagtggtgcaggtgcagggccatgatgatactccactgtacatgtctgcatcgataccctgcgccgggcggccaatgattgcagctgggtgcagcgatagattattggagaggggggcgtccttgtcctgacgacacatgcccttgccttgcgtcatctcgcgtatggctcagaaagcctgcagaacatgtcagagctaggagtagctagctgctggcgtaccagtgctcgtatggtatggatcgtttttctaaaaaaattctgaaaagctacgccagttgcgagccttttggttaaggaaaaactgttataaaacatgtgccgacgtctgcgcaggagtaaaataaaacagtgcagcgtgtgatcatcagtactgagtactggtagtacatagaggtaatgtaggattaataaggatttgcatcgctcatgggctcgtttgctccgagattaacctgctggtgaaatggcacctcgacacacatcaacccctcccctctcatcagtcatcataaaccagcaaagaaaagcactctcaggagcatcgaatcagatcgatcggaggagtactacaactgggtataaagcgtactagtagtaggctgctccaaaggcagatcaaaggtgagaccaaagcgaagcaaactcgcaaaggcgcccaaccttttgcgatccatgccagcagcaacagcccccctatcttagctagctatccacgggatgcatgtgccatgtctgatgtcttcgctagcccgcgcccggtctgcgtcgcgcgacgccgtggacgagcggctcgcgccagcgtgcgtggctgctggctttgctggtgtaaaccgtgtaaaggcgtgcgcgcgagcgcggcgaacgatcacatggcgtggcatcattggcacgcgggggagggcccgacggccatcgagacgaacgaacgaaagaacgacggcgagctagatacttcccccatcccaaaatggacggagacagtactccctacatttcaaattgatctatatattttataggtacatcgagaccaagaaaaactaatacggagtaactctctcatactatatttactctagcaacaaactcaatgtatacaccatccctactatttcttagccaatagcaaatcaagatattgcatgtgggttataaatacttgtgtgcatggatgcatgcatcaatgtccatttactccaatgcacaaataacgaatagacttaataaatgaacacaaatatgtagataatttaggaataacataaaaaaaattatatgcagatcaatttggaatgtagagagcatatatctaggccgttggctctgtagtgatactaatttcttttcgttttctactctctccataaaaaaaccaatctaaatttatcccctcttaatacaacgaatctggataagagttgtctagattcgtcacaggttgttttctttttgggacgggggagtacgtaataacccacggcatcgtacgtactcctggtgttgccgtatgttgctctgcgtcgtgctatacggcctactaccggtacacttattcatacctcccccacaatgcaatcaatcatcgatcgtgcactaatgcactgtgcattatgcgtattgatgtgtatatatacatacaggtagtagtagtactggtagttgttagatgcgtacaaaagacaattcgtgctgggatttcttgtacacactcgcgacgcgttctcccccatcccgtggtattatcaccagcgactcgcgccacccaccggtcgcgttgcttgcgtcgttggcggcggcggcggcgagcagtcacgtgacgggcccgcgtgtaccggattctgtccgacgtggcgtgtggggggggggtgacgtggcggggcgcgggggatttgaatttggtgcgggcggctgagatcggcgatcggatcggggagggatggtgggatggggcgccaggctggcggtccaaccttgcggcgtgctgggtggagggccccacctgccatgacagctatactactacagtagctagcaaggactccaggagcacgatgacacggactggaggaactggagaaggacgattcatactgcatttttgccaagattcgtactagtagtatagcttttgctcgaatttcatctgtttttgcggttctgccgaatcaagcttggctcaccgacgcatttgcgaattgattggcgtttaaggtactgtttcaattaagatacagattttacatcggtctttgttagcacgttttttaaactgtcaaacactatatttcatgcgaaaaatttatatacatagattgatttaaaatatcatataaattcatttttaagtttaaattaattaaaacttaattaataacatgctaaagttttttttacgtgcgtacacttcatcttcacttaaagcaatctcaaatagggcctaaattatgtacgattgcagatgtaat

SEQ ID NO: 26861 - DNA, 3928 bp, Oryza sativa
  unsure (1)..(3928): unsure at all n locations
tattaacaataacgctgtaaaattacatgtgtctcttttttttttcaagactggtagcatgtccctgtttaaaggtgttagtttcataaccggaatgtctctttgttaatttaattcattagtactctccacaaactaaaattacaaattcttttttgcgagacaattttcaaaccctaatgctactgccaatggtggtgacagattaactcaagcccgtacgaggacgggtggatgatcaaggtgaagccgagcagcccgtcggagctggacgccctgctggacccggccaagtacaccaagcactgcgaggaggaagacgctcactaggctcttcctctctgttttttttcttcccattttgtcactccgacctaatttctccctgttgcaacaactgctctgtatccgtatacgattaataactgaatcttcaggctttgccatgtgttcagttggttctctgaacttctggtgggtctatctatttatctatgcttaattagtcacttcaagccagtggtctgtggaaaaaaaaaacaatgaaaaaaaaattggccatctatctgctcaggagcaaattataacggcttatctatgtattagaaaaggaaacagcaagttcttgacatgtacaaatcggtacgtgttaatttctagttttagaaatattaaataaaaaactaaattaaggatgcatgacaagttaacttggtacttgttgattttaaaatacttaaaaaaaattaattttaagtactgtaacttagtaatacttagtacttactattaattcttaatttaaaaatatttaattatgaaacatagaaagtaaccgaagattgaacattaattttttggggttttntttaaaggggttttttacagtgacattcacagttgacttcaataacacataaaattaggatgcatataggagtactaaactaaacgtacagccaatgcaaacgcaccgagaaaattcagatttcatcacaccatgacaccacaccggcgtttctaacaagtttgtaaataaaaaaaaaaactaaaataataataacaataaaattagtacgtgtaagattcaaatcggaattaaccgggggaggggtgcgtgtgcgtcgcgggcgaaagagatgggaggccggttttccgagggaggttgttgggcgtgccgtcgccgacggggacgcgccaccggtgccggtgcgcgcgcgggcgccgtcgcgtcgcgtcccccgtgaccgcctccgggcggcaccggcagcggcggcgtcacgggagcggcgcgcgggcgcgtcaacgtcgtccgcgacgtgggtgtgttttgctttgctcggctcggcgtgaggagagcagaggcatcggcgcgtggttggtttgggggcaaggcagagcgcgggcgcgtccacatcgggttcaggtcaaatcccctaatcatttcgctaatttgaccggaattattatcagcaaacacctctatacaccgtggtgtaactggttctcgtttttatttcaaactaattactccctccgtccatagtataagttgttttaattttctttctaatcaaacttctttacatttaaccaaacttatagaaaaaaaagagaaatatttatgatgccaaattagtttcactatatataaccttgattgatagtatatttgtcttgtgttggaaatgttattgtgtttctttataaatttgatcaaacctaaaaactttgactaaagccgtgtttagttccaaaataattcttcaaactttcaacttttccatcactcaaaactttcctacacacacaaattttcaacttttccgtcacatcgttccaatttcaaccaaacttttaattttggtgtgaactaaacacagcctaagaaaaaaaaacttatattatgaaattgagggagtatgtgccagtgtgttgcaacgggaacaagagataaaaaaacttgtaatttagtttcttttatatcggatttggaaataaaaatgaaattcggttttgtttatgctggtttttcacgggcttttctggagctgtttttctagggaaagagtagaacgactgtgcttttaaagtagttaagaaatgaagtcaggctgtttgaaccaataagcggtagaaacacggaaaaattagcataaaattatttataggtaaatattgtatatttatattgttctcagtttaaaagtcactgctgggaaataaatttcaatgagaagtccccaaattcaactgtaaaattgcgttttagattttatttatttatttttatagtcgcacatttttttagtttgctaatacatggaaatcgtcaaatgaattgggcaagtctgatggaatgcaggggaaatataatcagattagagtaggtagcagattatcaaatgtttgcaagttctttcgattttggcccgaaggtaaccagtacgtactagaggagtacaaatgtagaatacggttgtttgacttggagatacttcagcattatggagtagaatactgctcctactatagctggtcagagggcagcgaagactgagttgtcagtgagaaaagggaagcgaatatatgcgttcagttcagactttcagagacgctctttgaaatcctgggcgccatgatccaatcaattattagcactcttcggtacagcggaataaagttgtgttttaagttcataatgctgtatttattcttgatcatggactatacttaccagatttattgtttagtacatctaaactcttattactgaaccctgctgtcaatagtagtagcagtacagaatcaagttgaacatagaatatatacatagttttctggaatcccaactctggtcgaaatctaaatcaatcatcaacaatatgaacagaaacaggaggcactcggtgaactttacacgaacaaacgaaagaataaaaaccaaaatctctttggaatcgtaaaatggacgatccattttcataatcacctcaccctcccaaatcgctgccattttttttttgcaccacaatgtgatcgaaattcctccattagcacacacaaaccccaccttttgatgctccaaatcttttccaaatcataccactactactttttttctcctttttttgattcttttttttttgaggtgctcgcccactaccccgctttgttctaagctccacccagtaggaggggtccacgtgtgcaggtgacgccagatgacgtcatcgtcgtcatcgcaagttacagctcaccaaaagccccccagatctaagcgcctaggattcgacacgcctcgtgtgaatcacagcttcccgtggccgtcggatctcctcgcgacggccgagatggagccgtgcgcgccctgctccagcgcgcgcaccacgtcggccatcgatggccggaggctcgggttctcgccgacgcacgacgccgccagcgacgccacggcggaggcctcgccggcgtcgtaggcgctgcccagcctctcgtcgaccagcatgcgggcgtcgcaggcggcgcaggaggcgggcctgaggcgcggcgcgaggacggcggtgaggaggcggccctcggcggcgcagaaggcctccatgccggtgaggagctcgaggaggaggacgccgaagctgtacacgtcgctcttcttggtcaccatgccggagcggatgtagtgcgggtcgacgtaccccggcgagccgagcatggtgtgcgcggaggaccgggggcggacggcagcggagaaccccatccgcgccgacccgaagtcgcagagcttggcggacatggcctcgtcgaggagcacggggtttttttcctccgggaaaacccccccccccccgttgacgtcgccgtgcaccaccggggctcgcaccggtcgtgcaggtactccagcgcccgcgccacctgcagcgccaccgac

SEQ ID NO: 26862 - DNA, 3953 bp, Oryza sativa
cgccccagccacaccaccctttcccccctcctcctcctccccaaatcccccgccgccgctgccgccgccgcagtccgcgtcatcgtcgcaccccctgtcaccggcggccgaggccgccatgttcccgccgcagccgcagcacaagaacctgtatctctgccacatcctcgcgctcgatctcagctcgcgttgctccttctctgcttcttgcacccacgagaagaagaagaagaagaagaggaggaggagaggaaaggcgagaggaggaagaagaagaagaaaggaggagactttgtgtggcgtttggggctctgtattgtagccttatatattgctgcgtgtggggatttcagatttggtgggggtgtaaactgcaaaaaaaaatgcaaagacaaattaggatgagatgttgagatgaactggtgactgattaaaaaattgattattatgcaggagcagaaagcagagcctgggggtgagtgactggcatgtggggcccaccttactcactcactcattcactcactcgccagtgttaggttacaacaaatacacttgttaaacatgtacaggaaatccgttttgagctcaccttcttattccattattccaacatccctggaatccaatagattacactgaaattgaaacaattatggccctttttggatgggctaattattggattttagataaatcgatcactcataatgtgagctataggtacatgtatacgtggtagcttaggtagctccattggattagattacagctgaaacgccattatatgtgacacaggacagttatatttccttcaagatccaggatgtctcacaaccaccattgatcgtctaggtgaggtacgaaatgatgcatgcaatgcaaaagctttttcatcccatttattaatttgccgctgctacactgatcactgatcagctagctcaaaaccagagagatctagctgattaaccacccagccatgcattagctggtaattaaactgtgcaattaccagcagtacacttacactgacgacacaaatcctctctttctataaagttacagccacaagctcaacatgcgtgaagctaagatgagccattcgatctctctcatgcttaatctcaaccgttcatgttctatgcaattatattccctattaattactcaacttatttagtacctactttattgctaattgttcttgcttatttatttaataaaatttccatcctccttaaaaaatggagatatggagggtagagacgcctctccatttttttttaaagaaaaatatgtaagcgtgttggggattgaatagggacctctgggttgaaaccacacgtcccttctcactaaactattaagtgcatccaaaattttttttattcttatataagtgtccgcagcaatggatggggtttcatcgagtgacagtaatgacaaccaccatgtgatggagcttgggggtccgaggaggcgacagagatatgaccgggatggatttggttggtggcgtcggcttggtcgatccggccggtcgccgtgcatggcccggccggccggtggcggtggcggtggtcaagggggaggtgtggagctaggagacgacgacggctggtgtggtggccatcacggtgggcgcagcgatcgatcgatcgatctgagcggagtcgccgcgattaatgtgggtttttggttgcttctgatgatctgtcagcgacggattttgtggccgcgttagcgagcttattagcagaatgctttgatttgtccttgaatgcatgcatatgcatctaagaaatcatggggtgtgatactgagatgagtctgtgatgctaattaggctgcttgctgctggaagcttgcagattgcaatgctcgagtgttgttggcgaagtgaagctggcaggctcgaattaagctcgcatacgagtgtgctagatgctggaatgaaaactgtcgaaaacgatatcatgtctatggaaaatggttctcggttggtcgagaatttcatatactcaatttgatggcgatatcagtacaatgttgattccagaaatcataaaaatcaaagttctatatatatagggatagaataaaaacaattggaaatggtactacttttacaaaaattgtgatactcggtcgatcaggaatttccgccaccatgttccccttgtagtagtatctaggactcctgctgatgcagacgaaaatgcagtccttggtggtaaaagaaatatctctgttctctgaagtcacaaggttacatcagcaaaagcaacattttgcttgtaaaccctgactaaaatgtcagtatatagttatgcatcagtacttacttgccttctgctgttactactacagttactactacccgtctaacctttcggtgtttcagatttgcgagttaataaagctgagcatagatgaacagcttttcaaaaggagagagaggggcatgcattgcacacatcggattcctgaagctcacagaaagagagctagtatctctcttcacgatcgatcgcgttcactgaactcaacacatctgcatgggctgcgtacggggagcggttttaaaaggtgaaatttattgcttccaagctactgttcttgctacgagcagctagccatcctgttcttgctgccctctctttaatctttatggatcgaaccgtcttaattcttcttcttcttctgatcttcccctcttttgcaatgcaagggcatctcgccgtttggatgatccaacaagacaagacactgaaaatgtgacaagtgtaggagtcactggggtcaagcaggagtaagtgtgcttctacgtacagctgcacctgaaaaagtgagcaattgatctctcgtaatgaacacttctggtttactgaagctcaattcagagaaaagttcagaaaacatatatgtgaataaaaacagtgggaggagaggactggtgatcatttgactcggtttgggaccgtcggatgatggctcgttgcatgatctggaccgtccaccttgcgccgatatcacgaaaccatcaaggttcaacagtgcattggcttgtcagcattagagagaaaaaaacatccggtggcacgcagcaatcagcagcgtttggttcttgggagggtgctgctatgctacggatgctgcagcaagaaaagaaacctgtactgggaacaaaaagtcgctgaggctaagtcatcaggaacagtagcagcatcagcagcagcttgggccttactactaattgagtaggccaatgagcaatcatttggtgctgattcggatggctcactgaccacaaaacaaagcactaatctgcactgtgttgcaaaatggagtacgtccaaatgctctttaaggacaaagtgatggtcacagtgaagcatcttgatgagtgaattttgggacgccatagactttttcactctgaaacagctactagctgagatatataattgcaagtgctaccagtagaagtgtagaacacagaacagtgttcctggtgatggatgatgacagaattgcatgcctacaaagaaaatagtttcagtcagtgtcctgaatcactgaaaatatggctttctttgattcccagattgtctgtgaatccttttcagagatttagtcatcactatgttcaactctcgtgagaaagatgcaaacaaaagaatttgcatccgagattaggtccaagtattaatttaagcagttacacccagcgtcccggacaagaaattcagagctttcttcagcaggttactgtcatttttcacggctacctgatttggtcactgattgctgtcctgcaacagtgatctgcaaggtgacgaaagaaactagctccgaaagcaacggcagaagcgagttacatgtcacattttggtgactttccacggcgaattgcaccgtgtggatcacatgtgctaaactaactgtct

SEQ ID NO: 26863 - DNA, 1213 bp, Oryza sativa
atatgcatgtcaatcactccacattacatttcagttcatgaaaaaaaaatggagaacgatagccattcacccactaatttgatgaatctgccgccactatactacatgtgactattaagaaaaagctctaaaccaattcacaggaaagcactattgcttctaaaaattgtgaacataacttgaaactttgaaagaaagaattctaaagagtgatgtctaaagagtgatggacgtcatcattcttgctgcatatcttacctgtataaagaagttggtacgtcaaaggatatttgaccatctggtttcggatattgaataggcgagtgcaaactggccatctgttcacaagaatgtgtttggttaatgtcagtagtgaaaaaatgaaacaatgtgcttttcatttatgctaacaaagaatgtctatattagatgagcaccagcagtacttgaaactcacatctgttgcttcatggtcaggtatcccgtgctttaaggtaaagggggactttcctttgaatacgtatctaaaaattgaacaataacaacaaacgtcagcgaaccaagtagagtattgacttcatcccaaaagaagtatagaatattaagtaatattaacaaattagttgggcctcaccgttccagtgcagacaaggcaatgcctggaataaatccatattcaaatgcctgtaacagaatataaataaatctgtctgctcaatagcttcagaaaggaaaaaacagaaactgcatatcctcacttcaaaagcttgtatgacggaatacttaattagacaaaataaatgttcaggaagtctgtaacaaacataatcacatactggtctgtaattccgagctctataaagctcttcccatatccatgacttcttgagattctcccaatagagttccatcgaagatccttcaacaagagttttgaaagttgcttctgcagccagcatacctgttgtacacatccaaccctttagtacatggcttctcagcatactctacagttagcacacatgatctaccatttttggttgagaataatgtgccactttaaggagatcaaaatgtgtactctgaaagaaatgtaaagtaattgacataaaagtgaacaggcagcactacaacataaagctcaaagcatcacgtaaagagatacctgacttcatggctgtatgagttccttttattttgggaacattaagga

SEQ ID NO: 26864 - DNA, 1814 bp, Oryza sativa
ccaattcttcagctttggaggccatccatcgcaccatttggctcaagctggacaatattaagcattgtttctaaaatcagatactgtcgaataagtgaaatatactagaactttgcatagatgaagctaataattagaagaaaatctcagcaccttatcacatagtttcccttgttatcgaaaggagatggaagtgtccatgccttattctttgtcaacagccagaacttgtcagatgagacggggactcttattggggtctatcaaacacacagtaggcacataaatatcaatgccttatgtacttagaactaaatttactttgttactgaagtgtattttgctatcattattcaaggaactgccatatcaaaaggaccaggtcttattcattgggaatttgggacatctcatgatgcaattgttagtttgaaactgttactgagcatcaactaattaaatttcgcccccccccccccccaaaaaaaaaataaataaataattattattattatatatcgtttatttctgtgcatttgccctacgcaaagcaaaattagggagctgaaacatcctcatacaccaaaatatccatgatttcccatgatcaaatgaacctcaggcttctgatgaagggatcaaccatagttaatttgcacttggtctagagtctagacagcagaatggccaactaaaacatacttatatagcatatccagtttagagcagagaagggcatacatcctcttgcctccacttcgggatgagttcatccaacgctcgtggctcgaacacgttccccgacaatacatgcgcacctgcagcgagagcaagcaaaatcaaacaaacgccaaattacacgagcaggagtagagtaacgccatcgcgcactggcgtgctaagacgcaagcaaccggaccgaagggggaaccgattccggaggaagacacgcaccgacttcggagcccttctcgaggacgcagacggagaggtcggtgtcggcgtcgcggcagagctgcttcagccggatggccgcggcgagccccgcgggcccagcccccacgaccaccacgtcgtagctcatcgcctccctgcccccgctcagccacctcgccgccgccgccgccgcgccccacctcggcgcgcggtggcccgacgcgtggccaatccccgccgccgccgcgcggagcactcgttgcattgccgcgggaagcttcccgatcccgagccgaaagggaggaaggagaaggccgggaaggtacggaactgtggaggaatgggagtggcagttgagctccgcgacgggacggcgatgggattaggtcgctgaggtggaagaagacgaggacgaacagtattcctttttttttaattgaaaactaatactccctccgtcacaatataagggattttgagtttttgattgcaacgtttaaccacttgtcttattcaattttttttacaaatataaaaaatgaaaagttgtgcttaaattactgtagataataaagtaagtcacaaataaaataaataataattttaaatttttttaaataagacgagtggtcaaacgttgcaagtaaaaatctaaaatcccttatattacgggacagagagagtaataataattcgctctgttcatgggctgtttccgggctagctttatgggcctttgaacacttctactagtttttgggccttacataaatgggccgttacatggtgatgcaggctggagtttgggcccatcgaacaaggagcatggtattgctgggcttctttcggcctgccccgctgttcaagggggctgcagg

SEQ ID NO: 26865 - DNA, 1459 bp, Oryza sativa
  unsure (1)..(1459): unsure at all n locations
acaaccccctctcattttccccctctcctcctgagccaagacaattccctatcccctcatctcactgcagctttccactatactaccaccaccactgagctgccactactcatccagctaatnngagaaggaaaaaagaagaacacagatactttggtaacaagcaagaaattggcacagaaatggctctgaggctgtgggctagctcagctgccaatgccctcaagatctcatgcagtggagccaccagggctgcacctgcctactcaatctccagatacttctccactggtatagctagcttgagtagtagaattcatatcaaataaattttctgttgccttttgcaacaaagcatgtggttgttacaatgttctggttcctgtacagtcttgcattgtgccatgctatccttgcacccagttataaattgctgtggcttccttttttcttttctttcttttttacattctatattgttacattgactggtccatgctgtagttatacaccggagacatactaaatgattgaaaagggaagggaataaaatttagaaattccagttgttgaaaagagttgagtatacttgttgtaactatggtccctgttgatttaagccatggtgatgatttcatgctggtattgcagttcttgatgggttgaagtacagctcctctcatgagtgggtcaagaatgatggctctgtggccacaattggaattacagaccatgctcaggtgagccaaccaaaggagaaaatattccatgcctttcatgtgcaacaagattagttaaagcttaatgcatttctaaacagggcctaagtgtcaatttgctgttgtattctaaactacgtggcatgctacaaaatcaaatattctgccctctgctgcaacaactaacaacccttttcctgatatgtcacagaacattttcctttactacttttaagaaatatgatgaagtacctttgctgtaactttttttttcaaactaaatagaacatgtcttttgttactttaataagaaacaagataaaggaactaacttccactgcagaatgctagccagttactttttagtgctacacagtaatgatggcaattatttgaaaacaaaagtaacagtaagatggggggtaaaaaataatttgattggacctgactagatatatatttttttagataatgaatttttattaatccggtctctgtattcatgagggatatacatagccatgactagatatgtatgtatactcgcagggccatctgggagaggtggtgttcgtggagctgccggaggcgggggcgaaggtgagccacggaggtgcattcggcaacttggagagtgtgaaggccaccagccgacatcaactcccccatctccggtgaggtcgtcgaggttaacgacaagctctctgagacacccggcctggtatgtactcccaccgtct

SEQ ID NO: 26866 - DNA, 735 bp, Oryza sativa
cgcggctgggcgctcttcgtcgactgcgacttcctctacctcgccgacatcgccggcctcctcgcctgcctcccctcctccgaccccgaccaccgcctcgccgtcgcctgcgtcaagcacgagtacgcccccgccgaggcgaccaagatggacggcgccatccagaccgtgtacccgcgcaagaactggtcgtccatggtgctctacaactgcggccaccccaagaacgtcgccgcgctcaccccggacgccgtcagcacccagaccggcgccttcctccaccgattcgcctggctcgatgacgacgagatcggcgagatccccttcgcctggaacttcctcgtcggccacaacaaggtcgaccccgccgacccgtccacgcagcccaaggccatccactacacctccggcgggccgtggttcgagaggtacaggaactgcgacttcgccgagctctggatcaaggaggccgacgagctcaaggccgacaaggagaagcagaagcagcagcagatcgtcatggccaacggcgagaaggagaaagacgaggaggggaattgaatcgaatccaattgaattcattgtgccgcattgcgttgcaattttgcatcgaattggttcaaatctgttgtttattgggttggggttgggtggtaggctatgagtggatagctctagtattggtagtagtacgcttttgtgtagcggcaaatcaatctatctatgagtcctcaa

SEQ ID NO: 26867 - DNA, 1327 bp, Oryza sativa
gctaatgacggcttaattaggctcaaaagattcgtctcgtggtttccaggcgagttatgaaattatttttttcattagtgtccgaaaacccattccgacatccggtcaaacgtataacgtgacacccaaaaattttctttccacgcactaaacatggcctcatttgggtaggtgaacgaaagaatttttcctagaaaaaactagtactattttcccacattgtagagaggatggacaagacacgtgcactggctgcacaaacgggtagaggtaacaagatatcaaaattttttcacaacactatctagacttcatatatttttaattttggaaaaagtacgaattacctctcgaactattgtggtagtacgatttacccccttaaactacaatactggacatttgacaccccaaacaattaaaactggataaattacccccctaactcgattcgtagtggttttcagtctacatggcacacacatggcgatacagtcagcaaaaatacaaataaaaataggtaggcccacctgtcagcgattttttttctctccttctcccccctctctctctctctctcccccccctctctctctctctcggccaacagaggctgcggctggcgggcggcgggcgggtgaggagccggcgccgacggaggccaccgccggggatggctgcgggtggcgggcggtcgaggagccaacgccgactggcgggtcggcggcggggatgcctgtggccggcgggcgggcgaggagcggagtgtgtgcgcgaacgggcgctgccgcagctcccccgtcggcgactctgtgactgcgaaggcgaacgcgttgctggcaactgcaacggcgaaggcgaaggcggcgacaagatcgaaccgcgagctccggaaggccagcgacggtggcacgagtgcgtgcagggcagcgatttcgcggtggccgaagaagggaggtggacgagtgctcgtgggggaggcgtggaggcgctccaggcgaccggcggccagcggcggaggcgcccgggcggctggtgacggaggcgaaggcggacctggcggccggtggcggaggagaaggtggacctggcgggcggcggcggaggcgcccaggcagccggttgcggaggcggagctcgctcggcggccggttgcggaggcggaggcggagcgtgcgtccgatgacggaagaggagggggagcgagcggccgatgaggcacgactgagacgttcgcacggctgcctcctcgtccattcttcctcaccgccacgacggctactgctcccagtagcagagagcgctccgcgcgaagggggctgcagga

SEQ ID NO: 26868 - DNA, 2528 bp, Oryza sativa
aacctagtaagtatcacgtgatacatagcagaattcgtcggtacctgacatgatacctcgccgagtatcacgcgatacgtggtagaaatcgtctgataccttacaggtatcacatgatacctcacgagtatcacacgatacgtggtaaaaatcgtctgatacctgataagtatcacatgatacctcacgagtatcatacgatacgtggtagaaatcgtatgatactgtaacaccctaaaaaaaaaaggcaggcaagctagcagcagcagctgggccaggctcggtagcaggccggcccaagcggcagtagtagcaggtcgctacagtaccgtcgtggtactgtagcagccgattagtaccacctcgcctaactagcttgaggagcaccaagatataaggacgagagcctagaggctgttaactctgattctggaatttttgctttaaagcgaatttttgctttaaagcgaggatgaaaaacgtagtgagttgcagtattaggtgtggtccaactaaatgagccgttttcgggccctgcacaaatggtatcagagcagactctcgcggttgcgcgtgcgggcatatagcgcatgtgggctccgtgtgaggcacatggcatatggcgccggcattggacggtacggtcgtgcgccaagagagggcggcgtgttcgacagttcgacggggtcgtcgaacccctgagggtgggtggaatgtaacaccctaaaaaaaaaaaagaaaggcaggcaagctagcagcagcagctgggccaggctcggtagcaggccggcccaagcggcagtagtagcaggtcgctacagtaccgtcgtggtactgtagcagccgattagtaccacctcgcctagctagcttgaggagcaccaagatataaggatgggagcctggaggctgttaactctgatttcggaatttttcgttaaagcgaggaccgaccacaaatagcgctatctggtcccaaaactaatgattcggaaaccgacatgtttatactgtatcaagcttcggaaaccgaccacaaatagcgctatctggtcccaaaactaatgattcgattcggaaggagtttatattacaaaataataggggaatttacaaaattgtggctaactaatacaacagaagctataaaatgactcaatcctaatgttttaaaattgtggttttactatagacttaaaccatctaacaaatctagacttgaaaactaggttaaaatattgtggttttactatagacttaaaccatctaacaaatctagacttgaaaactaggttgaaatgaaactaacttatatgattgaactttcggcttcggcaagaactccaaattaactctgaaagaagaggggttgaagcaagggtgagtataacgtactcagcaagttgtggttttactatagacttaaaccatctaacaaatctagacttgaaaactaggttgaaatgaaactaacttatatgattgaactttcggcttcggcaagaactccaaattaactctgaaagaagaggggttgaagcaagggtgagtataacgtactcagcaagctattatatttaagtatgaatgtatgaaataatagtatttgagtagagctagatctatttgcagaaagctgagaaattagaaggagaaagtctataatgtgttgaaatgcaacagtatttaataaatctggagttatatttctaaccaagatgccatagtgagtcccgatgctcaatatccgtgagcacggctattcgaatagtttcagagatactcatactgcagtagatgtacgctttacccgcaatccatgacatgctaatattcatcagcttagtcatggcaaagcttttcggttactaacatcagtggcacctgttccatgaactctcatcctcatgcgctctgaacgtaacgttatcagcagcgagaggagttctggcgttcccgaggtctttagagagaactggttgagagacccccgtcgtcccaaccaggttttcacaatacacacacagcgcgcaataatcaatatatttacccgcgcctcggtaaatattataatcgccctgctcggcgtaaatttgcctcctgcgcgaggacttaaagaagaaccactatacagaggtaccacctttgttagataacctactttgctaagtctgtccccattctagaattgcggtcgtactcgttcgttcttcacatgtacttggcaatcttatgtcggttggaacagtactagccacccggaaatcaaccatttctaccgtactgttccaatctaagttcattatattttatgcaatctaactaggcatggctaagcaaaatctagcatatatctggtttgctatatgttcaagttatgcatttaaaatcatgaatggctaatgcatggaataatagagatatagaatataggataataatgctcaaaggggtggaataataacttgccttgctccaacgcaaacaaatccgagataggcaacctgattatccgatcctcgaaacat

SEQ ID NO: 26869 - DNA, 3980 bp, Oryza sativa
aaagaaaatatttgaaaaggcaaatataaattcaaacgatatttgaatagattcaaataaaattataaaatagcaaatttggtgtcaaaagatagggtttgaatttagataaatttaggtccaagttttattggaatcggatctacggtttaggagatatgggcttctaaagattgggttttgaattaaatctagaaaatgagaaaagtcactgtgcaggggacccacctgtcaggcttttctttttcttcttctttttctttctctccttcttcctctcgttttcctttcttcttcttccaggctcccagccgagtaacagaggagggagaggattgggcgccggtgctccggtagccggggatcggcaacgtcggtggcggattgcgttcccgaacaacgcgcatccggggaaggcagtttcaagcgaagggagttagagaggaagccggaacggcgagtggaagagcttgcctccggcggcaaaagaggtggctatggtggcttgatgaagtggttagggaagaggggaaataggtaaaatggattctccttgtcgaggcgaacccgatggtgcaagtatttggttggcaatgctccagtgagggagatcggccgatgactggtgagggcttgccatggcaggagagagagagaagcagagcttcaagctctgttgatgtgaggaaaaggagggtacctcgccggctatttataggcggcgaaggtcggttgcttatggcggttttggaggagtaggtgaaggcaaacacgatgatgcatcggcctgtaggaagggaagtcggcgccggctctgtcttcgattggccgatagtgtcggttcggctcggcggctgacggcggcagcgtgaggtggcggctgacgtcggctgcggttgcttagcagcgacggaaagacggcggcggcagttgatgaacacgacatggcgacggtggcggcgcgacttggcggcgacggaagaggagcttgcggcggcgtgcgccgtgcgcgtgtacgacacgcactgggaggagggggcggttcggctggggttggctgggccgaattgggccggctcggcttagctgggccggcagcccgagagggaggaggaaaatagaagataaaagaattgggccaaaaggaagaaagaacggagtttcggcccgatgacaaaaaggaaaaagtctaatttgaatacttaatatgcaaaactaggttttgcaaagaatttgaattcagaaagaattcacaaaagagatttcctaatatatttgagtgcaatatttagaggtggagtttgagggaatttatttggaagcactcaaataggaagggtgagcgatatatgaataaaatttaatatgtaaataggaaggtgggaacaagatagttggagaaggataaatagggttttagcctcaaaacatatggcatgggtttcaaagaattgtttgaggctaataggaaatttgaatgacaaagatataatctattttcttagcacaagagcaattattcacaatattcgtaataatattattcttgtgccgaggaggaaatcaagccacaggaattaaattgacggctagattggaagaaggaatttggatacaaatttggaaaggggactaaggataggtttggaatcaaaggatagattgacaattaattccaataaatttggaattgcttcggttttggttcaaggatagtgttggaggatttcttggaccatgattcataaaaataaaaaggggttttcaaactaaatttgaataaaagaattttagtcaaaagaaggtttttaaattaaaacccaaaatcaagaaactccttaatttaactaaatatatttttaaaggaaagacacaaaagaaattaaataccagaaagagatttaatgcaggttaattttaggaggtctctttaattataatatcctaggtttaggaggttaataaaaacgtaagaaccggtatgatgcataattagaaaatagctaattttcagtatgttacagatacttgataagtatcatatgatactttgcaaggatcacctaaaacgtgtgtaaaatcatctgatacctgataggtatcacacctgatacctactcgggatcttcccgttagaaaatgggattccgttatatagcagccccccaaagaaaagatggatagtacgcagcgcagcgattcggaagtatgtgtacgacgaggagggcgattctcaatttcaccacatcgagaagagaaaggcggaggctggcggcggcggtggcgacgacgaccttggcagtggccgtccaaggcgatgacggcgacttggactacgccacgatggtcgcgcgcacggctcatttcctagcggtggtccgtggtcgagcgctacgcccggatggtgcacaagctagttctgggactaagttgacgagtatcatgtgtggaatgcgatcgtctcgacatggagcacccgtcggccgcggctgtcgacgatgacggtgacgaccggcctgcccccatcgccacatcgacgacgtgcggtggactgacgcggtggagcggacacggtcagagatcgaggaggcgagcgagcgcgagtgcgtcgcagtctacgagctgtggaggaaaaggtggtggcagtgtggagccgtaggtgggatttgggagaaaacaacacccaatagctgggaataccgcgttagacacttagaaaacgcggtagcaggcagccgtcgtagccgtcgaggaagacctagctcaacaaggcgtcggagacctcgtcgccgcttctgccagctacttgattccgctctagtcctggaggcgcgcgaagtcatcgcggaggcgtggctgcgtcccaacgacgggcaccgatgacacgccattcccggcgcgcgtgggagagggagaggagggagagggagaagatttagctagagacatgtggggcccaccgcccacatgggtcacactcatcgcgtcagtcgggctactatattgtcgaggaccaaagttaacacgtatggtgaatttgaggatgagttataccttttgtttcggtatagggaagaattttagactctacaacaacttaaaggacttaagtgattctttccagcaatctagcccaactggcaagctggcgggctggtcgccgtcgatgaaggcctgttcagttcccactattagggctttttcggattagaggatcttcacgtgattttcggaggaatactgtgcataggaattttttttcctttcttgtcattcagatcatgaaaactgtggttgtaggaaatccaaagaaaagtttcctttgatgctgatttcacatgaaaagtatatgaaaaatccgtccaccttaagctctttttttttattcctgcatgcaaatcccaggcaattaatttcatgttatccgaatgtcctcatttttttttattcctttgtttttcattcttatgtttcacacttagattcctttcctgtttctatactttcccaatcctatatttttcctatcctataatctgaatgaacccttaatcatgatttggaaattccgaaccctggttattttacatttcacaactaatcatgcatatctattcataatttcagaaaagattacagtaaaaagtaccaagtaataagctagtaactagttgatacccccgcgctttgcagcaaaatatgtggataaatgcatgttataccatttctataatgtataacatgcataaatccacatatctctagcaaagcacgaggtatcaactagtgggaacaatattttagctcaaataaatatggaaaaagtactacacccctgaactatcgaggtcgaccgaattacacccccgaactcaaaaaccagacattctacaccctcaactattgaaaccgggcaaattaccccccctagcactgttttaggtggttttgggatagacttgctgacgtggcagtcctac

SEQ ID NO: 26870 - DNA, 4682 bp, Oryza sativa
gacctcgatagtccaggggtgtaattcgtactttttccaacaaatattaaacgaagataatatcctaatgaataggacacatacagaaccaaaagatactatgccatatcgttcgtattctccattgatagctttgttatcaacatatcgtattgactgggcataaaaaatgatcatgttaaaaaaaattgctactatcagcatggagcaagatatacttagttgttgccacttaccagtatagcaggccaaacgggcggcccggcccagcacgacacggcacgccgacggcacagcccactagggcacggcccgttaggcacggctcctgtagcgggccgtgccgtgccggcccacgtgccaaggccacggcccaagcacggcccaagaaggtgctgggccgtgccgggccggcacggctactgtagtggcacgtgggctggtagccggcccactagaacatgtggcccataaaaattgaaatttgaggggaaaaaaagaaaaaaggcagaaaaaacataatataaaggaaaaaatgataaatataggataaatgtgaggaaaatttaggaaatatatcataaaatatatggtacaaataggataaaatgtggaaaaaaataaaaaatatgagaaatatatgggaaaaattagaaaatcgtaggaaaaataaatgggccggtgggccgtgccatgcctgggccgtgccgtgccggcacgctacagtaaacgtgccgtgccgtgccgtgccagcccacgggctgaggcatcggcccaaacacggcacgggataacgggccgtgccggcacggcccacaggctggcgtgccgtgccgggcctgggccggctacagtactgccgtgctcgggccggcccggcttggcacggcccatttggccaggtatacttaccagtgcatgcctcctgaagtgaaactattcctaccgcttcacctctgttttaaaataaaactattttttcatctatctttttatctcaatcaattataactattcttcgttcgtttcttcacctacttctacttttcagccaattatgttttttcttcattattttcacatatgttataactatcggtatccaacttcagaaatacttatttgaatctgttcgcacatttttttaagctcgatctactgatctacactcttgtataagtaagatttaccttccttaactctgttaccagacgttttatacttatgaactctttaaaccagatgtgctaagcacgtattaccattctataccaattttcatttcatcatatcagtatttgattgatcctttcaagcttcctcgccaagtcaatcgagatcatgactgtgatacgatcaagtaaataaagtagtataaaacgattcatacgacgatttttcaagcgtaaactaacagttaaacacccctataaaacaggcgccccgaagtagccagcacagtacgaggtggccgtcgtcgagcacctcgatcgctcgcgccatggacgcctggcagctgttcgtccccgcgatcgccatcctcatccccttgctccggctcatcctcttccgccgcggcgacgacgggagacgcggccgcctcccgccgggtcctccggccgtgccgttgctcgggagcacggtgtggctgaccaactcgttgtacgacgccgagcccgtcgtcaagcgcctgatgtcgcggcacggccccgtcgtctcccttcgcttcggctcccagctgctcgtcttcgtcgccgaccgccgcctcgcgcacgcggcgctcgtcgagagcggggcctccctggccgatcgccccagccaggccgcctcggccaggctcgtcggcgagggcgataccatgatctcgcgcgcgagctacgggcccgtgtggcgcctcctgcggcgcaacctcgtcgccgatacgctgcacccgtcgcgcgcccacctgttcgcgccggtgcgcgcgcgggtgcgccgcctgctcgtcgacaggctgcgggaggagcacggcgaggcggaggcggcgccacgcgccgtcgtagagacgttccagtacgccatgttctgcctcctggtgctcatgtgcttcggcgaacagctcgacgaggacgcggtgcgcgcgatcggcgcggcggagcgcgacacgatgctctacatgtcgagcgagatgggcgtcttcaacttcttcccggcgatcaccaggcacctcttccgcgggcgtcttcagaaggctcacgccctccggcggcggaaggaggagttgttcgtgccgttgatcaactcccggcgggagtacaagaaaaacggcggcgagccgaagaaggagacgaccacgttcacgcactcgtacgtcgacaacctgctcgacatcaacctcccggaggacggcaaccgcgcgctcaccgacgacgagctggttatgctctgctccgagttcctcgtagccggcacggacagcacgtccgccgcgctgcaatggatcatggccgagctggtcaggaacccatccatccaatcaaagctctacgaggagatcaagtccaagaccggcggcggcggccagcacgaggtctccgaggaggacgtccacgacatgccgtacctgaaggcggtggtgctcgaaggcctccggaagcacccaccggcgcacatggtgctaccgcacaaggcggcggaggacatggacgtcggcgggtacctcatccccaagggcaccatggtgaacttcatggtggctgagatgggcagggacgagaaagaatgggagaagccaatggagttcatgccggagcggttcctccccggcggcgacggcgagggggtggacgtgacgagcagcaaggggatccgcatgatgccgttcggcgtcgggcggcggatttgtcccgggctcggcatcgccatgcttcacctggagtacttcgtggccaacatggtgagggagttcgagtggaaggaggtggccggcgacgaggtggacttcgccgagaagcgggagttcaacaccgtcatggccaagccgctgcgcgtgcgcctcgtgccccggagtacactcgaataattaatccattcctcgattcctagagaaaataattgtgcagtatattatatagagtaaattccttgtttgctcctgaaaagttacccaatctcttacatgcccctaccgtttggaacttacttgattccttctataccccaaattttcgattgaatcctctacatacccctaccgtttgggttccgtcagatgtttgtgttcatgtgtgtgttagcttgtcagtattttcataaaatgcgaaaatgcctctgtcaaccctaggtaacacagggccacatccgatccccaaatcctccaaaatagtatagttcccacacgcacggtgccgcacatcgccagctttcagccatcgttgcacgcgcatcgccgcccttctcccacatcccggcggtggcagcgggtctgcatcccgccgcggtctcggctctgcttgcggtcagcggtggcggctgggtccgcatcccatcggtggcgcggcggggtccgcatctggtgggcggcgacggctttgcatcctgccgcggcgacgagtccgcatcccgccgcggcctcgactctgcttgcggtcatggcgacgccgtctcctccctgcctcctccgcgccctccctcttgtcacctcaccctcttctcgggggctccgacgccggcctattacctccttgctccactgctcctcgccgtcggtaatgatacgcccttgcgttgattagcaaaatgcgaatagctgctgctgctgctagtgtttcttgattgatttgtttgactttatgcaggcggatgccttgaactgttatgggcttgtgccattatgctcatgatgtaaaaagtaatatatttgtgtactgctgatggtgtatgaatgcttttagatgtattttcattttcttcctattaaatggtgctaccgatcctcttgatatgctgatgaattgcaatggtgtttgagtaaacggctaggggtactgtcttttacccccaggctgtgtcggttagtggtcatgaaagatccaatgtcatgttatatttttttataaaatactgaatgctataacaaaagaaaatgaaattaattttatgcactaattttttagtctcacggaatacatactgtgcagtcatgaatgtttcaaacccagctgccaaacatgttcttagttttcagctcctccaacctcaagggtattatagacattttcaaccaaactaaccagggaatgctgctcaatctaacggtaggggtatgtaggggatccaatcaaaaattcaagggtggaatcgagtaagtttcaggggcatgtaagggattgaataacttttcaggggcacacaaggaatttactctattatatacggtacatatacgaatgtaagggaacaaacggccaaaatcatcgcacgtagcactggcagcttcctttctttaatgaatattctgtgagaaattttacgattctcgagagataccaagagaatatcctatgtgtgtactccctccgtttcgaaatgtttgacgccgttgactttttatcacatgtttgaccattcgtcttattcaaaaaatttaaataattattaattattttcctatcatttgattcattgttaaatatatttttatg

SEQ ID NO: 26871 - DNA, 816 bp, Oryza sativa
ttcgcttaaattttcttcacatatacgactgtaaagtttgttgatccacggcattttctatgtttacacattacgccgtgtcctacaccatggtacggaactacggtgtgaactactgttgctttctccggtccgtctctcttgcctgccactggagtctacacaactagccatggagtagcattgatgccatgaaaggctagctgaaagcaacacgatgcacttgctaagatacgtcgtcttcctcacggttcggacgtctgatggtcgatctccgacccgcggacatcatgctcatgctttctgaactgcttgcgcatccgtatcaaacagcttcttttcatcacaacgaagatatgtctcatcatccgggttaagcaaccgatcgatcgccttacaacgtactacgtgcccaaacatgaatgagttagatatattgtttcatctcaattttcgcaagattcggtcaataggaacaccttaattacaccggctatttttacatttcaccactaatcatgcatctctattcagaatttcagagcatggaagtaaaaagtactgaactaagtagagaaactaattaattaagaagcatcatatccatatcactatatcgccactgatcattcaaaacaaaggtattgtattgtactaggtagtgtttaattaagaactccactagagtagtaagaagcatgcatttggattgagctaagctactgaaacggtgaccctaacgcatacatacatggtgatctaggcccttctgggcaccagacgagcgcgcagcggcttcgccatgacggttgtgaa

SEQ ID NO: 26872 - DNA, 9387 bp, Oryza sativa
  unsure (1)..(9387): unsure at all n locations
gcaactcctccgtagagaccagcacatcaatgaaatggggagttgaaccccctaagagaaaccgtgtaggctgtagtccaaaacagggctaagcctccactaaggccctcgcagctcacagcaaaggagccggagaaaccaagtgaccacatcaaatttcttgcctgtttgtccctcatcttcgtttcagacaagaagacaagggagggtctcaaagacttcactaaccagcgaagttcacccactgtcgcagccgaccccaagccacgacagttccgaccccaagtcacaagcttgtttggttccatgggcagggacttatatttttttagagagggtccctctctcccaaacatctctttaggtcttagcaccgtatacaatacgactagggtcttgtttggtttcatgggctaatgtaagaatttaaacatgtgggctaattttgatctaaaatgaattagcccccctcaaaacattagcccctccaagagatgctaatggagctaattttgtgtgaggactataaaaaccagctctctctctccttctctcccctactctttctactctgtctctctccacctattagccttgaattaagtcatggatccaaacatgccaccctagactaatatttagccgaccaatttatgactaaacattggctcttaaaattagccctgggctaatctttccaacaggcatagtacaatactcgtacgtatcatatgcactatcgtgcgtacgagtactcttggcgtgtcacggtcaacatagatctcactgttggcgttattgtgacaatgcacaacttttttgacgtaggggcactgtactactagtagaaatactagcgttgcccaagagattgttcacgtgccacacacatgcggcgcacccgtcgatcgaatcgaggggagtgcacggcttttgagttgtgaccacgcgtttggtcgggcctgggctgaaatcgtgaaagtttgtcgggccggatcgcgggatcgaggcggatggaggcgcgcgcggccttcgaaacgggacgaattctcgccgaccgcgtttgggccgcctgcccggatttgcagaccgttttgctcgtctgggctttcactatgttttgggccgcaaatttctggcctaatgttttcctcgtccagactccagcgacgaacgaacagtggagttgcgaacttgcgatcaagctacagcagcagcttgtctgattttattcgataaccaaaacaaaggggtttatgcatgagtagtacatacgaacgtagcggaattcacgatgccagcatcaccatggctaagaagcaaaaaaaaaaaaagtatgagcgcttcgactgttcgacacgattaagatagtgtccagcgacgtacgtgcatgcatccgtacgtaacggcatatacgtagcattattattctaggtcgtcctcctgggcacgaggcgcgcgcggagcggcttggccatgacggtggtgaactcccgcttctcggcgaactccacctcgtcgccggccacctccttccactcgaactccctcaccatgttggccacgaagtactccacgtggtgcatggcgaagctgagccccgcgcaaatcctccgcccgacgccgaacggcatcatccggatctccctgctgcctgtgacgtcgaccccctcgccgtcgccgccggcgaggaaccgctccggcatgaactccattggcttctcccattctttctcgtcccttcccatctccgccaccatgaagttcaccgtggtgcccttggggatgaggtacccgccgatctccatgtcctccgccgccctgtgagggagcaccatgtgccccggtgggtgcttccggaggccctcgagcaccaccgccttcaggtacggcatgtcgtggatgtcctcctcggagacctcgcgctggccgccgccgccgccgccgccggtcttggccatgatctcgtcgtggagctttgactggatggatgggttcttgaccagctcggccatgatccactgcagcgcggtggacgtcgtgtcggtgccggcgttgaggaactcggagcagaggttgaccatctcgtcgtcggtgagcgggcggttgccgtcgtcggggagcttgatgtcgaggagggtgtcgacgtacgagtgctcgaacgtggtctccttcttcggctccgccgttggcgccgccctgccgttttcttgtactcccggcgcgcgttgatcagcggcacgaacagctccgtctgccgccggcggagggcgtgcccctttttgaggcgcccgcggaagaggtgcttggtgaccgccgggaagaaggcgaagacgggcatcttgctcgacaggtagaggagcgcgtcccgctgcgcgacggcgatcgcgcgcaccgcgtcctcgtcgagccgctcgccgaagcacatgagcaccaggaggcagaacatggcgtactggaacgtctccacgacggcgtgtggcgccgccgcgtcgccgttctcgtcccgcagcttctcgacgagcacgcgccgcacccacgcgcgcgccggcgcgaacagccgcacgcgcgacgggtgcagcgtctcggcgacgaggttgcgccgcaggaggcgccacacgggcccgtagctggcccgcgagatgaggttgtcgctctcgccgagcagcctcgtcgacgccatggcggggcgatcggccagggacgcccccttctcgacgagcgccgcgtgcgcgaggcggcggtcggcgacgaagacgagcagccgggacgcgacgcggagggagacgacggggccgtgccgcgcgatcaggcgccggaggaggggctcggcgtcggccagcgaattggtcagccacaccgtgctcccgagcaacggcacggccggaggacccggcgggaggcggccgcgcttcccgccgccgcggccgccgcggcgggagaggatgagccggaggaaggggatgaggacgaggattgcggcgacggcgacgtgccacgtgtccatcttcgagtgagcgcgagcaccgcgtaccgtgtggctacttcagtgggactcattttatatggttaacacgtgtcgtaattagcacgttattaggaggtttttaactgcttgtgtttaagtaaattcggttgtatttatcggtttattatgctttatgccaccgtcgcgatctcgattcgacttgcggacgaagtgaacggaagggtccacctccgctgacgtcagggatgatgatgaacaggaataaatacgaagaaaaaaaattctagaatattttcttatgcgacaccttgtttccacatgactcgtatgatccaaggtctaacgacatgttcaagaaaagagcagataaaagaaaaccaattctgaatacgatttctctctcgagaaaattgcatccaatccaacaagtcatagtttgttcagacttcaggactctaacacataataattttgaattaagatttgaaaattacatccgaacaacccgtagtttgttcagactcttaaactcataaaattatccaaactcaatcgtattcagcgttgacttgatgcgtctccctataaatgtaaagccgttttgtctcacccgacgtacaacaacgacaccaatcgacgacgacgcagatggataacctggtcatcctcgccggcgtcctcctcctcccgctcctcttcctgctccgcaatgcggcgtcgtcgaggcggcgccgcctcccgcccggcccgccggcggtgccgctgttcggcaacctgctctggctgcggcactcggccgccgacgtcgagcccctcctgctgacgctgttcaagaagtacggccccgtcgtgacgctccggatcgggtcgaggctgtccatcttcgtggcggatcggcacctggcgcacgcggcgctcatcgccgccggcgcgaagctggccgaccggccgcaggccgccaccagcacgctcctcggcgtcagcgacaacatcatcacccgcgccaactacggcgccatgtggcggctgctccgccgcaacctcgtgtcgcagacgctgcagcagtcgcgcgtcgaccagttcgcgccggcgcgcgtctgggtgcgccgcgtgctgatggagaagctgcggggctccggcgaggaggcgcccaacgtcatggaggcgttccagtacaccatgttctgcctcctcgtgctcatgtgcttcggcgagcgcctcgacgagcccgccgtgcgcgacgtcgaggaggccgagcgcgcgtggctgctctacatctcgaggaggatgagcgtcttcttcttcttcccgtggatcaccaagcacctcttccgcggccgcctcgaggccgcgcacgcgctgcgccggcgccagaaggagctcttcgtgccgctgatcgaggctcgccgggagtacaagaggctcgccagccagggcctcccgccggcgagggagacgacgttccagcactcgtacgtggacacgctcctcgacgtcaagattcccgaggagggcaaccgcgccctcaccgacgacgagatcgtcacgctctgctccgagttcctcaacgccggcaccgacaccacctccaccgggctacaatggatcatggccgagctggtcaagaacccggccgtgcaggagaagctctacgccgagatcaacgccacctgcggcggcgacgacgagctcctggagcggaacgtgagggacaaggacaacaagatgccgtacctcaacgccgtggtcaaggaaggcctgcgcaagcacccgccgggccacttcgtgctgccgcacaaggcggcggaggacatggacgtcggcgggtacctcatccccaagggcgccacggtgaacttcatggtggccgagatcgggagggacgagagagaatgggagaacccaatgcagttcatgccggagaggttcttggacggcggccatggcgccggcgtcgacatgcacgggaccaagggcatcaagatgatgccgttcggcgtcgggcggaggatctgcgccgggctcaacatcgccatgctccacctcgagtacttcgtgggatccatggtgatggagttcgagtggaaggaggtggaggggcacgaggtggagttcgccgagaagcgggagttcaccaccgtcatggcgaagccgctgcgcccgcgcctcgtgcccaggaggagttagacagtgagacagagtccagaattggtttagttttgtgttcattagttagtgttagcgtatatttactcgtgattaagttatgatccaaatgtccatagtgactagaagtatataattaggtttgaattaagtgccaaaagtgtgttttgttttagcaaattttgagcagtgcgtactcgtttttatcgtgctaatttacacgttttatatatgaactcctatcgaatcccaatcaaaataagcagagaggtttggactagagacaagacagcatgacttacgcacaagaaaggaagggtgaaaggttcatcttttatctcctatatactatcagcaattcaaaggaaagagtgtttttttatctcttaccagcaaattcatatcaccaattcgaatatccaaaacaacataggtgcctatgaatttcttttaacaacaatggaagaacaactttgagcctgtgaaaaactttaacttgtttacctcctagaaattgatgcacctaaaaaacttgtttagaaacatcttacaaaactaatgtggcacaatgtgattgaatattccttttctcatacccgctataacatatcagatcactaagagagtaatagatttacactagttggagagtgttagagtatatggtagttaaagtcatattaggataggattggtttgtttggattccttctatatctgtaattcttccttatctcttccctatgtactcctatatatatcgcccccctgaggctcaatacaatgtgtccaatattcacagtatcccctcttcctgtactatccaacatggtatcagagcgggcgatctagtgccgctctcacgcttccgccaccgctgcccccgggagtagcgatctcccgagggcggccacatttttttttctttctctgaggtcgttgtcgccagagggatcgccctcgatctccttcggtggcccccgtcctgttcgtcgtcagatcgatctaaagccatcttcagatcgttcgtgcgtcttcgcgtcatcagcatgcagcagtagcagatcgcatccgcggatcccgtcgacggcgcggctctccacgtcgctgcgccgttggctcccggtcctgcctcctctgttgccgtcctctccgtcgacctctctcctctaccgaggctgctgatgccgggggacaggagccacgtcctcgccgatcatccatgccgtggatctggcggccactccaggccaccgtttcgtccgtcgccccctggtcttctccaacctccgcgccagccgtcgtcgacctcgccgcccttctcaaccccggcgcacagggggagggagtgctcatcactgtcgcttccacacggcaattttctgccggcccctgcagctctgctgctggtctccaccacacaaacctgttgacaggttgttcttctccactgtctctcggtgtctctctctgctatgatcctgtgcgtggcagccatgtgaggagagagagactagatggatggtgtgaagatatacagcctattgccttggttgacttggtggtgacttgcgtcagattcaaagggttgtgatgtgaacggctggtatggactgctgctattgtgttgctgcttgtattttttcccctttcccaatcagtgattgggtttgcgtcgcccaccgcctcgttgacatctgcgcgtctccgacatcggcatcgattctgcttcaacttcatcgttctgcctcgcgcatcttcggcttgatcacccattccagcgcccagctacaacgacttgtacaaccgatcatcatcgagcacgcgtctacgccatcaagcttcgggttgccgctgcgtcgcccccctcgggccacagtgccgctgcctgtggtccacacctccactggttgttacagtgttgagacctgagaggcaccctcctcagtgtggcctcaccaccggtggacttctcgccgctgcatcgacatcgagctgcgttggtcccactacttcgccttcgtcttcgtccagcatgattcatcgccagtgtcgccgtatcttcctcgactatacttcgctcttctccggcaactgcgtgctgctccggcaattctccctctacgccgttctcgcgccgcgaccatcctagaggccttctctgctagtctcctccgacattggcgtataatttctggtggtcccctacctagcccgcacggtattggtaacaccgttgtgcgcgtttgtcccgagtcgtccccgggtctggcaaacctggtgtgacgtcttgtccttcatggttcgactatatcggctcttcgacgtcatcttcctcaacgaccgtcgcgatcgtgtccccgtcatcatctcccgcgcgtcctcgcgcacctcggttcacaacgctctcccatgcgtccacgaccactctacggcgtcctatgtgcgctccgcggctcggctacctcgacatcatcggctccccgacttcggctacatcgaccacggctactctacgcacggcttcagcgaccacggctctcccggctccttcgctttggctacatcgactatggcacaaagggctattatccgtgttgagcactcttgccggtttattctccagtccaagtgtccgcgctgctcacgcttggactgaggggggatgttagagtatatggtagttagagtcatattaggataggattggtttgtttggatttcttccatatctgtaatatttccttatctcttccccatgtactcctatatatatcggccccctgaggctcaatacaatgtgtccaatattcgcagtatcctctctttctatactatccaacagagagtacgtaatagattgaccttaggagagtgacagattaacgatttcgtatgaacaaanntaatgtntgnnnntnngnaccaaacgtccttcnnnaaggnnnnnnnnnnnnnnngnaannnagtagaagagatttgattggntttatttgttaacctgtacggaattcgaataaaaaactggtccaaatttgtcagatttggggaaaaaatttgggggaaaaaaaacccccaacccggngtctaagatttnaatcgctctgatttatatttaaacaaggaaaaagtacaccgaaggtccctcagcttgtcatcgagttacaaaatcatcctccaaccgtaaaatcagatatttcacatctcctaactaatcaaaaccggtcacaatcggtccctcggcggttttgatcccggttttattctacgtgactgctgagtcagcacaggacccacgtgggccccacatgtcagcgtggccacgtcagcctatctctctccccgtcttccccttcctcctctctctatctcactcattcttgtctctgtggctctaggcaggggagcaaggcggcagcggcggcgggagcaggggagcaaggcgtcggcggcggcagcggcggcgggagcaagggagcaaggcgtcggcggcctccggtctccccccaccctcttcactctgtccaaggcggcggcgacctccacgccccacttcctcaccgacgcgacgagcacctgcacgatcctcgttagcgggctgcccccggaccgctggtgcctgtacagcggcgtgccgatgaagaagctgacggcgacggccatgacgacggccgggatgccgaacccccacccccacccgacgtgcgtctgcacgtacaccagcaccgacgacgccaccagcgcgccgatgttgatcaaatgttctccatacagtaattattcagtaacctgtatagaaattgatgactactatgtgattacttaactaatagtacctgacagaagaagctcatattattagagtctgaatagatggaagtttggaggcattgcttgtcgctgttattcaaatgtctggttgctgataaataacaggaaaggaagcttagaactgctgtataaatgaagtcagtgtgtggacatcttcagtgtagaattttaaccagagaatcttataaggcttgttctgaaaaaggtgatggatgctgtcctcgacatgtattagaaccagttgaagaagctgctcttgctccgcttctccccctcgtcgttctcgtcgaactggtcgacgccgaacgacgacacacacgggttgatccctcccgttcccagcgcgatcaggtacagcgccaagaacaccacccccgtctgcgcttggtgcggactgcgga

SEQ ID NO: 26873 - DNA, 2579 bp, Oryza sativa
gccatgggtgctagccctagcatcggcatccccatgccgcccgtgcgagagcagagagcgagacggaggaagaaaggagagaaacagagaaagagaaagagcggaaagaaagcaggcgctgacatggacaccctgacatgtgggacccacgtgggtcccacgctaactcagccgccacgtcggataaagccagagtcaaaaccacttaaggaactcaagtgaacggttttgtaagtttagggatgtcatatacctggttttgcggttaggggatgattttgtaactctatgacaagttgagggaccttaggtgtactttttcctttaaacaaaatgaatagagagtaagcccaacagcaaaaaacatgttagcccaaaaccaacgaactgcatcttaggcccatttaaccagtcgaacatgttatctcaggcccgtttagcccacaaaattgcaatatgaatactagcagtctagcacaactagctttggctgcgttcgtttctccaataacaatagttggatgaaattttggatactgatggtacacttttcaaactactaaacggtgcgttttgtgtgaaaacaattgctctaaaatatcagattaatccattgtcaagtttataataattacacgttattaccacctcgttttacgtgaaacacttaatatttatcctcatcttcattttcaggatatccagagaggaacacacgcttgaaaaatctgtcacgtgctagttaattagcaaaaccgaataaggtacttataaaaactaaagtgtcattccttcttactaacatatatctttagggagagctcccaccttttcgcctcaaaagggaaaataaatatgtgcgcctaagttgatcctgatgcccttaaatccaaagttcaaacatgtggggtggcttcttaagaaagaaaagaaacctaaatacttggatgtaatcataaagattcccaccgaatcttcaccgatcaattgagattaattagaaatgacgatagccgtttaagcggagaaggacggcttacattattgctggttaccattcaaaacagaaagaaaacagtggcaccagattctgcggttttctacagagcttttttcttaaaaaaaactagacacaatatatacacaaactattctaacacacgcacactcacccttataaatgtacacacgcacaccttatccttatcagcatctccagaagattaggctgtcatattttaatattgacgaagccactgcgggcgtctcgttgtcgagggatacgtcttacacatgcacacattattcttatgaacatctctggaagactaggttgtcatatcttgatgtcgatgaagtcactacgggtgcctcgttgttgagggatacgtcgtgtaccattaaaaaaaacaattagccgtaaatatgagcacatgtgtcaagcctagaatttaaacccagatggactggtttcaccataagaaacttaaccaattaagttacgctcacttcacggagccctttgtcactctcctagttgacaaataagttttcaatgactggtccatacaggaatatgttcttccattatttaattttagttgctaaacatgttttcacatactataagttgttcgtccattatccatttttctaataggcaccttgttttgcatctttgaaagcattttgaatggctgataggagataaaaaaatgacccctttttttcttcgattgtgtttttgcccttctttctgtccaagactactataggataccaattcactacgtgcagctgtcatatgtttttgataaatctaggttacctattaatttagagtaatttagaaattatacactaagttttataagtatgtgatatatttttgttggttttttttaattttgggaaggtaatatgctttgataaatatgggtctcctattaatatgagagtaatataaattttcgacatgacctgcaccaaacagtaatgtaattagagattatacatggttcttttgaaagtaagtgacatatgtatatgaatttaatttattatttggtggtggtgatatgacgataaattcttggcacctattaattttgatttaatcttgtagttatggcatatgtttaagttaatcattttgtatgcagcgagaattgcaatggatcgacgataaatgtaccatgcgtcttgttcaggcctcctttgaattggaggaaaaatataggaaaaagaaaggaattgaaatcctacactatttatgcctttgattcataggaatgagaaaaggaaaaacgtaggaaactttcgtattcctacgattctagaggaaaaacatagaaaatttaagacaaaattggttatatagcatcgaaagttcacctttttttagctccaacagataacggttcactttaatagcatctaaagttcacccctttccatttttaacactttcgtcaattctcgatcgttttctatccgccttgatcgttattgactcagccactcacacgatatgacctttttacccctcattgccatgcattatacatgtacttgtgagg

SEQ ID NO: 26874 - DNA, 5432 bp, Oryza sativa
  unsure (1)..(5432): unsure at all n locations
aaaaacaactgtaccatatattaaaaacagagatatcagaaatttgcacaaacaaatcacacttcaatgttccctattgatttactgattcatcaaaccaaatgccatttgatatcagcattcacctcatgacacgtaaaaaacctgacactgatactccaaattactccctccgtttcaagatgtttgacaccgttgactttttaatacgtgtttggccattcatcttatttaaaaaatttaagtaattatttattcttttcatattatttgattcattgttaaatatactttcatgtacacatataattttacatatttcacaaacttttttaaataagacgaacggtcaaacaagtaagtcaacggtgtcaaatattttgaaacggagggagcaaatgagcagtgagactctgattagtgcctgactcctcctgggcacaaggcgcggacgcagcggcttcgccatggcggtggtgaactcgagcttctcggcgaactccacctcgtcgccggccacctccttccactcgaactccatcaccatggatcccacgaagtactcgaggtgcatcacgccgacgttgagcccggcgcagatcctccgcccggcgccgaacggcatcatccggatctccctgctgcccgtcacgtcgaccccgtcgccgtcgccgccggcgaggaagcgctccgggatgaactccattggcttctcccattctctctcgtctcttccgatctctgccaccatgaagttcaccgtggcgcccttggggatgaggtacccgccgacgtctatgtcctccgccgccttgtgcggcagcagggtgtggctcggtgggtgcttgcgcaggccttccatgaccacggggttgaggtacggcatcttgttgtccttgtccctcacgctccgctccaggagctcgccgtcgtcgccgcaggtggcattgatctcggcgtggagcttctcctgcacggccgggttcttgactagctcgcccatgatccattgtagcccggtggaggtggtgtctgtgccggcgtggaggaactcggagcagagcgtgacgatctcgccgtcggtgagcgagcggttgccctcctcggggatcttgacgtcgaggagcgtgtcgacgtacgagtgctggaacgtcgtctccctcgccggcgggaggccctggctggcgagcttcttgtactcccggcgagcctcgatcagcggcacgaagagctccttctgccgccgcagaagggcgtgcccggcctcgaggcggccgcggaagaggtgcttggtgatccacgggaggaagaagaagacgctcgtcttcttcgagatgtagagcagccacgcgcgctcggcgtcctcgatgtcgcgcacggcgtgctcgtggagccgctcgccgaagcacatgagcaggaggaggcagaacacggcgtgctggaacgcctccgttacgttgggcggcgcgtcgccgccgccgccgctgacgccggacgtcgtctcacgcagcttctccatgaggacgcggcgcgcccagacgcgcgccggcgtgaactggtcgacgcgcgactgctgcagcgtctgcgacacgaggttgcggcggagcagccgccacatggcgccgtagttggagcgcgtgatgattctcgctgacgccgaggagcatgctggtggccgtccgcggccggtcggccagcgtggcgccggcgccgacgagcgccgcgtgcgccaggtgccgatccgccacgaagatgagaggcgccacccgatccggagcgtcacgacggggccgtacttgtcgaacagcttcagcagcagaggctccaattcggccgccgagtgccgcaccacagcaggttgccgaacagcggcacggccggcgggccaggcgggaggcggcggcgccgcctcgaggtgacatcgcgcaggaagacgaggagcgggaggagaaggacgccggtgaggatggccaaattatccatcagcgttggcagctgttttcgcttgcgttggttgtcggacgaggctaaactgttgtgtacccatacattttataggtcttcggctcaagtcagtagcagtagactcagtactatgggatgtaatatgttaatcttattcttttaataaaactagctgggtggcccgcgcaattgcgcggctagcatccaaataaaatcatatattttttaatatgattttacttaaaatttattaaatagctatctcattgtcttaagactttgaaagaccaaaccttatcatcctcgtgtttctaattatatagtttttaaaagtcacatcagttgctaccccttatgtcatcttcttctttatttgtttgctcgatctaccactatttctatttattcttcttggaacctttaaaaattgaattttatagtttttagagtttattgtcacattgggtttcgtttttataatttgtagatgtctcgtcaaacgttgtcattatactcctctaccgcccgtccactgtttcttctttttattgtcattgaaattttaaaaatcaaagataattatcatttgggtttatttttactttctagaagtcccgccaaaccgtcagcggctttgccattgtactcctctacagctcacccgcagcctccgttctttattgtcattgagattttaaaatagaacatgattatcattgtttcttttttactttttggaagttccgaaccttaaaaaattagacttgtagttttattatttttataatttttagaagtcccatcaaacgatgccactatgcccctttacagcccgtccgccgcctactctttattgtcgttgtgattctaaaaatcaaacataactatcgttggaattcattttttattttctagaagtcccgtcaatcgtcggcggctcagcaactatactcttatacaccccgcccgctgcttctcctttttattgtcattaacattttaaaaatcgaatatgattatcaatggggtttattttttatactttctagaagtcccggcaaccgccttacttgtttgcttcacggcctgtctgatgtccctccttttaatcgtcattaggattatatttggtgttttattaataatttttatatgtcgtatcaaccgccaccactctactcctttctaggctgttacttaatttatctcgtcatgtgttgtagatggtcttttctttcaatagtctttatttttatcacaaattttagttatttataaattgtatttctaattgaaatcttatttttctttttctaatttcagaatttattttttttaaaaaaaatagttaatacccgtattgggttcctttaatggttttatttttattttcaatttcagttgtttgaaaattggtattcctacttaaattctcttttaatttttctaattttggatattattttatttttttaattcgaaattttaattattcttggattggggtcttatatggaatcctctttcaatattgcttattttttaatccgaattttaactaattttcaaatggattcctactttaactcttcttttattttcttttgctaactttggatttattttattttaattcgaattttaattaatctcatattgggttcttatatggactcttctctttaatattccttatttttaattccgaatttcaggtatttttaaattatattcctacgtggactctcctttccttttctaattttggattttattttatttttattccaattttaattaatttcgtattgggttcttatatggactcttctctttaatattacttatttttaattccgaatttcagctctttttagagtgattcctacttggactctccctttctttttttttctttttctccgattaatgtgggaatttctagcctccacagcgaacgtggtgtcttcttttcgagctgtcttaataatataatagattttagaacatgttctgtacatacggttttgctaactagcatatgatgcatgttttaagcagccttcctgtttagtttttctttttgactgtcagaacttaggtttacattcgtgctgtggctggaattttatttagaattgatctcaacaccttgggctcgttcttttccacaactaaagactgcaacttagttctttttcattagcatgcttctcgaaccgttaaacgatgtgtattgtaaaaatattaccgtttgaggctaatccatttttctctgtgtcaggttgtgttagctatccaagcgaattggtgtttcaagcgcatagcaatgggagatagaagattgagcttatatggaatagcaattgtgttcgcacatctgaaaaaggggggatgtagcctagtggttgcagtgacctgagtaacaccctaaggttctgagttaaaatcttcatatgagcgaatttcaaattgagttatttgcagtgctaagttctcaatttaaattgttgcatatatccatttggatgtagatgctggataaaaaaaactattctctaacaaaagttgtgttcgccgaatccactttctgctgaacactcatggatgtaaatgtgttatcacacgtgggattaagaccttgtccagcaccacatggcgggcagccctaatgggctatcgatcgcccgccaatggggggtngcgannnaatnnnnntacccccctccccctccctcctncacccgancccctatttaccaaactcattcccctcacgtttatacacctcaagtttacacatttaaagtttagagacccaaagtttataagtcaaaagtttatatatccgattcaaatttgaatttgaattcaaatatctttttatatatagtatttatatacatctaaagtttatacacctaaagttagtttatagacctaaagtttatacacctcaagtttacacatctaaagtttagatacatgtttcaaatttatatttgaattatatccgattcaaatttacctgtttcaaatttgaatttgaattatatcgattcaaatttaaatttgaattcaaatattttctatatatggtatttctatgcatctaaagtttatacacctaaagtttatagacccaaagtttataagtcaaaagtttacatacccgattcaaatttggatttgaattatatctgattcaaatttgaatttgaattcaaatattttctatatattgtatttctatacatataaagtttatacacctaaattttatagacccaaagtttataagtcaaaaagtttacatacccaattcaaatttgaatttgaatttaaattttttatatatagtatttctatacataaatttttctaactctttattttttttaaatttttgtgtggtgtactgtagtaggggaggagtgtatctagtagtatagggagggagcgggcgg

SEQ ID NO: 26875 - DNA, 1421 bp, Oryza sativa
cctgcagccctgacttgtcggtggggttcgaaatttcagaattttccgagaattttgaaccaaaatcgctatcactagtcatgcgagcacgaagaattagggaacaattcaatatgaattcgggttaaacccatttatgcccaaaaataccagtccaatccaaacccttttttcttttttttttttgcctcagtccaaaccgctccggtccgttagctcactcaacccatctccacccaaataaagcccacccgtagtgaaaagggtaaaatccagaagaacaccacgcacaagcacaaccttgaaaatctgaagagcacacgaagccctaattaaccaaaacctccgccgccgccgccatggccgccgcggtcgccgcctccccggcgcaatcccgcaagacggagacctacaccgacaccaagcgccgcgacgacgtccgcggcctcaacattgccgcggggcgcgccgtcgccgccgccgcgcgcacctccctcggcccacgcggcatggacaagatgatctcctccagctcctccggcggcgaccaggccgtcatcatcaccaacgacggcgccaccatcctctcccgcatgcccctcctccagccggccgcccgcatgctcgccgacctctcccgctcccaggacgccgccgccggggacggcaccaccaccgtcgtcgtcctcgccgggtccctcctccgccgcgcccagtccctcctttccggccggcgcccaccccacccggggcgacgacgccctccacctcctcgccgcgcgcgccgtggaggtcctccacggcatggccatccccgtcgagctctccgaccgcgaggccttcgtcaagtcggcatccaccgccctcaactccaaggtcgtctcccagtactccaccctcttctccccgctcgcggtggacgccgccctcgccgtcgtcgacccggcccacccgtatctcctcgacctccgcgacatccgcgtggtgaagaagctcggctgcacggtcgacgacaccgagctcatccgcggcctcgtcctcaacaagaaggccagccatgtcgccggagggccaactcggatcggggacgccaagatcgccgtgatccagttccaggtctcgcctcccaagacggacatcgagcacagcgtcgtcgtgtcggattacgcgcagatggatcgaatcctccgcgaggagcggaattacatccttggcatggtgaagaagatcaaggcatccggatgcaacgtcctgctcatccagaaaagcatcctgcgtgattcagtcaccgatctgtcgctccattatctcgcaaaggccaagatcatggtcgtgaaggatgtcgagagggacgagatcgagttcatcaccaagaccctcaactgcatgccaattgctagcatcgaacatctccccgagga

SEQ ID NO: 26876 - DNA, 1533 bp, Oryza sativa
tcctgcagcccagttcaaaccagggtatataggatcgacaagctccagatggtggatactgatgaaaggagcaattggatgagcagccaatataccatgggcattgcctctgatatcccactgattacaatgcaaagggacaaaagtaagattaagagagtagagtttagttctccatacacacgattaataaaaaaaagtaaatatgacttgttaatgtgcaaacagaaaaaagaacttgctaatcacttattatcatattttcaaacacatgcagcatgctggtacctatttgacagaaattacaatagtactataaagcaagcaggcaagttcttgcaaaaacttctgctggccataaaagagcccaaagaaaggtaacattcaagtactaccaaacttcctttcactatcaatctaacataaccactctggcaagaccctactactattgttcatgtattctgattgaacatataacagccagctaggttggcacaacagcagacaggctacacttcctttctgccataatgaatcaagcatcacagaaatggtaaggttccaaagagtggatcaatatgcatgcctcccaagatctaacgcaaattctaaattgggctagttcattagcaatcccccgaatttccgtgagcatagacagcatgctatttcgcactaaattcatgcatgggatcaggagagagtggatagtccctgaattcaagtcactgtgtcactggtaactagtctatcagcagatcgtacaaagcagaacagaataagtgctccaattgctgaggcgaataacatttcataagaccactcaataatctaagcgctgttaatacccaacccacatttctgttgaatggccacaaaatgttgaaaaataagctcatacctgatggaatccgtactcgcgggagaggggcactccgagctcggtgatgcaagcatggaggcgatcgtcacttccgtacagcttggggtacctctcgatgcagacgtcgagcgtccgcgcgagcgccgtggcgagggggaggctgagcgcgacgccgccgcccccgaacgccatactgtggctgaagtaggtgttcgccgagtggctctccgacggcgcgccgacgtacaccatctccctccagtcgtacttcccgagcacggccaccaggttgtccgcggacaccacggtgtcgtcgtccacgagcaccacccaccgcgcgcccccgccgccgccgcccacgagccgcacggcctcggcggcgatgcgcgcgatccggaggcccgaggggtggcccgtggggttcgtgtaccggaaccgcgacgtgtcctccgacacccggatcggcgggaggagggacccctccccggacgcgctcggccccggcgccgcgggcgccccggcgtcgagccacacgtgcccgcgcatggcggccgggtcccaccacatccggacgtactcccggcggcgcggccagaggtgcgcggagcccgcgatcccgaacacgatgtggccgagcgactgcgggg

SEQ ID NO: 26877 - DNA, 3415 bp, Oryza sativa
gtggtgcagggacaaatttaagactcggcgacaaattaagggacttcaagtgaacttattcctttagttagatggcagtatgggacgtgaaggtaagatgagtggcccaacagtaagtctgaagaataagatgggctcacttatgttgcacatcataaaagcccaaattccctaaattatgattttccaaagattggccgagctgtggatgtgcagatgcagaacacacccaggtcgatgaactcgcgtcagcgatggaggccgacaggtggggtcaccgtacacgctagtgtaccgcggccataccgggttaattggatccatgttattattttacagttttgaagttgttattcaaaatatgccactctttacccttttactatatttctctaaaatttttggaccatattacccttttcattctcctcatccacttttcatctctagttcatttctcaagattgaggcggccaacctgatgaaattaacgaagcgagccttggcgatggcacggatgacgagtccccatcatctcacggaccgagggccggtctcccctcgatcccctttctgctgctaccgtacctctcccttctcccgcaagctcctcggcgcactatggcgtatggcggagtggatcatgaaggcgcaagccgacaagctcataccattgcccttgcttctcccggtgccaacaagtggtagatcagggactcggaccgacgagttccatgtagtgaaaacggtgcagagtagtgcgacaagctccacgatgggagggccctcttctcttcccatcccctccctcactggccacaccattctcccatcctcccatttgtcgcgtccaaccgcgagctctgacacctatcccacttcaccttcctccttcctaggtagcggcaagagcacatcctaacccatatcgcgggagagctcaaaggtgagtgccttcttggggtttgggactgtgagttgggaagctcctcgtgcaggtgagggttgtgggcttcgaggtgtgaacatgcaaataggtcaatgagcagggtcaaccaacgagggaaaacaacgctgccctattcccaccacatactgcttagagctaccattcaacgacatcagctccgtcagatctagcggtggagaagatgaatatgaaagagagtagaggatgaaggaagaatatgagggtaatatgatctaaaaattagcgtatttttaataaaggtgaaattataatgacatgaatcgaaataaccactcaaaaacagtacagagtactaaacagtaagaatgttttttttccccaaaccacaaaaattataataacaaaaccacaaaaattataataacacgaatctacccaaataaaaaagctgtcggaaattcccatcgtgcggccgcgggggtcgtgccgataaaatccaaagagaaagcaggcgtccgcccccttttcctttcctgcgtctcttcgtggaagacacgctacgtgccataattagcacgcaggaaatggcacgattagcagctaatccccacagtctaatcggggattaaaagcaaaccaaagcagctccccccactataccttcgtcctcctcgtcgtcgttgccttgctgtctctctccgttaattaataaatttcccccctcctcttccttccttcctccaccggctacgcgctccgtctctctctctctctctccgtttgcttcgaccaagctagggtttcgccgccgaatcgagctcggtggcgcggggattttgcggtggggcggagcgcccgcggcggtggggaggcttcgggtggcctcggcctccgtccggctcgatccgatcggtgagtgccctcctcctcctcctcggcgtgcctgctctggaaggcgcgcgaattcggtttgggcggcggcgtttcgcccagggctgtggtgcgagtcctgtgggctgtggctgtgggatgcttttgccttctgatttctgtggttaggtagacgcagtttttctgtgccaaggttgtacctaacatgatgttctcttcggttgcttattagtcttttccttggccactatccattggttgcagatccttaagagtcatttctgaactggtttcttcattcccgtcctggacgggtgatgaatccagttgatacgcctcatgtgcttcatgtactatagtttttattgttgttttttcattgggcaatgcagcagatagctttccttgagcaatatttgttcctaacccacaagatttaggaacatttagtgtccatcacttgtgttttttcacaaaccaaggatcatgtagatgctataggtgtagttgtttcataatcggaataactcatgtatatctgtacaattttgtatagaatggaagttaatttccctaatgattgatggaagttacaccgacatctgtagttcaccttcagacatcttactgtaactctataagagtaaggtttgcaccattgagtaagtttactataagacagattcatatgctgtatgaaaagtaacaacatgagatgtccctttgattcctttgttcattgagtataaaacatatagttgagtttgctatgaatgcccacttcatgaaatcgtaaattctattgttcactgtgggatctcttaaaatgataagtaatgcctactactctttatttgtatggacctatgatgcgtatatttataaataaattctataaaggttgtcaaaaaaatgtttaatgagtaaaatgcatggagggtcacccaacttgtttaggtgtcatattggttactctacttagaaaatgcacatttaagtcactaatgtgagttaagtgagtcatttacccatctaactatccacatgagcataccttgtacacatggcatgccacataggattaaaaaattgcatctagaaatgtgtagaaaactctttgtgtattttttcctttgtcagagcactactaattggcaatacacggaattagtgaaactaaattatttcatgtgcctattttgacgagttcaagttctcagttgccatcaaaccctagcagcttttattttcactatgtttttgttccactcaattacattgctaggtctgcacgttttcagaagtaattttgtcagtgatagatggcatgtcatgtgtaaggtatgcttacatggatagttagatgaaaacatgactcatttaactcacattagtgacctaaatgtgcattttggaagtagtgacctatatgacacacctaaacatgttgaatgaccatgcgttttactcatgttattatcacctaatggcatgcatatgtatatgcattaagtttctgtcatcacctttgacaggccaacaacggaacctttcattttaaaatagtttttgttggttacaaagtggcactat

SEQ ID NO: 26878 - DNA, 7062 bp, Oryza sativa
ttcccctttctactatgtgccaatgcatgttgcccggaatgattatgtgaaaaatctgcaaaactcatgaaattccagtgttctaaaggaagacacgaagtgttgtatacatcttatatgtcctgtcctgtgctgactgcataatcagttcatctatgatttgtctagcatcaggccatcagccatcctttttgagagtttactcatccaaatgctaatatttccggaattaaaaaatttatggggttcagattgacaaacagtacgtaatgacatttgctttaatttgtgttagggcctaaactactagaaccaaaatcctggaaatatgtcatccccagatgtcggtgaggcaacaccgctgaggtcatgaagaggcctttttatagaggtttgcaagatttattattacacaacaagacatgcatacatttttggtaagctatcagattcattttaacttctgcttgtttcgttctgtgcatgtcttggttgcaggattgctcccaaactctgcttgtttcgttctgtgcatgtcttggttgcaggattgctcccaaactgaaataacgggttggtgactttgtagtgaacatgggcaatccatcttctaaattgcaaggtatttctgtaaagcgtatggctgaagcaactagaaaacatcatttgggtgaaataattccctgaaccatgcatgttgttgcagacataattagcatatgtatatattgatctcaccgattacgcgcagtgattgaaatttcgtttcgaaattttggatcccccggcaagttgatatctcggccaaaatttttggtttttcacaaattttggtgaatttggtcaaaatttagtcaaattcagttagagtgtatcaaaaattcagaaattttcggtccaaaagatgttcggaaatttcggttttaccgaaataaccgaaaatttttgcccaaaacaaaattgcaaacctttattacgcgtactacgcaagtatttcggtgagcacatttgcacgactccacacctccgctgctgctggtatcttgtattatttttaggctgcatatatgacattttataattatagctgccatatagtcataaggtgtgagagtcttgtagtctggacgctcacgaatgatggtcaccaaggtagagttccttggagtgattgcccgaaccatctttttgatcacaaccttatcggtcatgtccttggactcaagccccttgatctcattgatgatcttgctcaatcgatcatacatgtcacttgggctctcaccatccaacatcacaaaccgctcatattgcccctttaggatctccaccttggactcacgaacgctatccgtgccttcatgcaagttgcgaagtgtatcccaaatcaccttggcactctcaatgccgtccacccggttgaactcacttccactcaaggcgctaaatattgcatcagcggcttgagcgttcttgtgctcgtgttctcatcgtcctccttgatgggatcctcgggtttctgcaaaacataccctttttcgactattctccaaatagaagggttaataaacttcaaatgcatcttcatcttatgtttccaagcagcatagtccgtaccattaaagttcggagctttaccgctataggtgctcacgtaagatgtagatgtaggtggatagtaataagggatcttagctcccttatcacctttcttgccatcccccgtttgacccgatatgatctctccaaacgattaagcctaattaggagattaggctctgataccaattgaaatggtcaattaggcctagagggggggtgaataggctaatttaaaaacttaagtaaagcggaatcaggaattttcagaactaagcagagattttcggaacttccgaaaatactcagtgcagtcgaactcaagatgataactctagatctagaagtctacaacaggataaacaaggaacaaacagtaactagaccaatagcggcacaagcaagcggagctagtggagagggataaagaaatatcaccaagataaagctcgcaaagttgttcccgaagttcaaatccttgagtagattctactctccgttgatgagctcactaagagcagggtcttagctaaccatttcctcaagaggttgcactaagcactcctccttccactaagaggtatctctttccttgcggaggcgagatccggccttcacaaacttcttccggccaaccacacatagatcggtggctcgggagcgacacctagccgtctaggaatcctcaacctccaagagtaaaacataatgcaaagaactcccggagatgatgcaagtgctcacaaatcttcacgaagaccacaagaagcccccacacaaactcgaatccacactctcacacacacaccaaatccgaatcaaacccgggtggagagaggaatcgagaaagaaatggctcaaatgactagagagagaagcacgccaagggtgcacaagtttgtaatgagagcagcagccttcacaagtgaggggagtgggatatttatacccacagctccaaatctgcccgttggaacacaataattctgattttcggaacatccgaaaaattccagatctgaaaaaatcgaagtcaacgcacttttcggaacttccaaacataattccgaaagtactttcgatccagaagcatatttggctcgcagacattttcggaacttccgaaaatacttccgaaaatttccagaagcttaaaatcagttctatgtattttcggaacttctgaaaatttccagaagcttaaaatcgattctgtgtattttccttccgaaaatttccaaaagcttaaaatcggttatgtgtattttcgtaccttctgaaaatacttccgaaagaacttccgaaaatttccggaacacacccaagagggcaatgcttccaagaaaaatagattttgagcacttgcattagtccttatatgtctatgcatcatcccccttaatagtacgactttcctatgactcaatgcaaggtaaaagatacaatataccatttgatcattgccatattgcatcgtgacgtcgcattcaacggggtatgcatcacattacaacacatcgaggacataacaaccttcatatttacttgaataaaaaagttagtcctctctaacagacaagcatcgtagattctttggttcagctcactaaactggaagtaagaatcaggtagtgatttaggcctcgtttggaacagcttcagctcccaactccaacttacctagagtcggatctgtgccaaatagtccagttcctccgtttttgggaatggagttagcagagctactcttaaaaaatgaactacgggggtggagctgggattttcagctccacagctccactccaacctaaaagaccaactaccctttaattttttacgcaaaaatggcactgaactaccccaaactcacctctctcacggtcggtgcacacgcgtggggggatggcgcgcgcggcggcggcgagtgatggcgtgtggtcggcggcgcatgagcggtctagggtttggggatttttttccttttttttcaatttcagatctggagttgaatgctagccaaacacttttcagcttgttcccaactcccactggagtgggagtttagagctaggtgttggagtttggtgccctaccaaacggggccttacagtgattaagagctcacagtaaacattcggtaaacagcaaattatagcgtactagtactagttaatctctccgtcccaaattataggaagccccatttttaagaaaaattaaactcggtagcttttgactagtaatcatactaactatatctatactaagtattatatatgttatatcactagattcatattttgaagaactttcatgtgatgctaatttcatatttggtgggatcatagaatggaatgaaatactagttaaagtatgttattgcagaccgtataaaaaatatagaccttataatttgggacagaggaagtactacgctataatttgaactttcttttcttttatttctatgaaaatcagttgcaaaagcatgggctttttcgctagcactaaataaaataataaataaaataattctgaattgacctttataccccctgatgggcacccgatcctcattcccaaatcccgagaatttagactatttaccatcaaattcacgtgcctcaacttttttaccactcaatccgtatgccctctataatatatcactagagctgctaattgttagatttggtaccactttcactattttcatccttttctattatttttcacatgttaatggacattttaaccccctggacccacctgtcagatctttggatcggatcgatccatctcctgtcgcatgccccttccctgccgcgacagagagcgacgccgcgccatagccgagcaccgccgacgccgggcgccaccaccccgccaccgagcgccgccaccccacctgccgccgagcaccccaccatccatctgcaaccgtccatctgatcgtccaattgatttttgtatgtaagcacagatacgatttggtaggagtgctagtaatactgatcttgtatgtaagcaccttggcatctcctgattgcatatgtgagaatcatgcctcaaaaaacacagcttacaataattttacatatatcagccaaacttcatccagaattcagcacacattggcgacggcggcggcactgcgtcgagctgaggcgaggggcgacgggagatggatcgcatctgacaggtgggtccaggggcaaaaatgtccatcaacatgtgaaaaataataaaaagggataaaaatagtgaaagtggtaccaaatctaacaattagagctaacaattagcagctctagtgatatattatagagggcatatggattaagtggtaaaaaaattgaggcgcacaaatttgatagtaaatagtctaaattctcccaaatcccaacctaatcctagaacatggtggccgcgcgtggggcaaggtagcaggctgtggcggcgagcaacagccggcgcccgtggctgggcggcggctggctaggctggccagcgaggatcgagagcagcaagcggaaagttttctgtaagctaattttagcctcatttcgcgttttatgtaggtagaacttgattgttaatggcaaactgaatcgatgctgccagccatcttcttttagagcaacaccaattactactagtatagtaattacagcatctgaccatagtgccgtaaagaccgctcaatatatagcagggaaactaactagcttgtgtcgacagaggacagagtagctagcttgtgtcgaacggtaatgtagcttcagtagaagccattctcagttcacctttttatgtggctatgagaatgagtgctgtccctttctcctttaaaccgatctccaaggtgaaagttccattaaaatccagtgtgtttgtgtggtgattgttgaggaagtgtatcctcaccacagatatcaagacaaagggatgacatgttggttcatcatttgtgtcaaattttattgaaattatgtagaattctgccaatttttttttcatatttgtcaaatttcatgtcaattgaattctgtgaaaatcaggttgaaattgggcaagtttcatgtcaatgtactttgatatcaaaataggggggatgcaacatatgtacaaaattaggggcaagtatgcaacaataatcaaggctatacatgtttttttaccatagacttaacactgtcaacaggagttaacaacccagggtcaaatcgaagctttgattaaaaaaacaatggcaaaatcacaaaccctacaaaacatggggaaaatcacagggcctcatcttttagcttatgcttatacttatgagccaaaatttgaattttcaaccttaaatttggagttgattttgaggttttttcattaaagtttatttttcagcctttacttttagattgctaagaacacgtatataaaagttttattcacaaattacttttcgtttgcaaatatgccatttcgaataagcgaaacgatggctctaacaatcgtgtggggaagtaggcgcaagaacacaattgccacatatcgtaaatatcaaatggatttcaactgcacggtgtgtgctatgtatcagtctgcatgagcgtaagatatttgcgaaaaggtgccccagtcccagtctgtgtagtacagtgcatgtcaaaggagggagtttaccaccagtcccaatgtgtgtactacagtgcatgtcaaaggagggagtttacctcccaaaatcttccaatcaggcatagtttggtcattagctagatacttacttttctattacattgtatatataagtaaaacaaaagaactcaattattgtctcacatacttgtttagtttctgcagagaaaacccagagctggattatggacagagcaggcctacaggcataagctcacaacatcaagcaacaatagtgcaactgtgcaaccaataattgcaccttatgatggagacattccacagccttgctgtgagggtccctatgtgacacaaaatatccaaaagcatgcagtgaagtcaaagtcaatagacttgttttttaagggaaggattattttttttggcctcaatagaagtgtgttaggtaaggctgccaacaagccaatggataactctaagcttttaagaggtttgattgattcaattgttcagcacagctttgctggtctgttgcttcacatcaataattgtcatccatggctacgagcatgctgcttgggcctctcatcgccttggtcaatcggcaggtctccaattacctgttgcaacagtaccaagagctggatggtatggaggagcagctcacaattctggagcgcaaactgccggccatattggatgtcatcattgatgctgaggagcaaggaactcaccgtcctggggtaagtgcttggctcaaagcactcaaggctgttgcttacaaagctaatgacatatttgatgagttcaagt

SEQ ID NO: 26879 - DNA, 1003 bp, Oryza sativa
acacgtgatcaaggggtagctcagctaatgggaacaactaaagcccatcaattggtaagaatggaaaaagaggatttgcttgcaatttttgaaaaaagagcaatccgttttgatgagcagaaacctgatgagctggttcaaattggctgggagattatggacagatgtcacgggtcccctttagatgcaaaagccttgggttcaatgttaagcacacggaaagctgtagaagaatggagggccgtattaaccaaaagtagcatctgtgatgacgagaatggaattttacctatactgaagctcagctatgatgatctgccatcatacatgaagcaatgttttgctttttgtgcgatctttcccaaaaactatgtgattgatgtggaaatgctgatattgctctggatggcgaatgattttatcccatctgaagaagcaattcgcccagaaacaaaaggcaagcagattttcaatgagcttgcttcaaggtcattctttcaggatgtcaaggaggtacctttacacaaggatgaagtggacatagttaccgaactatatgtagcatccatgatctcatgcatgatgttgctgtttctgttattggaaaagaatgttttactatagctgagggtcacaattacattgagtttttgccaaatactgttcgtcatttgttcttgtgctctgatcgtccagaaaccctttcagatgtttcactaaagcagagatgtcaaggtatgcaaacacttttgtgcattatgaatactagcaattcttcgttacattatttatcaaaatgccattctcttcgagcattacgcctctattaccataacttgggtggacttcagataagagtgaagcacttgaagcacctcaggtttcttgatctctctggcaattgtcatatcaagtcacttcctgaagaaatatgcattttgtataatctacaaacattaaatcttccgggttgtatatctcttggtcaccttcctaaggatat

SEQ ID NO: 26880 - DNA, 16412 bp, Oryza sativa
cgcgagccaaatgtcggacggaatcctaaaattatcttataatattacacgttttaatttagtttatgactaaacaattaaatataatgtacgtctaaaattcctagcgattaagtccgaatttctaccgtgaatcgatttcttatagagattatccaaaaatgatccataatagtctataacgattcatctatttgataattatgtctaaattactacggcgaattgatttcccatagaaactaccaagaataatccataattaaattttgcaattctacggctataattaatctataatgaaattctaattattttaaattttctaaacttacccaaactccctctaatttcctatttatttccttttctttttctccctttcctttttcttttcttttctcttttcccctttctttttcttttttttttcctttctctttttctctttttcctttctttcctccctcccggcttcctccttccttcctctccttttcctccctcggcctctctctttctctctcggctcggcgacaaaagaaagaagggggggggggggggggcagcggctcaccgacggcggcaacggcaacggcggcggcggcaacaacggcccacggtgcggcacactggggcggcggcacgggggcacaaacgcggcggcacaacagcacaagggcggcggcccggcggcttggaggcggcggcccggtattgtgggtaaaggaaaggggtggaaatggaggggaagagggggaaatagtgaggcttatataggggaggggaaaagctaaggggggggggaggggagaagggagacgcgacggcgacgcggggcgcgaggtgggggcgcgcggcgcgaggcgacgcgacggttgcggcgacgcgacggcgggcggcacgaggcgcgagacgacggcgacccgcggcgatggcgacggcgacattggcgcggcgcggcagaggcgaggcgacggcgatgggaacggctcggcagcggcggcgcgcggctcggagcgacgatgggacgcgcgcggcgatgggacggtcgcgcggcgacgtcgacgcgcggtgacggctcacagcagcggcgcgggacgcgaggcggcaggctcgcgtcgcggtgatggaacgggcgagcggcgcgcgggcgcgaggcgcgaggcgacgcgacggccgaacggtgacggcgcgtggcgatggaacgggcggcgcggcgcggtaacagcggcggcacggggctcgggggagcggcgtggcacggggtgcgaggcgacgacggcgacggctcggcagtggcgacgagacggtgcgcggcgcgatgggacggcgacgcggtggcgatgggcgacgcgacggcgatgcgacggcacggggctcggggcggccgggcgcgcggcgcgcggggcagaggagggggctgggctaggggagaggtgggagagaaggggaaaggctagggaccacattgaacaccttgcgggcaatgaatagtgcactttcctaatattcccgattttaggttattttcaaaataaatttgatttcataatttctaaatcttgtataaatgaagtacatcccacatttgtgttatcctaactaaaatcctccttaatttaatatcactcatattctgtttatataatttattttaattagggttattccatcgcactaaaatttaattattgctaatatggttgcgataatattttatttatttccaaacccacctaacctttattttaattatattttaattatttatttagtcaactagattttcttttatggtttgttcctagctagttattcattattcgcgattaatagactccgacatcaaaatccaatgaaacaggcaaataaagtcagcatgatgcaattggtttaaaaagtttttgaaagtccgcatttttagagttttgattttgttggtcgaattttcagggtgttacaaacctaccccccttaaataaatctcgtcccgagattttcttaccaattgccgaatagatgcgggtactccgtcctcaagaattcttcgccttcccaggtggcttcatcctcggtgtgattactccattgtaccttgtacatacgccacactttgctcctagtcctcctttctgcttcatccaatatccggatcgggtgttctggatatgtgagatcattgctaatgtgaatctcttccagcggagcttgttcttcagacactcgtaagcatttctttaattgggacacatggaagacggggtgcacatcggcgatatattctggtagctgtaactgatatgcgacttctcctcgcctggcgatgatctggaatggccccacatatcttggtgccagttttcctttaaccttaaacctttttgttcccctcatcggagaaacctttagataaatgtaatctccttccttaaattccaggtttcttcttcgagtatcggcgtaactcttttgtcgtgattgtgctacttttagacgatcacggaccaagcgaatcttttcttcggcttcttgaataatgtcaggtccaaataccgcccgttctccagtctcggaccacattagcggggtacgacatcgtcgaccaaacaatgcctcattgggtgacatctttaggcttgcttgaaagctgttgttgtaagagaattcggcgtagggcaaacacctctcccagtccttgctaaaatccagagcacaagccctcagcatgtcctccaggacctggttggttctctccgtctggccatctgtctgtggatgataagcggtgctaaatgcgaggtaacttcccagggcttcatggactttctcccagaaatgtgaggtaaattgtgtgcctcgatcagatataatcttcttaggtataccatgaagacacactatcctggtcatgtacaactcggcgagttttgcactgctatagtttgtcttgacggggatgaatcttgccgtcttggtgagtcgatccacgattacccaaatggaatcatatcctgttgcggttttgggcaatccaacaataaaatccatgcctatctcatcccatttccattcgggaatcctgagaggttgcaacaaacctgccggcctctggtgttcagccttcaccttttggcatacgtcgcaaagtgctacgtattcggccacgtctctcttcatgttgggccaccagtagcccaccttcaaatcctggtacattttggtacttccggggtgtaatgagtatgccgactcgtgagcttcctttaaaattaatcccctcagtccaccctgttcgggtatgtaaattctctttttataccatagaacgtcttttccgtcggttgaaaattcttttgcacgtcctgcagctaagcgttccttcacctctcggacctcctcgttgtccttctgggcttcttctatttgggctctcaaaagaggttgaatgtccagggtgtttatctgtccatgaggcactatatgtaggttcagctgagctatttccttcctaagctcagggaccatcccttccattctcagatgattgcaatggctctttcgactcagagcgtcggctacaacgtttgctttgcctgggtgatagtgaacctctaaatcatagtccttgattaattctaaccatcgtctttgcctcaagttgagatctgactgggtgaagatatactttagactcttgtggtcagtgtagatatcgcaatggtttccaattagataatgtctccaaatctttagcgtatgaaccacagttgcgagttctaggtcatgggtagggtagttttcttcatatggtcgcaattgtcgcgacgcataggccacaacttttccctcctgcatcagtactcctcctagtccttgccttgacgcatcacaatatataacaaagtctttcctgatgtcgggaagaactaaaataggtgccgaggtcagtttttctttgagctgctcaaagctttcctgacactgttctgaccatacaaacttcttttccttcttaagtagttgtgtcattggtcgggctatcttagagaacccttcaatgaaccttcggtagtatccggccaagcctaggaaactccgaatttcggtcaccgacttgggtgctttccattctgtaacggcctctacttttgcagggtccactgctactccaccggctgagattacgtgacccagaaaagcgacttccttcaaccaaaattcgcacttgctgaattttgcgtataacttgtgctttcggagtttctggagcaccaatcgtaagtgttccgcatgttcttcctcgtctttggagtagactagaatgtcatcaatgaatactaccacaaacttatctaaataatccatgaatactttgttcataagattcatgaagtaggctggggcattggttagaccaaacgacatcactgtgaactcatacaatccatagcgtgttgaaaacgctgtcttggggatatcttcggttctaatcttcagttggtggtatcctgatcgaaggtcgatctttgaaaacaccttagctcccttgagttgatcgaaaagatcatcaatccttggtagtgggtacttgttcttaatagttacttcattcaatgatcggtagtccacacacattctcatgctaccatccttcttcttgacgaatagcactggagctccccaaggtgacgaactgggcgtacaaatcccttttcttgcaactccctgatttgctttttaagttcttctaactcattgaccggcatccgatatggtctcttggatatgggggcagttccgggtatcaggtcaataataaactctatgtcacgatctggtggcattccaggtaaatcttctggaaacacgtcaggaaatcgctgcactacgggcattccctttaggggtagcatggtaaatatacctccggcacgttcggttagcctaggatcttgatccatggttgctcgcatatccgatccccagggtgtggtcagggtaacttctctacgtccacagtcaattactcctctatgctttgctaaccaatccatacccaaaatgacatcaagagtttggggtattagtaccataagattggagggaaataccacatcctaaggcggatgggtacgtcaatgcaagctgtatccaccgctatctcacccccaggtgaatgtactaacattggttgtcttaatttaactctggttaaattgtgttgttgacttgctttcaaagatataaatgaatgcgatgctcctgaatcgaagagaactttaactggagtggagttgagtgaaaacatacccatcagtacgccttgatcttcctgggcctcttcagctcgaacgtggttcacttgcccgcgtccaaagccggtagcggtcctgttagtctgcggggtcctgaatagacctcgtccagtagcaggggtggcggtcccgtgaatagccgtcgcattagctccggtgcgaatgggtgtcttgtttggatgaggacatttattggcgaaatgcccatactctccacagttgaaacagcttcctggccttactgatcctgtggcggcctgattcggtgcaggagcgcggttctgaatggtaaccggcctgtggaaattgctggaggcggcaggttgtcacgcccggaatttctatccaaaattccaaacgcttacatgtgtgtgaaccctcgtccaggaatcagccgaggcacacaataacaaattgataatagagtacaaatattactctaattaataagcgaataaaatgtcattacagaggtagatagttcctctcaatcaataaagttctagcagcggaaaataaataaacggcgcagacggctccactccacaggcagcttgaccaaggctacacctaatcctccacaccatcagcctcattgaagaactcttcctctgatgaatgattgcaaggtgagtatatgacatactcagcaagccacgcagcaaatatgcaagtgcacaggataacaaaggatggcataatagggttgcatttgcaaaagcagcatttagcaaacatttgagaatttgataaaacagttaagtattaattaagcaatattaatccaacgctatacaacataccctgttgtatgggcccaaccattctgaacaaccaccccggctgcacagttctatctccaaaccaggaatgtaccattccaaaccaggagctaatcaaattattaccagttatagcatcttttactatgatgagaggtgtgagactaatcacgaaagacattgttagacccgcccataaccgcgggcacggctattcgaatagttttactctgatcagaggtgtaccactgtacccacaagacacaaccccacatcatgtcaccatgtgcctcaataccaccacggtatctcggaaaggagttgtgacaatacccctcgcataacacaatccactgcagcgcaccttcctggatcataatcacccccttataaaacaaggcatggactccccagcgacccccgtgggcttatctccgccacttctcagtctggtgccccgcaatgaaccatgctatacaaaagataaagccgttgcccatgctggcttgtggttggcacgataaatgtttcacaaccgaaactcgtgaaccggtccttaattgccatgagcacgaccttcaaaaccatgtgctcacaacccaccattaccaggttttagttggcacattaattaattaactaatcacgattgaccatcgtgaactatcaataagccatcatgaaataatagtgagtcattagttatcccataagtgtactaatgtttctaagcagggctaagcaattatatctaatatctagttgaaccaatataaataaagctcaactagtcaaattaatataacccaaggtatcaaggaataaggtaatcaatgtacaaaagggccataacaaagaataggtcaattccacccaatgacattcgaaaatagatgcaatagttgaatagaaacaatagctttaaataggatcaacatgctcaaagggttgtttgggatctgtgtgacttgccttgctggccttggaactcttcaaactcttcttccgcgaaaacggactctccggaaacgacggaatctaagcaaaaagaagcaaaatcaccaaaacagcacataaacaagcatgaacagtacatgtggatatttttaatgtgtagatctcaattttagaaaaatttagagacttgaaccaactaaatcggagctaagatgaattagttatgaatttttaaagattaaaccggattaaaacacttaaatcggtttaaattgaattatgacgcaataatgaattatttttgaaaaggaaaaggggatttattgcgtcagcaactagggtttgggtggaccgggcgcatgggcggcggttcacacgaacggacggccgagattgatccgatccaaatcggacggccgagatcgatcgggtccacggcggttcacggcgaacggccttgatgacgccagcaatgacgtcaccgacggcggcggcggcttggcgaggcagacgactcgagcggcgcacgctcaccggcgaacggcggcgctacggcacgaacggaggacaccaacgggtagcggacggcacggcgaactcaccgacgaccaaagcgacggcggacgaccaacggacggcgacggcgacgaggttgaaacggcgggaaccttcgggtcgacgacggcgaagctgctccggtgatctccggcgacggcgaaggggcggacgaggacggcgacgacttggcgagcacgacggcggtcttcccgagcgacggcgacggctggaacgacggtggcgcacggctggagcggcggcggcgacggcaaagctagggcacacggcgctagagctcttccggcgacgagaggcgaaggcgagggtggcgacgggtagaggagacaccgggggtccttttaaaggggctcggaggcggcggcgaaggcccacggcgacggcaacggcgaaggaaaccttcgggaaggacgaatccgagacgaactcgaatccaactcattccaaaccgattgagccaaagattccaaaggagaaaaggtagaggagatcccggagatcatttcccctctattgattcggccggagaaggaaaggaacggccggatttggaaggaaacagcggcggcggctcggcggcggcgcgctagggttccggcccgaggaagacgacgggcctgacaggtggaccccacctgtcagcggccgaacgcgcgcgcgcgcggctgcggactgggccggctgggccgaggagagaggaaagagattttgggccgactttcggcccaaagccaaaagaagactttttaaaaccttttcaatttaaattatttcttaaatgcaattccatttattaaaaatacttccttagctcaaataaatcccagaaaaatctaggaattatagaattaagcaaagtatttaatgaaattttatctggcccaattttatattggaatttattaattaaaattagatcttctcttcaagacttttaaaataaattctagaaattccatttaaacaacaatttatatattttgaattttcagggtgtgacacaggtcgactggttgtcaccactgttggtctccatgccaaggaggttgtccctttaggacgctggggtgcggtctgaggcgggcggttcatggcaagcctccttttacgattgtgctccatgaccttccggtcgttctccaacctaacgaccttattgattaaactctggaaactatcgtggtcttgtccaatcatgggcccgcgtaactcgtcattcaagccttcaatgaatttgtcaatcttttcctcttcgtcggcaagatctccagttgcgtagcgcgccagctgagtgaaacggttcaagtactcttgcactgtggtattcccttgccgtaatctcttgaactcattcttcttcatcctcatcaccgcggcaggcacgaagttgtcacggaaggctgtggtaaattcctcccagtttggttctccagcatcttcttcccgggcttctttgtacgtgtcccaccagtctccggctggtccttccaattggtttgccgcaaagatcactttatcggcctcacgtactcgaacaagagttagcttcttctcaatgaccctcaaccaatcttcagcatccataggttcttcagctgtggcgaatgtgggtggcttggtcctcatgaactctccaaagcttgaccccccgcggttgccttggttgttcgcgatagcttgcagaagttgagtttgggtggccataaccccagccagagtggttaggtcaggtgtctgagtttcgtcgttgctggttgttgcccgacgacggcttgccatctgtgtaggttgatggggtaagtatcctaattttctaactagctcctatggctttatcctattaagggagttgtgttgatatgaactttgttttgcaagcatggtggaataaactcatttaaaacacaacaacaatggataccataaataacatcacagagtttcacaaatgatacatgaatcatgatgcaatcgactgcgtacatatgcagtccaaataaagttcatccagaagatacaacgaactaatcattaaactactcgacaatctaggtaagggagggggtgtctcgcatactatccaaaaaccatctgatacgagagcgaagctgcaaggagtccgtcagtctagtcctccagccatccgcaggatcctggggcaggtagagggtggtcgctggcacgcgcaaacctgagtccccacggctcagaagtagtggcctctggatctggcttgggcctcttgcccggaggtcgtgtgctcttgcgagcagtgctgagggtgcgagggcctccaaggaaggtgatgcggggaacaggagcctcatcctctgaaggatcagtgatgtctggctcgatctccggctcagtgtcggtcccctctatctcggagtcgatctggatcggagtctccaaaccggaacccagctgcggagaaggtgtggggatcagtgaagtgtgcaccaactccggaacaggtggcggtgccgctgtaggatccactaggtagggtgctgactcggtagctagcatactagcctctcccagaagagcgtggaatgctggtgggtacggcggggtgaggaagaagtagcggtcacggcctactgctgtggaagtagaagcccctgtagtgctgatcttggctgctcaaagctgctcctccagctggctgatgtgctcctgactctctctcagctgctcctccagagtatccatcatcccgcggcgatcgttgtactggtcagataactgctggaactggtcgccgtggacctggagctgtgccttcagtgagtctatctcactgccccaagcctggtgctcctcctccaactgaagctgctgcactgagaggtcagtcaactcagtctccagctctcccatacgtctctggtggtcgtcaatctccaatagagcctcctcgtagtagtcatctactgcctcagcccatcgtgacaaccgagtcactatcgggttgtagcagcagggcgtgtcctgaactgtgcaaactgagttgccctcctcccggaacgggtgatgagcaaactcggtactcactaactcagctcggtggatagagctgagtcggagaaaggcctcccgagcagcatcctgcatcgcggtctctggcaggtctcggtggtgacgtgtctgaaagctgtagtccaactcggaagggactcgggggtgaatctcgacccgagcctcccaaactgggccacactgcctcactcggtatgacggaaaaccagggtatcgcagacgcctcaacatccgatgcagctcaatgacatacccctccgattggggtaagctcaactcccaggtagcgggtgaatccgaatctgccatctaattttaagaaaaaccccaaagtcagttgagagtaaaacttgttttgtaaagaaaatagttaagagtaagatgaaaattgtgtcgagttttgtaaacatagcgtttttatttttgaaagtattactaaatgggaatttctcccttggccaacttagaaaaagggtggggcgccttttggtcttttcctacagtcgtatggctctgataccagctctgtagacccccgtttttatagcaggaatcactcgtgtaaactgtaccatttccctggatcaagtagtctggtacacactaattcataactggaataccaatgctcatacacgagagtctagtacgaattattacaacataagcccgcaggcattgtcttaaatcatcagaccgagcggtctggaatacaaccaaaagcagagtttagataaggcagcggaattttaggcagcggcatgccattgccacaggcaacgaccgtactaagacctactggacgccatcatcttcgtctccctcctggtagtaggcataaggatcttccgtggcttcatctcccgcttctgattaattttataattgcaagggtgagtaccaaccgtactcagcaagccaccacagcaatgatgcacatgacaggggaattcaaaggatggctatggttcttttgcacaaagcaagttttgtaattcttttcacaagcctaagacctagcatagactgatcaagttttaataccagtattcatattaaacaatgacggttctgtccaccatccattgtgatcccaaggatagcttcccgccattgagtcgttatggttttctaaggatgtccatattcccacctctcaggaaatggctccatcagcataaaaatcatcatgcaatatcccatcccatacaagttaagaatttagagtctagccaagtgtaatatatgtcccggtgctcaataaccgcgagcacggctattcgaatagatttggtttactcacactgcagtggatgtacactttacccgcactccgcgactgcccaacacatgagcctcgtcccaacacatgagacgcgtcacggcaaagcttttcgataacctcgcattggcagtacccgctccatgaacttaaatcctcatgcactctaggcgttcatgtttctagcagtgagaggagttctggcgctcccgggaaagagaagtctcacacacatattaaattatggttcaagttaagttctccctctcacacactcatggcagtcctaccaatggcgacaccgatgtagggcacgcctctcggccctacctcaacggctgtcccatcgtagcgcacctgcctcactcaggggtgaaccatctacgcagagatactgcctccgctcggctatctaatccgctaggtctatacccattcgagaagtacggttgtacgggggtcgtttcatgcttaacttcatggctcggtccttaattgaccggggacggtactagcctttcccagataccacccaaatcctccgtccgccccagtcgaaaacagttgtttaattttatttctcctttcacaaatcatgtcatcaacatcatggcaatgtggcgctcatgtctccacatgccgcatctcaattaccttcccaaaggtatttgcccaagcatatagcatttgataaatatgagtatgcatgattctagaatagcatttctaagcaattgtcataattgactagggactcatacttaatcatgggtacaaggattttaagggtaaacaataatcaaggcatggcataatcacaagtaggatgttcataattgcatgcaaattttatttgtaaacaaaacaatttcgcaattaggatcaacatgttcaacgaatagtgatgacttgccttgctcaaagtcttgcgggtcttggccttcgcttggatctgcaactccctcgggctctatagttacgtgcaagaattgatttgaattcagttagaattcaaataaaaatccaaacaaatccaaataaaagttgcatgcgaaagtcgattcttttatattaactttactattcgcgaactacggcaaacccaatttcgatttaaactgttttgcgggtataatattttgttgtcataagttttttttaatttaatttacccgagcattatacccatatattagattagaaatttcttctcgcgagccaaatgtcggacggaatcctaaaattatcttataatattacacgttttaatttagtttatgactaaacaattaaatataatgtacatctaaaattcctagcgattaagtccgaatttctaccgtgaatcgatttcttatagagattatccaaaaatgatccataatagtctataacgattcatctaattgataattatgtctaaattactacggcgaattgatttcccatagaaactaccaagaataatccataattaaattttgcaattctacggctataattaatctataatgaaattctaattattttaaattttctaaacttacccaaactccctctaatttcctatttatttccttttctttttctccctttcctttttcttttcttttctcttttcccctttctttttcttttttttttcctttctctttttctctttttcctttctttcctccctctcggcttcctccttccttcctctccttttcctcccgacgccaccttcatgttgtgagagattatttattagtaatcaacatatataagcagcaactagcggaatggctaaatcttacctttattgataagttcttgaaaggaatatgcagctcacatggtgtccgctgagtgatgtcatcaacgggacaggtcgattcgtcctgtgtttgcatggcgtccatgctctgtgatcctacctgccccgttgaggcgcagctgctacggtttcctgacgggctcaccattgcaggaggaatggtcggctggggatcatgggaccgatgtgcggccatgcgttcatcaaccttccttgccacctcctcttgcatgttgagttcgtagctcgatacccggaactctaggtctgcaatcttcgcctcggtatctctcttgctcctcatccgactcctgtacgtgtggatgtcctccttgaaaccaatcttccaaggaatcacccctttccctcgtgttcgtcctggatgctctggagtctgcagggcgagtgtcagctcgtccctatctctgtctggtcggaacgtgccctgagaggaggcttccactgcatctgttagtcgtcgcgcagcctctcgtatctgatcgccgaagaccagtgagccatcagctgggttgagcgttccaccgtgagcatagtaccagaacttcgatcgttccggccaattggctgttgccggttcgatacccctctcaatcaagctagcctccatctgctcccacttcggcatcgcgacgctatagcctcctgaccccaagtggtgatggtacttcttcttggcggcattttctttgtttctttccatcatcgcctgcccttgttcacctgtcttatatgcaacgaactcgtcccagtgatcccttagctttggaatgtgtcgaagttcggtgtctgccccttcagtatatacttctggtacagatctcccttgaagctctgaaactgttctgccattttcttcagagtccaccttttcactttgtcctctgtacccgcaggaagggtgaatgtctcgagcattgtggtccacagcatctctttctccgaatctgggacaaagctctcatgatctccgcgtgcccttgttcttcgccagtacaccgtactgacaggcacgttatcccgcacaacccaaccgctgtgatgtacatagttcttggcggcttcggccggggcactaggacgtccatcttcttccacttccgttatgatgtgccgaccctcaagcttcttcgctgcacctcgttgcccgcgtgccctcttctgtccaacggagggttgactaccaccagcctcctcctcctggttcccctccacatccctttccacgtgcccctgctggttcccctccgcatccctctccacgttcccttcctcgttcaagtactggtttggatcctcgttcccctcttcttcattccagtactggctgcttccctccgcgattgtatcgtacaatatctgttcctcatcgcggtcagccatctgttgatacaagaaacatctgctaagtcacgagacatttatgttttaacaatctaagtcatgtatgctaagtgtaaatgtcgtacattagaaccctacacaaccttacgtgctaagtctaattacaaatcgtgatataagctaagtctaggtgacgtatattatacaaccctagctagtaaataattatatactaagtctaattacaaataaaataatcttatattaaaactcaaataatattacatgctaagactaaaatagtcatgtatatgctaagtgtttcgtgcgtatatgctaagtctaattaagactacaatagtcaattgctacttgtcgcaccacttccgtagtcaataattacatactaagtctaattacaaataaagtaatcttatattaaaactcaaataatattacatgctaagactaaaatagtcatgtatgctaagtgtttcgtgcgtatatgctaagtctaattaagactacaatagtcaattgctacttgtcgcaccaattccgtagtcaataattacatactaagtctaattacaaataaagtaatcttatattaaaactcaaataatattacatgctaagactaaaatagtcatgtatgctaagtgtttcgtgtgtatatgctaagtctaattaagactacaatagtcaattgctaggagtcgcaccaattccgtagtcaataatgtcatactaagtctaatttgcaataaaataatcttatattaaaactcaaataatattagaacactacacaatcttatatgataagtctaattacaggtctaataatcttaattaattgcattacaaatataacaatcatttatattattacgtcacttgcctgctccaattccttctagggctagctcttccactcaggcttgacggacgactccgacaacacgtcttttctgcaagatacaaaaagatgtattaggataaatgcgaagtaacatacatacatatatatatatatatatatatatatatatatatatatatatatattgcatttcacgttaacgttcgtcctcgttcgttcgctcgttcacgttccctagctcgttcacgttcgttcgcttgttctcattcacgttcgttccctcgttctcgcttgtcttcgttcgatcgttctcgttctcgctctcgttcgttcgatcgatctcatgctcgttcgttaacggcggtgtggcggcatcggggcagcg

SEQ ID NO: 26881 - DNA, 1898 bp, Oryza sativa
actgcatatgattttcgcttacatatgtgtttataaaatagaagttaatgcattaacattatttaaagtacaaagattaatgacaattacttcgaaaaattatttttgtctgtaataaattaagtggataaatcgtaataagcaaatataattaataaaaattccaataatcatatatacttagcatatatatgaatgatattattatattggtaaaaactctaattaagatatgtatgtacatactgcatgatttaaaattaataaaaattgtaatcatcatatgtacttagcgtaggaattatattaaattaaatgctaaaaactctaattaacatatgtaaatgccacatgcatgatttaaaccttttaaaaattcgaatagtcatatataagtagcatatgaaagatagtaaattaaattgtgaaaaactctaatatatgaatgatagttttaaaaatatattaaatttaatacttttaaaaattctccagtcaattataattagcatatgaatgatagtaaattaaatgttaaaaactctaattaacatatgaaattgccacttgcgtgatttaaaacttttaaaaatcctctagtcaattataattagcatatgaatgctagtaaattaaatgttaaaaactctaattaacatacatatgaaattgccacctgtgtgatttaaaacttttaaaaattgtaagtatcacatataactagcatatacatgatttaaacttgttgaaacctctaataatcgtgcgtaattaacatatgccatacatcaattgatttatatggataatcaatacatccaaaatagtttacatcgtgtacacataattacggcacgtactttctcctcactattgttccctccttgtgatcggtgcgtgagtaaggggtgtcttcatttgataggaggatgctagggtcaatcgtcaccgtgaaagggggttgcccatccaactgatcggtaatcctcgtcagtcttgtcctcaactccgacgatttttcttttgcctgggagaaccacttgacgcttaggctcatcaggccctctgcccttctttcctttgctagacatgtccttcacgaaaaagacttgcgttacatcattggcaaggacaaaaggttcgtccgagtatccaaccttgttaaggtcaacagttgtcatcccactgtcatcaatcattacgcctccaccagtcaacctaacccattggcaccggaacagaggaaccttgagaggaccatagtcaagttcccatatgtcctcgatggcaccgtaatacgtggcagttgttccatcgtgtcccatggcatcgacacgaacagcgttgttttggttcgtgctcttcatgtcttgggctctcgtgtagaatgtgtacccattgatctcatatccctggaatgtcgcgatcgacccagacggtcccctcgccaggaaggcaagttgttggttgatcgactcgttacccatgagatgttgtcgtagccacgcggggaaagtatcaatgtgatgccgtgtaatccatgcatcggacttaccgatgttcctggcgcgaactagagccaagtgctcctcgatgtaaggagctaccaatgaagagtgttgcagaacagtgaaatgggctttacggaataaattgttgtctaccgtcgttattgctttccttccgagagttccctttccccgtagtctcccttcatggcgtgattcaggtaccccgattgggcgaaggtcttcgataaattctacgcaaaattcgatgacctcctctgttccataacccttggcgatgcttccctctggacgagcacggttacgaacatacttcttcagaacgcccatgtacctctcgaaaggaaacatgttgtgtagctacatagg

SEQ ID NO: 26882 - DNA, 21774 bp, Oryza sativa
aaaggcaagcaatcccagctctagtagcatatcggaaggagtggatatgaagtcacctcgaaccacttgagaatctcctcgtaaaccgcaccgtggaatggtagattttggagagagaaaaacgagttgccattgttaattcctcgagaacaaaagttctagttgactcgcttgacaatttttctctctacaattcgatactacctgcagattggccatgaaccaatcctcagcagtatcataacctgctaaactagatttgcaacaaggatgcaacaggagagggggaaaaaagagtagttactaatctggaaacaaacgaatggagtagtagtaattaggagaagaactcgtgaaaatcaaaagaacagacaggtagtagtagcatatcatccttgaacgaatgacaaatctaatccatcagtttatacacgacttaattcataataatataagaatccaatcgcaatatacagggggcacacatcttcttctcagttctcactcgattcgattcgtgggcaccgacccagaccaattctttcacggttaaaacagcgacaaggaaacgaaagaaaagggggggaaaaagaaaaagaaaaagtagaagacgaggcaaacgaactttgaataatcccggtttgagcagagcagcgggtggtggcggaggtgggttagccgcggcagcgggtgatggcggagcagccgcgggagtaggggttggcctggccgccagggcggcagttgtagtaggaggcgccgcggacggagcacggcgtggtgtcgcgccgcagcgcgccgtagctgatgtacccctgcccctgcagcacccgcctcaccaccgcggcgccgtcggccgccgcatcctcggaggagaacccgaagctgtcctcctcgccgccgccgccgccgccgccgaccccgagctcccaggcgagcggcacctcccccgccgccgccgctcccccggccaccgccaggagcagcgccagcagcagcgcggacgccgccagtagggatttcgccattggctccttcggattcggtcgcctcttgccctgcctgcctttggtgtttgcttgctcggtggtggtggtggtgggtggtttaagcgttaatggtggtggtggtggtcgccgggcggcgcgcgggtggtgggtttattataggagagagagagacagagagagagacattgagaatagtagaggaggaatgcgcgtgaagaggggagcgctgcggcgtggggcccaagtgcccaaccgagttgcgtgcaccgcgtcgcgttaggtttggagtcggagccgcgggagggatacggtatttggcgaaaatatacagaaaccaatggcatgtgtttggcacagctcaaaaagctcagctaaacggtctctagctccaacaaaaataaaatcagagttgggtagagctatctcacgaaattaactagaaagttagattttgatttagtctgcttcataactccactccagacccaactcgtagagctaaatttaggagttggagctctaccaaacatatcctaaataaatgttcttaggttcgttcatgttatcacgagtaaaattttttttctcatagatatagttaaacttttactcatagtgacgtagaataatcttaaacgtttattttttttatccaacaataattatcaggttttcagtatatatatatatatatatatatatatatatgtgatttgcactgcatagtattttctctggtatttgtgggtcgcgtcaggctgacctggctctggctgagtactgcggcaacggcaagcggcagcaataatgcctgcagggcagacgcagcgatcatgccggcagcgcagacgcagcggccggtggttcgccgccgatgaccatggtctcagaacactcttcgtggtggaaaaattgaaggaaaaaaaacatataattaagcacggtggttcaatccggagacggagactccggttgctagttgttggttggatgatcgatgaacgatgatcttgccgttccactggccgcggctgcggctgcggctgacgaggggcttgctgctctggtctgtcagcttcgcacattcgcatcgcgcgcgcgcgcacacggtcacctccgcccacatcgcccgtcccgaccaagactagtggaagtgtgcagcttgcttccttccgatagccgctctcatcggatctctcgcatcattcagcaggaggcgtacgtaccagtgcatcattgcactgacttctaactaacccgatggtgtggacagtgcctgtcgagaaaaaaaaataaaaggttaaaataacagaattgttcacaaatataaataggagtacaaaacatttttgctctctatttgttcacagacataaatgacttttaagtagtactacttatttcatccatcaccttctatttttctttctcatcttatctcaattaccctatatccccacctctctttttttttctttatccttaatctctccagatatactaggagtgattgagagaagggaaaagaaaaaaaattaaaaagatacgtaaaatgaggtgagtcataagcacatgattaactgagtattgatcattttaaaatttaaaaagaattagtatgatttttaaagaaatttttctataaaacattttttttaaaaaaaaacactgtttagcaattttcaaaaagtgtgagcataaaaaaaaagaaaaatcttctccatttccatcctaaacaaacattatgttaaaaagacttttatatatatatatatagagcgagtatagcttataggagaaacgcaataactactacttactactacccctacatttcatattgtaagacttttaagactcacctagattaatccattgatcaatatacatgttttctatatgtgtctagattcattaacatttatatgaatttggataatgctagaaagtcttacattgtggaacggaggaagtatctaaaaacttagtctctttcctctccgtctctcgcggcgggtagtcaccagcaagggtagaggagggtgattttccagggagccatcagatccctatagtcgagttcatcctattttaaattgagtttatctcatattatgacgtcctctttccatttcctgtatagttcagtggagatgtcaacatccatattctttgtcttagccgcctccttccatggtcagcctgagctctaaagacagagcttgctttaccttctctgccttacgccatctagatggctaatacgaggttattcactggtgtttgggtcgacaagtgcagcagatttgcctagtggtgggaggtcttcttcctccacaaggacgagatggtgctggccattcaaatcctctgacgagtttgatgctgccaattcggtgtccttctttgtctccgaccgagcattttcaaggttagactgaagcttgttttgttcattgggttcacttcaacctccacttatgagatgcccttgttgaatttgcagcttgatggtagttaaccttgtccttgctgtcacacgagttcatcgtcggacgagagatcatcagtgctcctctcgacaacgcgaactcgctttccttttttgagggccacctgtttcgccaaagcttgtttttatgacctagcactcccccaatgtattgtgtattgggcaccattgtagtactggtttgtcgccttgaagagctgggcgctttgggggtgggttcgcttgtacttcaatctacgccttacgctttcttttctttttgcgattttgtttctttttcttgctagactccagtgcgtccttcttggccgacgactgtttctgctcggccaccttgccctttccatctttccacctgagagcgtctgcgtgattaaccattagtcgaaacttaaaattctgtgctcataaggatccaagcccaaatacaacctatacttggtgccattcatgcgggggttattaatgccgccgatccccagctcccgctcccgctcccagctggccggcgcctggcccgcccccgcggccagcgcgaggacgcacgccgcggctacggcggccacggtcgcggctcttgccatggcgcgcctgtctgcctcttcccgcgtcttcccggctgcagctatagcgtacgtaatgctctctttgtttgacgtttgtagtacaagtgagtggcaggtttcacatgatgtgttcaatagaatggttgtaagtgacagtaagttacacatttattttgggggtagcatctagcatgctgcatggttacatataagcatctaggtgtggattcagacattcagtgctgtcccttcttatcatttttattttacagcattggcgttacttcgtggagcacaatttagtttgatgaattatgaatgcttttgttggttttccttacttttgggtagatcaaatgcattttgatcttgatatgtgtacattttccggtagctcgattccatttgatgtttgtatggtcacttttggagtagctacagtaggagctaggattttggagttgtcaaatctgaagccaagtgagttagcatggatgaaaatacatgagcaacaactattcttggatctgtttttctatatataaaaaatacggtataccaaaccatgcgtcaattttctgcccatatattaaaacttacatatcaaatctttattgttacatataactaattttgtgcaactgaagatgcatggcgaggttgtcctcaatgagaggatacatgacaaggtttgcaatgagcaatttattcctgaagaacatactaatggggtgaaaattgatttgggaatttagatggttttgttgtgttgtctccgtttgcttctgtagttgttgcttccattcagtttgcaatggcatcaattggtttgtactgaaattctgttactagacttaatttcttggtgacatgcagctaactaatgccagtgagtattgttcttgttatgcttgcatgaaagcaataaatggatatattcataaataaactccatgtgtatgtaatcgtttttttttggacacatgtgtatgtagtctaaacctcgctatatgcaatgaatgcaagcagccatgctttagacaatgcttttcatttttttctttttgatcgagagcatgtacatatttggtgcaatgttaaccaaaagcctattttttggctttacatttttggacaaaaggcattacgcccggctttactgaaagcttaaattggtgatgcagaaaagtacagagaaaatgctgggttttccatcttaacctgcaggctcaaaacaaaataaaaccaactgctttaattagaacaccacacatccagaccacaccacctgaaaactacaggcaagcagcgacagaagacaagctacaggaggtgcttggacaaaagcataacactactgaaaaccaacaaaaacaaaaacaaaaccaaagactgaaaaaatgtaatatgaccactatggaaaaccgtatagaatggcgtgcaaatctgaacggttgctctgatcagtgatcactttctggtgaggctttattgactatagatgttatccttgagagccaatatttcaagcaaatctgacttgctctctctataatatttattccacaattgttccatttgattttctctcagcaaatctggactgcagatttgaacaaacccaagcaaaatcaatgaaataatcatttagcaatatggtcattttgcttgatactatcgcaaagatcacaatggtagaaaatagcccggacatcattttaacaaacgatatttcttgggggaaaaaagagagataattttaacaagcgaccgtgtttttcgattggcacattttaaaatgttactttcctgatcttcccttgttaatatcatgcatgctagctactacaaccaacaagaaagcaaggagagaaatggactatttggaacaagaagtaataattcacaaaggacaggacagctaatcatccatgaatgatgaattgatgaatccatccatcaaattaggagaatacacgatttatttataattgatacagagtaggagtaccggacacatgtacagtgtacatctctcttgactttagattagcgggcaccaatccctaccaattcgttcacatttcaaaaggagacgaacaataaaagaagacaaaaataaacaaaatatgtatagagtagacgagacgaactttgaatcacaaatcccaatttcaacagttttggtggtggcagctggatggatggatcatcccctgcactgggtgatggcggagcagccgcgggagtaggggttggcctccgcgccgggctggcagttgtagtaggacgcgccgcgcacggagcacggcgtcgtgtcgcgccgcagcgcgccgtagctgatgtagctcccctgctgcagcacccgccgcaccaccgcggtggcgctgtccgccgcctcctcacccgggaagccgaacgcgtcgtcggcgccgacaaccccgagctcccagctcagcggcacctcgcccggcgccgcgtcggctcccccggtggccagcgcgatgagcagcgccagcagcagcagcgcgggcgccgccacgatggcgggtctcgccatggcgctcgacgcggaggaggaggaagaggaggagggaggaggaggaggaggaggaattggttgcttgctttggtcgacgtcgcgcgcgtcgtaatggtggtggtggtcgccggccgccgggtttaattataggagacagaggaagggggttggcggggttgtttggaggctgaaaatttcaatcaatattctaataatatactctatacaactatataagaaatggtaaggtaacgcaaaattgaagcaatcaagacactcttttataatctcaacatgtctaactattacccttttctctctctctcttattctcccgatgccaatttaaaccataaaattatggatgaatagcaaatgtggtactccaagtttcatctcagactcagtttagtccttaatcttttagtctatccatgctataccttcaaattttcattttagttcaaatttatttttaaatccacttagaaaccacatagctaaacatagtcttttttcattgaaatttgcatgcaatgaatttgtttatagataatgcatagtagtttatgtaaaatgaaaataagtacgtgcttccaagtgtatatatgatagccattaagctcaacctttatgtgcacatgttgaaataataggaagtacatctgcagtgctatttattcatattgtttatctcttttctaatgtatgcatattaagggcaaagggaaaattttctaatagaaacgttgactagaaatatccatgtggcatattaagtgggtccaagaataattttaaaccaaaataaatacttttaaaggatttatatgtacaaaataaaacctgaaggactaactttagcgtctggtaaaacttgagggactagattggctattcaccctcaaattattatcaaagaatggttgacacttgacaatttcaatatttttcaattatcaaagagaactaatgaaatattaaatgagaattataaaaaagattcaatatagtggtctgtgtgcttctctcgccggcaaacaataattttcttttctgctcggacgacaaaagttggaagtccagatagcatgtgcctcgtcgacttgagagttgatagccaaactaaagtatagccataggtgtgagtgtgaaacctatctgacaatgcaggctttgtcctcatgtttgtttttttaagaaaagaaaaggaagatgaagaaagaaacaaatgtaagccctatgtaacacaagtcgtcctccaagttgcacatcacgttgccaccattgactcggtctcttttatatttgcttcgtcgtatatatcgctgcaatgcaattatgcaattgtaaaaacaaattaatatgatatgatttgcactacagggcaggcgtgcaatggggattgggagtgactgcaactttggcagtagccacggatccaccatccaacaggtaaggaacgtacaggattaactgtctatgctccctccttttagctatttaaacatgaaatgttttctccttttctttatctcaactttctcaagtttgagaggaatcaaatgtagtttataaacaaaatacacacatacttcacttcaataatattttgcacaattgtacatggcactgataaatgagctagtgagtttaacttctccccgtgtttgggaataatgcatccactaagtcaaaaaaaaaaactaagctactactccaaaatcttcacgtaaatcagtgtgaagcttctattgataacttgtaaagaaaatgttccgttcggaaaaaaaaactttaaagaaaaacaacaggattaatgtttcttagttgaacagagcatgagtcacataataaatttaaaggagagttacatcaaaatacgagctctacttcaagcccttaaaataaatgccaagcttcttttaaacatctaaataagtagtattaaatttcttatcagatgaaaaataactgtgctagtatttcatgttcaaatagctaaatgaggaaggagacaatcaaatctgagcgttccttactagctggatggttgcattagttgctactgctaaagttgtagttactgtagtgactgcacctgattccaatccgtgcaatggattggacggacgggtcacacatctgcgtcctacaaggtttgttctgatttgctcaaatcaattaagcgacagttgagttcaagctaatgcatcttggcacattatttcctctttttttttctttttctggagcaacaaactcgctgatacaaacactggagctaccggtatactatatatagcgactgtccatgcatgatttgaaagaaaaaacaatagatatatatggctactaagaaataataattaatgtcgtgcaaaatgtgtgggacacaccgaggaaaggatgatgcatggtatattggtatcgatacacagtatggatttgattaaggataaacattcacctgaattagaatggaggcataaccctcgcatcaattgggggtacatagacctaatccttatttaatttatatatatacactttaaatactgcaaaaataattataaaaagctctcactcaattgcgtgtaataaccaaagtatactctatccgtcccaaaatataaaacctaggacatgatgggacattttcaagtactacgaatctagacggataggagcctaggttcttatattttgtgacggagggaatagcggtttactagatgccaataggatatgtataaaataactgaaaaaaagaagtaaaagagaaaacatacctgaaaatgacttaattactgttagaactgttctaattacagatctacgagacactccgttactccgtagaaacctatgaggttttttgaggaaaaataatgaaatttaggaataaaaaaaggatctgtctattaatacagaaataataaatctaaatttccgtaatgattatccataaatggatgaatgctaaagccatattattgattttttttcttataaatgtatcgccatatctttcataaaaagtattcagcatgtatttacattgtaagtccctaaattactgtcggtgacatgggatcgggagtatcatgactagaggcttgggcaggagcaatcacccacgtggcctgaccccctcggggggggaggggggtcgggcccgagggtggtatgaccgcccctctctttgtctccccgaggggtcggaccgctcccgtttcggccccgagggccgaggcgccccgaccccttgtgggttttgcgccgcgtgtatgagttaggtgggcacagcggggctcacctaaccgcatttattgcggtttggacgagcgcgtcacgctgcatgtaacgcagtgcagcgcactcgtttatccggtctgtgaccggtcacagaccggtcagatcgcgggttaggtggcaacaggcgatctgacacacgcctcgccccgtcccgtcaggatgagagcctccaggcactcgtccctagccggagccagcgtgctagctcctggagatggcacgttggtcccggtcagatatatgccaggcttcatcgcaaccattaaaagcaagacattgtatgaagaagggcgaacatgcagattggtaaactgacgcgtggtggacaagaacggtcatgatcccatgttgcacctgcttccggcggagtggaggtaggtatgggctgtcccatcagaaggatcactcggacagcaaccattgcaaatctccgcccatttatgaaggaaggacgggccaagttttaggaaaaagaggatgggtccccaccgaaaggagagataggtagaagtggtgcatgtggtatccccttgatatataaaaggaggaccttgcccacttagaggggggatccgaaaaaaagggaggaccaaaagacgagagctgggagagaaagaggaagagggtctctagagtttgaactctcttgctctccagctctttgtagcttcttcatacacagatccaccagaacacaggagtagggtattacgcttctcagcggcccgaacctgtatacatcgtccgtgtcttatgcgtttccactttcgcgaacattccacagattgagagcttagaacttcacttagcgtccccggccgaaccggcaaaggggggcctgcgcggtctcccggtgaggagccccacgctccgtcatctggcgcgccaggtagggggcgcgtgtgattttctaagccctcatactctttcgtgcgcgccaagcttttcctgttcagcccaatggccgagcaagcaaaggtgcgcaacctctctccgagtgttagcggtgacgacggggagccaaacccacgccgtcgagctcgtactccaccgccccctccgcgccaaagtcctaggcgggaggaggcgctggagaggatcgaaggatccgcgacttcgacatccacgggtgatggagaagagcggcgagatggggagcgtcgcctcctcgtctacggcgacgacagcacgccccagggcgcggtccaagctgcgggcgcgctcctacgtcacccgcccgtcgtccctgacccggagtctccagcccaacgttggctggacgacatggccaacttggtcatgatggcacggcagcgcctaggtgttggtgggcggtcctccgctaccaagacctatggcgctgctaccaccggttccgtgtcgtcaaggcggagggcgcggcgagcggcggctattgctcgccattcggccgccactccctcgtcagcacctccgacccgggaagatcagcgtggggggccaggtgcccgcatcggtatcgagcgccggcgtaatggtcgacgtgctgcccacgcaacggagggcgcctcctcgtccggagtgtcacctcaacacggacgcggggatcagccctccgtgcccccggttggtggtgttggctgtagagcctttatggcgagccttcggaacgtccgttggcccccaaggttccggcccaccatcaccgaaaaatatgacgggagcgtcaaccccgccgagtttctccaggtctacacgaccgggatcgaggccgccgggggtgatgacagggtcatggcgaatttctttcccatggccctgaagggacaggcgcggggttggctaatgaacttgccacccgcgtcggtccactcttgggaggatttgtgccagcagttcaccatgaactttcaaggcacatatccgcgcccaggtgaagaagcggacttgcacgcagtacagcgaagggatgatgagtcacttcgctcatacattcagcggttcagtcaagtccgcaacaccataccatgcatccctgcacacgcggtgatctacgcgttcagggggggtgtgcggcacaaccgcatgctcgaaaagatcgcctccaaggagccccagactaccgcggagctttttcagctcgcggaccgagtggctcgcaaggaggaggcctggacttggaacccctccggttccggtgtggcagcttcggccgcccccggatccgctgctcggacagggcggcgtgacaggaggaggaagaagaggtcagcccattccgacgacgagggtcatgtccttgccgttgagggcgctttgcgggccacccgaaaggggaggcctgcgagcgacaaaaagaaggaggccggcgctcccggtagggagcgtccgaccggcaagtggtgttctgtgcacaacacctccctccacgacctcgcggactgtcgcgcagtcaaaagtttggctgagcggacgaggaagtgggaggaggagaggaggcaggagcgccgagagggcaagtccccggcggttccctccggtaatcagcgaagtgaggccaagcagaaggcccccgccgaggacatcgatgacggcgatgatgacctgggttttcaggagcctggggccaccattgccactgtcgatgggggagcgtgtgctcacgtttctcgctggagcctcaaggccatgaagcgagagcttctggccgcggcccctactcatgaggcgacgcgtcgggcgcggtggtcggaggttgccctcacctttgaccagaccgaccacccaccatgtgttgcccggggaggacagatcgcgatggtggtttcccccaccgtttgcaacgtgaagttggggcgtgtcctcatagacgggagggggggggcagccctcaacatcctttcccccgcggcctttgacgccatcaaggctccggggatggtgctccggccgtcccagccgattatcggtgtgacgccggggcacacatggccgttaggtcatatcgacctactggtcaccttcggtggatccgccaacttccgcacagagcgggtgaacttcgatgtggcggacctcagtctgccctacaacgcggtcctagggaggcccgcgttggtgaagttcatggcggcggtccactatgcctacctccagatgaagatgccgggccccggtggccccatctctgtccatggcgacctcaaagtcgcgcttgcttgtatggagcagcgcgcggaccacctcgccgccgcggccaagcccgagggtggcgacgagaggctcgccacctccgtccccgccgccccgaggcagcgaatgatcacgtgcgacgaggtcccggtcaaggagattgccctgggcgacggcccgtccaagatcacacgaatcggtggtcttttggacagcaaataggaagacgcgctcgtctccttcctgcgggcaaacgctgacgtcttcgcatggagaccggcggacatgcccggggtccccagggaggtgattgagcaccgtctcgccgtgcggcctggcgcaaggccgatccggcagaaagtgcggcggcaggtcccggaacgtcaagccttcatccgcgaggaggtggcgcgacttctggaggccggattcatccgcgaggtcatccatccggagtggctggcgaacccggtggtcgttcccaaggcgaacggcaagcttcggatatgcatcgactacaccgaccttaacaaggcatgtcctaaggacccttaccccctgcctcgcatagatcagattgtcgactccactgcggggtgcgaccttttgtgttttctagatgcatactctggttaccatcagattcgcatggctagggaggatgaggaaaaaactgcattcattacccccataggaacttattgttatacgacaatgcccttcgggttaaagaatgcaggtcctacttttcaacgcactactcgaatttctttgggtagccaaataggacgtaatgctgaggcttatgtcgatgacttggttgtgaagacgcgcaaccaagagactttactttcggatctggcggaaactttcgagagtctccgctccacccgcataaagctgaaccccgataagtgtgtgttcggtgtacctgcgggcaagcttctcgggttcttggtctctgcccgaggcatcgaggccaaccccgagaagatacgagctatagagcggatgcgcccccccagcaagcttagggatgtgcaatgcgtcaccggttgcatggccgccctaagtcggttcatatcgaggctgggagagaaggcgctacccttatttaagctcctcaaacgctccgggccgtttacctggacggaggaagctgaacgtgccctcactcagttgaaggcgtatctcagctctcccccagttctggtcgccccggagccagacgaacccttgctactctacttagcggcgaccccgcaagtagttagtgcggcgttggttgtggagcgcgatgaggacaatcctcattccgcgcatccccaccctatgctggcttggcccgggagagagcagggaggagaggcccccgagccgaacggtggcccaaggcccccgacgaccggggtaggccctctgcccgcttgtccgacgacgccaggagcccccgacccccaggacggccccgaggccactgtgggaaggccgcgcctgtcgtcctccgaccccgaggtcgtcggcacagaagacgagtgcgccccgcgaggccgcttggacgaagagcgcccctgggatgtggcccctggcgaagaggatcggccccaccgaaaggtgtagcggcccgtctactttgttagtgaggccctccgggacgccaagacccgataccctcaggcccagaagatgctttacgctattctgatggcttcgaggaaactgcgccattatttccaggcgcatcgggtcacggtggttacgtcttaccccctcggccagatcttgcataatcgagagggtacaggacgggtggtgaaatgggcaatcgaactttctgagttcgatttgcattttgaaccacgccacgctatcaagagccaggccctcgccgattttgtggcagagtggaccccggctcccgagcccgtctcagtccccgaggccagctcaggcccctcgcagccgcctcacaccgcccactgggtgatgcagttcgacggctccctgtctcttcagggcgccggtgcgggagtcacgttgacctcgccgagcggagacatcctcagatacctggttcgtctcgactttcgggcgaccaataatatggcaaagtacgaggggctccttgcgggactcagggtggcagctggactggggatccgccgcctcctggtgttaggcgactcccagctggtcgttaaccaggtctgtaaggagtaccggtgctctgacccgcaaatggatgcttacgtacgccaagtacggcgtatgaagcgccatttcgacgggatagagcttcggcacgtacccagacgggataacacgattgccgacgaactctcacggctcgcttcctcgcgagcccagaccccaccgtgcgcctttgaagaaaggcttgcccagccgtcggcgcgacccaaccccctaggggagacggacgcgcctgaccggcccccgaggcccgtcggagtccaggcctcgggacccgaggggagcgctcctagctcccttagattgattgcttggatcgctgagatccaagcatacctcacagataagactctacccgaggaccgcgaagggagtgaacgcgtccagcgcatctccaaacgctacgtgctggtagaagggaccctctatcagcgcgcggctaatggaatcctcctgaagtgcattcctcgggaacaaggcgtcgagcttcttgccgatattcatgaaggcgagtgcggagcccactccgcctcgcgcaccttggttggcaaaacctttcgccagggtttctattggccgacagctctcaatgatgcggtcgacctggtccggcggtgtagagcgtgtcaattccacgccaagcaaatccatcagccggcccaggccctgcagatcataccactttcatggccatttgctgtctgggggctcgatatcctgggaccgtttaggcgggccccgggcgggtttgagtatctgtatgtcgcaatcgacaagttcactaagtggcccgaggcttatccggtcgtcaagatcgataagcactccgcacttaagttcattaagggcattacagcccggtttggggtgcccaatcgtattattacgtataatggcacacaattcactagtgaacttttcggcgattactgcgaagacatgggtatcaagctctgcttcgcctcccctgcccaccccagaagcaatggccaagtggagcgcgccaatgcggaaatcctcagaggccttaaaaccaagaccttcaacatcctcaagaaacacggcgattcgtggatcgaggagttgccagcggtgctctgggcgaaccgaaccacaccaagccgagcaaccggggaaatgcttttcttcctcgtctatggcgcggaagcggttctcccatccgagctcaccctgaggtcccctcggaccaccatgtactgcgaggctgatcaagatcagcttcgcagagatgacctcgactacttggaagagcgaaggcggcgtgcggccctccgagccgcacgctaccagcagagcctacggcgctaccatcagcgccacgtccgggcccgatcactctgcgtcgacgacctcgtcctacgccgcgtccaaacgcgtgctggattgagcaagctctcaccaatgtgggagggtccgtatcgagtgatcggcgtcccctggccgggctccgttcggctggccacgggcgacggcacagagctgcctaacccgtggaacatcgaacaccttcgtcgcttctacccctaatggggttcgggtgtcaggtttcgggctcgggccaaccccgcactcccctcgggcgtgcagagttggccgggggctaccacacatgcatattcttatctctcttatatccgtatttcaataaaagcattttcgatttcctaaaggctgtgtctgtgctgttgtttccttttgaagaatcttgacttgaaataggtcactcgtgctcaatcctgccctcgggggctcgggtcggctaaaatcgccaaaaggggcccagaaccgagccgtgccccggggcgtggtgaactcgggggggggggggaatcggcaaaaacccacaatcgggtcacccataaccctcggtcaccacgctcctggcctggccagtctcgacatgtggatctccccaggcactagccccaacccgagccatttgaggactgggacctgggcacgagcccttgttcaagctaagacacaaaaggaccacggcacagatcatcctcgttctcatacacacagcaaagtgaaattgacacagaaatttctttattttgattgcagattaagttaatctatacaagaaggaggcccgaaggcctcggaagaaagaaaagaagaaaaaactatttaaatattggcgggggcctgggagctcactccgatgcactcgggtcgccagcctcgtcgccactgtcgcccacaccgccgtcatcgccctcctcgtctgagttgagggcgaacgcgagccgaggggccgaaccctcgaagctgtggacgatatggttggcggcgtcccggacctgcgcgcgcacgccgtcctcggtcccgggagggaactcgtccagcgccgtccatggggagaagtcggggtccctggcctggtagctcgccagtacgagctccaccgctcttcgggcgaggtccctcgaggatgacttaatcgtccgctcgagctcctcggggagccgttggagagtcccggccatctccgagaggcgctgggcgaggcccccctggttggcggcgtacttcgcagtccgcccgccccaaagacccgcctgtcgtccggcgcggtctaaacgggacacggcatcgcgaagcatgctgggccctatctcgcctgccaggcgaagggcctcgacctccccagtggacaaattcagcgcgccctgcagatccgcgatggtgtgttcggcagctgcgaggcgggcggctaagtcgctatcgcccgtggccgccccgccgctatgcgcccttgcatccagctcccttgcctgcgcctcgagttcagcggcccgctggttcagtgcggccctctcggcgcggacaccttccagatcgcgacgcgcttgttcctcttgcgcagcctcgcggagggacgtgctctccgccagcctttgcgctgtggcctcggcctcctcgagggctcgctcccgctcggtgagcgcatcctcacggacgcggagagcggactcttcttcggcacaggcggcttcgtgcgccgccagtgtgacctcccgaatggcaacggcggcctcgcggtctgccaggtccctctccacgacgcaggcgcgctcttccagcgccatggcacgggcctcaagggcttcttcgcgccgccgggacgccgtctcggtctccgtcgcccgccgttctcgggcagcggcagcatcaaggaccccccgggcggcgtcgagcttcttccctagctccgcctcccagctcccgtattgaaggtggaggtcgtcctgcacctcgttcattacggtagtggcgatgagggcagccccccgctcctcctccacctccctggcgatctcctccagcaccttccgacgggcctcaagctctgaggcgcgacggcggtgtgccttgcggcccacctccaccatggcctccaccgagcgtcgcccctcttcgacacgcgcccatgcggcgtcgagctccgcccgctctgcttgcagggcctccatctgggcacttaacccgtccaacatcgtggtgtttgcgacggccaaggcctgcagaaggggctctgcgctcagtggggcaacggaaggcatgggggagagccgccttggtgaagatgccgctcggctcggcccgccgatggacgtgccggactcagggacgtcccccggacctggcttgtcctgagtgtcgcccgagggagtgggcccaagcgatgcgtccgcggcctcgtcgcgagctgcctcggaagtcgtcgccgcctcggcctgacgaagtctggcctcctcccgagcggcttcttcagcctggcgagcctggacggcctcccgggcggcctcctcggcttccggtagacgatccgcggcttctcgacggtcagattcccgcctccgggcctccgcggtcgccgtatcctcggcctcagactggccggacttggaatggcgggagggacgcgacgagatctcgctgaagcagaagaaagaccagaagacaaacaagatgggtgagtgaaaactcgcgttaggagaatgaatatggccacaatgggcgtgggacgaacctgcgagggggtcggttaaacgaccactttggaggggaaatgaggtttccccgggatggttctgtccccccatcttgcggagccgcttcttcttccgctccccctcgggctgcggcgtcggcgcggccccctccgggcgcctgctgctgacacgcgccgccccgccccctcggggaggagatggggaggaggtaccctcctgcttcctcttccctcgggcgtcggcagggcggctgccccccgagcccccatcacggggcccggaagcacgaccccctcctggggtagattgttctcccctgcagctcccgcccgcgccatcatggcctcgaggagcccgctcctctgaggccccgaccgccatcatgatggtcaagatgttggcgcgatctggatcgctgcagagggggaggactccttgggggatgagggatgcctccacggagctgagattcagcacccgttggaccattaccttgaagtcttcagggacccagtcccatttgaccccccggtgggtcctcatacagtcctcggacccggtgtactcccaggcgccccgggcgcgccgctggagtggcgcgatccggcgacgaaggtagtcgccgtacaccatggcccctgtgagcccctgagatcgcaggcccgccaggcggtcgagaacggcgtcgtagccatctcccagatctaccggcgcccgccagctggaagcctgcaccgggggctggctcggaagtcggaggcgcgcttcgtcggcgaggggggtgtagaaccagtcgctcttccagtcatcccacttcttgcggaggacgcagggaatgtagcggttcagcaccggcccccgcggctggaagtagcagccaccaaccaccgacggcggcgacaccggctgtacggtgaagaaccaccggaacagccgaagggatgggcgcaccccgatgaacatctcgcacaggtgcgcgaagatggccaatgtcatcaccgcgttgggggtgaggtgcgccatctggagattgtaaaactccagaacatccatgaagaaagaagaaaatggcggaaccagccctgccattgcgaaagggaggaagaagacggaccgccccgggtagcgtggcgccgggcgtccctcgcccagcgtgactatctcccggccggtggcagattccggcatgaagcggcgcggcagcccggcctgtctctcgctcacgatgcgggaaggcggcagcacgctaccgtcaagcggagcggagccccgtgccatgacgccggatgaagaaatgtttgagagcgagcgcgtgtggcgagggtagggcacaggaaacaaggagttagggcgcaagcagtgaagacaaggggaataatggcgagaggaaggaagcaaatctcttcctcggtgtctttatacccttgccaacgctgtgcccggctcctcgcttctcgcgcccactatctcgctccctcgtttctcgcgcccacgtctccactaatcccactcgcccgttggcggcgcacgaggtggatatgtggctggggcagtcgagatggaacatatcgtgcgcgcgttaattacgctcgccgaccgaagcgccattaccatatctccaggcaaaacgaaccggctcgtcccgattcgtgtgctactcgagtaatgtggcagtcttgaagagaccgctcattattgacagtcgagttgccattgccgatgtgtgcgatttgcgaccgctggttttctgcccaactgtagagaccggccccacctgtcaccaggccttaggagtggcgtcacgcccgaccgcttccctcgaggagggcgatcgccctggcataacgccgggggctactgtcggtgacatgggatcgggagtatcatgactagaggcttgggcaggagcaatcacccacgtggcctgaccccctcgggggggtcgggcccgagggtggtatgaccacccctctctttgtctccccgagtggtcggaccgctcccgtttcggccccgagggccgaggcgccccgaccccttgtgggttttgcgccgcatgtatgggttaggtgggcacagcggggctcacctaaccgcatttattgcggtttggacgagcgcgtcacgctgcatgtaacgcagtgcagcgcactcgtttatccggtctgtgaccggtcacagaccggacagatcgcgggttaggtggcaacaggcgatctgacacacgcctcgccccgtcccgtcaggatgagagcctccaggcactcgtccctagccggagccagcgtgctagctcctggagatagcacgttggtcccggtcagatatatgccaggcttcatcgcaaccattaaaagcaagacattgtatgaagaagggcgaacatgcagattggtaa

SEQ ID NO: 26883 - DNA, 6584 bp, Oryza sativa
ctgtcctcatatttttagatagacttgttatttttttgttagaaaaatgagttgccaatagatatgtgcttaaaatgtacgtagtaatttgatgagaaagaaagcatttggttgaattaggagtttacacagaatttccaacgaattatgaaataataatttttcagaatttccaccaattatttaattttaccaaggctatgttctgttaatctcttccaaaaagggtgagggaggatttactagaatcgctccaatcgatttaactgaaaagccctaaatgattccttaggaacgacgggtgatctactgggcactggccgtccattaagtgttttaatctaagtattcagtcattgattaaaattatgtttgtggctatctactatatactcctattctactacagctactcgtactagccaatgtcccgtgtgaatgcatgggcgaatgaccggacaaataactatgcaaacttaattccagttaattagtactcctactcgtactgtagctactggcggatcaaaatagttatgcaaacttaattccagttaattcctccctccgtccctaaatatttgacgctattgatttttttaaatatgtttaaaaccgttcgtattatttaaaaaatttaagtaattattaattatttttctatgatttgatttattgtcaaatatatttttatgtatattgtactgtaccatcttctagatcaactggtcgatcgataccaataatgattatcgttcacttatcgctctccaggattagtgctcaacagaatccgatccaactgccgttaattaaagaaatcgaacctctgcatacaggaagaaggaacactagctttattcttgacgttcctcttctcttttagatgcaatcatgcaaacgaattatacgcggtaagctaggtacgtacgctggtctttcttctctcctctcgctcaattatttattatttattggtcatggttacgttttcagatttcttttgaataattatcacgtcctccgattaaattacgggatgactaaaccgcggcacgagtggtttactaactcgttgagatttggtaagaggagagagataatcatggacaggaggatcgacattgccggatatttagcgaggtcaaaatagaatgctcaacctgaacgaagtaataataattgttcagttcttccctcgtgatactacatgcctccgtttataaaaaagtgtaaactgttcatgtttatagcttataaaggaatgccgtaactaatgattttgctgtatttttgttgatagtttttttctaaaaaattgatagatgtaaatatagtataatcatagtataactatattgtaacttgcacgtaactacgatataattttgaaccgtttgatttactttaaaattcgtgcatgggatagaaaaaatcataacccacccacgcacatgtgaggggattcggtaccattatctccgttttcacatgattagcatatcaccttggaatttttaaaagttaaatagaagttacaatatagttacatgcaaattacactgtaattatatcacaattgtattatatttacctctataaaatttgacgacaaatgttatagctaatcccagtaactaatacgcactccttccaaaaagcctaagacctatttcattatttggtttttccaaaagtctaagtcctgtttgtagttattatgtgctaaattaaattgttgataggaacccaagaagccattttaatgtttataggttgcatgttcattggttttgtcacatggtgaatgaattaattgtttcttggtcttcatgaaaaagaaataacactcaaatttttggaaggagggagtactttcttataggaacttaattttagattagaaatatcatagtattacgaatcttgacatagtctgtctagatttatcgtgtatatgttcaatttagtatttattactaatataaagcgattagtaataattaagtttaatgatgcgacttacaatttgtttctgcatggctagctgtattctcttcgaaccctttcgccaactgctgtcgatgcagacttgtgctttatatggttgtgtgtgccgtcgcattcttattctaggttttgatccctttgggatacgatgaatcgtggtcagagttagtttggatacagctaatcaccagctgccaagtgacttgcacccgccgccgccgggagggacgggcaggtatatatctctgtcttgcctcgtatcgtaagtagggttaatcgaccgagctttctgtaataaataaactggaagggatctgttttagcagttaattacggagtagttggtgtgtgttgccggagtcaaaattgtggatgcaatcatggatggggatgcctcaatgtatagtaagtgtatggtgtttgtaccctcgctaacacgagcaaacaatatatggtcggcagaagggctacggggattattgagtttgctcctttgcctatggtgttgtgcttctgtgcttgggccaaaacttaacatggcatttctaaattttccattgtttttttttatattttataattaagaatgtcattgaaatgataattctggtggcggagctaaaaaaatttcaaaacccaggcaaatctaactacaacaaatatttactaatttttttttgttttcaattctataaaatatcaaattttacagcgttttcgctacgataagtccgggccaccgccagggcggtggctccgccactgattttatgaataacaatttttaattatccctaaaaagctcaatgcaacacaaataggtaaaaattgtataatcagaagtacaagatggacttttttatagtttaacactactagccaagagcccgtgcatcctaacgatgagtttctagcttatcaggtcaattaagcacatgtttagtctaaataatacttttatgatttttcttattgaacatgtttttaaatttaaggagaggcagcagtgaaacatgagaggattcgttgaagggtggtgcggcatagattgtgaggctcagatatcagtagtagggatgttactaacagaacagacactaccactactaatattaatagtatagatgcaaagcttatttttttaaggagcaaaatttatctaagtcagggtcaatttagtctttgtgcaatacttttgggtggctttcatgcgtattttttaccaaaaaaactaaagaaaccgcatataccagcccaactatcttgtattgcatcgaagtgccaggaaaactagaagtacatacggatttgatggagatcagctcacttctaggttgcttttgcttgcattctcccttggaagttggaagtttttattgctgatggctgatccaaggtgggagacaaatcctttctcggttgaaatgccattatatcatttctcggtgctcacctgtgactaatttactcaaatttcaattcaaaaaaaattattcaaaattagccgtggatgtgctaatcctgttaaacagaatgaagcagccattactactagagcttggcttacactaatctcgccgagcagatgctttaagtcttcaaaaacagagaatttttttagtatgctgctactcctactaatgaaatgctcatttctcacatatggtgcaatttttgtggtatattgtctatcccacaattggaaccacatttttgctcacactgttaaggtattgttccattttgactgtgtcggctgaccacattttaattgatactagtgttgagcaaagctggggtatagtagagcagtggaagaacagagagagggagatgatgacacagggaagatatatctgtcattttgcaatgttttctcttacagtccaaattgacagaatgggagcaaaacaggaaaaaaaatggtatgtggcttgatagtagtgacataaacgagaagtcacacagtaactagtggagtacgtcagaagttgggaattcatatattagtggcataaacaaaattttccctcaaaattacattggtatggtctatacatagattagggaattaataatacaatggagaaacatatggatgatcaaactgcagttgtatacacaccttcatcaacgttcaagtttgctcagcagttcttcaagtcgtggaagttcctgcaatatgtcgttccaatttggcatgccctacaaataaagaaatacacttggttagatatattaatttacgcgtaaacttcagattcagtgtcattcaattctaacgtatgaccttcatactatacttattacatcattaagtactatctccgtctcaaaatataagggattttgcctaaattcctcatattttagtacggaggtagtataaattttcctgtgaccaactaaaatccagagaagaatactcttccagatcttctgacacgaccatccaatcggaggattatatagacatcttcaccgggagtgacaccttcagactcttgctggtcacgtatccaactgaaccatgagaatgtagatgtcaacaaaaccttagacataacaaattgatgctttacaatttttggatattgaattgttgagttccttctataagcatgcttgactactattaggacaaatacttcaattcctggaatagtcatcgcaggacattacataatgtaaacataaaaatacagtgaagctaatagaaatgcacaattctttttaaaaaactagtaaaatgcacaattctttttaaaaaactagtaactagtaactgcaaaactgagagcagcaggagggttagaagccattatattaaacatatacttccatcctcccaaaataaataaacttttatacacaaatctggacaaatagggtgtgtccaaattcgtgtaggaaaaagttgaatctttatggggcagagggagtacagagagaggtgaaggtgaagctattcctaatatctattttttctcctaaaaaaatgtttatctgtacattaaatagagacttaacagcaggggtgtttttggtgccataagaaaaacaaggtgtaaaattcttcaaatgagtaaatactagtactcccgccattcagaaatgtatggcatattttcctcaaaatgagattgaaaaagacttttactatttattctctctagctactatatttaacacatgcatattggaaagttggatacttatcagaggtataaaggacattatacttgttttgcacaggggtatgaaatatttacatttgtggacaaagcgaatcaagaacaggccttgcatatgtggacagaggataataccttggaaggccattcaaaagttaaaacatatggtctacgtgagtggatgatacttacttaagaaggtaaaggaggcaaagcattgtggaacaacacaaaaaaatggttgacataatggcatgcaagtagtgaaaccgaggaagtaattttgttgtttaccaggtaactatgcccattgtaatgctaaattatcaaagagcagtaaaaactattagcagaaatgggtgacacagattttaataataatgataagtatttcagagaagaccacaaattttgaatattgtagaggtgaccataagcttattcatttgtgccctagcttttcaaaaaatgtcagttttttttattcttccatgacatctaaatacttatttatgttgttgttctatgtagtgagagtaaaaaatctacaagttaaaagaaaaggcacctttcccattgttcaggagagacaatatcagccttaaatcgctcttcagcttttaaccgtgatttcgctgcaatagattcagtacgcttctcaaagtcatcctgtcaagagaaaattgctttccttttgaaatatagaggaaattttattgtctaaaatatatatatataaaattcttgggttttagcaaaaacatgtaagtttagcctaaccccaactgaaggagctgatgcagcagatcttgaacttccaaagcctcttggcttactttgggctttctgagaagcaccaaagatcacaggaattagaagaacacctcgtttcagcagttcagtccgatatctctcagctctttgcattgctcgagtaatggatgcttttgaacctgccagtataacctaaaatacttgtcaatatagtatgggcacacaaaaaaagcacaaaaagatgtatgcaactcaggaaatatcaagctatctattgagaattgaagatgtaaagagaactatactaactggcctagtaatgtcccggagttgcacaagctcaataatgcgattggttgacaggcggacaggtaaccttgaaagggtttcattgcgagaaatttgtgtgatctgctgctcttctttcttgttttcccagaaatacaaagccacgagcacaacaatacctgcagtgcgctgattcaaaagtttgattatcttttagtttaattaaccgtgtgaaagcacagtatacaagtttcatcaaatgattatattatacatggaaacccgagaaagatcattattggcttaagatgtgatcct

SEQ ID NO: 26884 - DNA, 17178 bp, Oryza sativa
  unsure (1)..(17178): unsure at all n locations
accattttcaaccataccattttttggcaaagttgccaaaattttggctgcgtttagtttattgccaaatttagtaaatacacaagaaatgctgccaaaattttggcaatattgccatcttgctaaaattttggcattgtcaaaatttggtaaggtttattttggctacaatctaaacaggcccatactcaattatgactacaaacatgaagtgtcaccaaggtgtagtacccgcaacaaatttgtacatggatgtttttttcctcatgttgcaaccatgcataagaacgcattatcgccatgtaaaggtggaacagaaatcccatgctatcaaaaggtacactcttctcaacacccctttcttttaggacatatcaatttacctccaatattgatggcagcattcccaacagtttccagcagatcaggggcaccatcgccaccttgaactgcaagtataagtctaggaatggtaaagaatgttgaaattccagctgctgcagttaacgccacataaaagaaccttcggacaccacgaaatggtgcttgtacttcactaatgagtttcaggtctcttcggaacccagaaccaatatcttctccaccacgcaatgcctgaaatgaatttacagtatgtacaggatcatattaaatattagtaaagtatggatacttacctagtggttacagtgctcaagtagcacctctagatcctgggttaaacttcccacaggagggaatttcaggcctagttaaaaaagttactccttggcccctcataaaaacatgtattaagaatcgacctatggaaggcgggccctcgtgtaggggacaggggcctcaaaacacgggctaaggaccaatccatagggggccagtccgtgtgtggggggccagggtttgtggcttttctcggtcggtttggttgaggcttcctcttcttaatgaaaagtcgtgagggcggtcattcccccgctggtcgagttttttttttttacttattcacaaggttactttcttattcattgggtcaaatatcggtattagtcattgcctcattgggtcaaatttaaactatggtcagcagattactttcttattcacgaggtagcaaagcagtaaaatacaaattcacaaacctcttcttgaagttccttgaattccggtgatgccctgaacggtgccaagtcaggatcattaagtatagtaccaaacttgagattataatctcgcagagctgtccttaagcaatctgcagctttgttgctttcttccctggtcaaacatgcacaccaattaatagaaaaacataaataaagcacaaaaggaacaaatcaataattttgaaagtgttgcctcacctaaatgcatggcagcatgctttattgtatagtgctgcttgggcttcaacaggatttggattcagctctagggcattctcaaattgttcaagagcatccttcacctttggaatgtgaaagcaatatcacaatgaatgcagttgatattttattgtatatggttcttcaatttaatgattacaacaaacccatgcaggagttcactagtacatgcaccgtctataagaaacccacttcaattaatcccatatctctaacagacaaacatggtattgtttcagtttagagcgagtacaatagtaggttacaagtcagctataagcacatgtgttggtgataagataagagacagaagaaaaatggactacagatttgtagccagctgcagcacggactccaaaacgtcgtgtgtatatttttttttgactaaatcattgtgtgtatatgaaaggtgggaccatatattaattgtgtagtatatatttataggtaactattgtatgaatgtgctattaaattgactatacatgatttggagctaatagttggctatactattaaacttgctcttagagcaagtttaatagtatagcccactactagctgcaattcacctataaccaatctagtagccaattcatacaataattgcttactatactattaatatatagtcccacatgtcatacacacactgcgtcttgaagtccgtgctgtagttagctacagatctgtagcccgtttctcttctctcttatcttttatctcattaaaatatgtttatagccggctaatagttcgctattgtacctgctcttaatagctgctttgcttaaggctgagtttgagggagcatatgggctgaaagtttccctcattttctgtgcacacacttcccaaactgctaaataatgtatttcatgtaaaagttttctatatagaagtttcttaattcttaaagaatcatattaatcccttttcaagtttggaataattgatactcaattaattatgtgctaatgacttatctcgttttgtgcaccgctaagttgctaagagcaagtttaatagtatagccaactaatggctacaaatcaactatagccaatataatagccaattcatacaatagttacttactatactattaatacctggtcccacctgtcatacacacattatgtcttggagttcgtgctgcagctggctacagatttgtagcccgctgctcttctctctcttattttaactctttaaaatatgtttatagccggcttgtagtctgctattgtacctgctctaagcccaaatgctcattcaaacccagcctaatgttcaaactcaatatggacatgaggatgtggtcaaatatttttgggttcaacttcaccattcccttgaaggtcgttacgaagaatttactattttactcagcaagcaaaagatggtaaacccagttcaaacactcaaatgtggcgtaaacatacctatatcagccaaagatgaaccaaaatggagataaatgcaatgattaaattctgggaaaaggctgccgaatactgacattcctcagctaactagagctgcttgcgcactaaaactggggcatctctatcaacatattactcctaccgataaaattactcgttaatatgatctgatccttcacgacgattgagaagcactcgaaatgtggaataggcggaacgggaatcgacttcgctcaccctgcccttggagaagagctcgagtcccaggttgacgcacgactccgccgtcgggacagccaccgcctccttccccggcgatggcgggggagacggagacgaagaggccttggagcggagcacgcagcggcgtcgtcggccgcaatgagggaggaggggcgagacgaaggatagcgcttggagggcatagctacgggttccgccgcctccgcctccaccgccgccggcggggagaagggcgaggtgtggccggagagccgatgctccggcggccgccattgccggtttcgtgaggtgaggtggtcgtttttctcgttatccaaactagtatttgtggtcgaggaggaacgagttgggccgaagaagatgcaaaacccagcccatttactcatcacgtgtaaaaaagaaaagcccaaaccggcccaccacggaaaccctacttgcgctgcgcctccgcagcatataacctctcccacctctcgccctccgccatccctctctcctctttggcggcggcggcggaagagagcgacgcagacggacggcgtggtggtctccccctccggcgacgtagctcgagctcgcaaccatggtgagcgccgcgccgtttctcccgttacgtctcagtttcatagtctctgtacttgtgtagcaccggtgtcttcttcttctgttctttagtttcgggtcgagtggtagcaggatgggcttgtgtttagcttgtgtggtggtaatgttaagagggagaattgagagattgggggaggatttggtttggttcttgggaattgatgcggtgtgcattgttgtagattggcgggcaggtgtgatgagggctatgcaatctttttttcgtgttatgtttcctatttcctgtttcttgatggcagcatatgtatgatgattaccttttgatgtagtaactgatttaagttgtgtgctgtttgatatattcttactaattttatataggaattagattccaagatatgtagttaaacagtatggatcctgttgggatctagaattatattgtggatatacagtatcgagcctattgctatctagaattatattgttgtactggcttttaagaagcatcacaattctgtgagtatgtggttaataacatacttaacgttgtcaacctgttattttctgaacaggcgaggggattgaagaagcatctcaagaggctcaatgcgcccaagcactggatgctcgacaagctcggcggagcttttgtgagtttactgatttcctgtgatgtgcttgaaatggcctctgccatttgcgactattttctgttgttcagtaatgtaattcgccgaactgctttgtgtgccttccaggcccccaagccatcgtctggacctcacaagtccagggaatgcctgcccctgatcctcatcatcaggaacaggttgaagtatgcgctgacataccgtgaggttatctctatcctgatgcagcggcatgtcttggttgatgggaaggtcaggactgacaagacctaccctgctggtttcatgggtatgcacgcatgtttcttttctgacccgtcgttatcttgtatggtctggtatgcaagtggttcatttctagcataccttacatggtaatgccctctgtttggcagatgtgatttccattccaaagactggtgagaactacaggcttctctatgacaccaagggtcgcttccgccttcagtccgtcaaggatgaggatgccaaggttagcattgcttcttttcactcatgcacacgtgaatgtaaattctctattctgttttgtagtctaaatgtttgtgacccgatcttttatatgcagttcaagctttgcaaagttcggtctgtccagtttggacagaagggcattccctatctgaacacctatgatggacgcaccatccgctacccggaccctttgattaaggctaacgacacaatcaagattgatcttgagaccaacaagattgttgacttcatcaagtttgatgtgggcaatgtcgttatggtcacaggagggaggaacactggtcgtgttggagtaattaagaacagggagaagcacaagggcagttttgagaccatccatgtggaggacgcattgggccatgccttcgccacccgtctgggcaatgtgttcaccatcggcaagggcaacaagccatgggtgtctctccctaagggcaagggtatcaagctcagcatcatcgaggaacagaggaagcgagatgctgctgctcaggctgctgcaaatgcttaaatacatttctatcttcaaaatttgagttttgtttgggttgacagaattttccatcctagttgaaatgtagttcacagtaatactgttaagttgcagagatgcatccttttctactgttatttcatgttatcgagccattttattgtgttcatcttttggccttgaagctaccaaaatggctgagaccgttatcatcatgcagtcattataatgaacagtagcaattagccatcacttgtttagagcgagatttgttttcaggcaactgctgctttactgaagctacatggctaatcttggtttattcaaacgagactattggcatccttccagcttggcattcaaagggagtcttggtttaatcaaataggcttccaatctttccaggttttgcaaagtaaaacctttttcgtaatggatcatattcctggaacacaattgtatggaaaggtagggatgggtagaaaaagatcgagaccgagaaattcggtcctaggtagtgagaccgaattttattcggtcaattcggttagtcttatcggttaaaaaaaaagaccgaattaacaaattaacaaaaaaaaatttctaaatccaacctataatccactaaattcaacatgattaaactctatttttcacacccctacttataggcatgtaatgtaagaagtgtctttacgcatacatgcttacgattttttttttgatttttgtgttgaaaatttccattatttctttgcatatatgaaaatgttgctgaatttcggtcaggactgagaccgagacaaattaatttgtcggtcctaatattttttcgttgaaattcggtattcacttccaaaagaccgaaagaccaaagaccgaaaccgaaattttcggttagaccgaatacccacccctgtggaaaggtacgcatgccgaacaaatggaatgtttggtttattcaatgagacttcaattattgggaaaggtgataatacaaattggcaaatacggtagtactgttttaaacctctcgctagtattttttttcacccgaggctaaaccgaaataccgtcctgcctgggatgcatagtttacaaaaccacgcggtcatcacgtgtggtaatcttttcagtttttgaaatcacggtatagctctcggtttggggaatcatgctaggatgtggatcctggctgtgatgtgaacacactcgtgcatactcaccggcagcggtagatccggccgtcatagggccggcaacgacagatctatccttcttgggctgcccttgcctccccttcaccagtgtagctcctaaggccaccatgggtggatccacgtcccctaagacctccacctcaactgttgccatcgtcgaggtcgcggtagccgccgccgtcatttgagtcgttgtagccactgccttatcccgtcacggggtcactcgagagatatttaaccatttgccacatttagatgtggcaattaactatttgccactggacccacatgtcatagacacatgtggacccacatgtcattgagataggggtggcaaatagttatttgccaaatctaaaagtggcaaatagttaaaagccccggttactcggcggtggcagatccgccctttcctagggctgacaatgatgctgctggatccgctgccgccatcaccgtccctccaagggccgagggtggtggatccatccctcacgagggaggtgtcgatggatccactgtccttagggggctgccgccgtcgtcatcgtcgtctttgccatatctcccaccagagccgagcggggtagggagaggggaggggaggggaggagtagggagaagagaggggtgaggagaagatctcctccatgatagaaaaatctcctccccaagcatctactccacgcgtgcgcgctccgtcggggccgccaccgagctccactgagcatttggacctcaagcgccgccacctctgcatgagagagattgtgagtgagtgagaaagagagagaggaggtgaggagttgaggtgactaaatacgtagggagagtaaaggggataaggataaggatgagcagagagatgggtggcaggcgggcctattaagacgtccacctgcgataataaattttcgtatcacaggtggatttttgctggacaccgcctaaatatttttacatatgaatgctcatttagttggccgcctaaatatttttacatatggacgctcatttagttggctaaaaaaaaaacacagtgtgtgttcgcgaaaatcgttttttgtaagtgtttcttaggtcttccggtgaaaatggaggcacaacacataagatcgcttcccgattttgtttcaattcacgatcacgggatttcacgtggccgcaggccgcagccagcgtcgcatccaccttcatttgtccgtcatcgtacaccgggctcttcgtccgtcattcgcaatcccgtgagcttcgtctgtgcgtccgcgtcccaacgcccgcacgagcgttcgttgtttctgctgtccccagacaggttccaagactgagagcgccctgacgtccatgcctagggagtatagtcgatcacgtactagccacaccaagtaagaagaagaagaagaccggtaagagaggggtggctgcctgcttttttgcttcttgctgctgcggcctgttcttcatcggagctcttcgtgtccagatttcttcaaggctagagagcagctagcaataggaggaggcagtaggcatgggcagcgtcaaaggtgagcggctgaccggtgtggagctctctggtttgtgtagatggctttgctctgtgttcatgatttgggttctcaggggatgctctgaacttgggttatttggggttcaaagttcggatcatctgttcgatgttcccatcgattttgtttggtgagagttgcaaaagaacggttttatgtaggtagggccaaatcaaacttgagatttctctctctctctctctctctctctctttttcctgacgctttccctgatatgtgcattaaaggattttgatatggcccagcctgtttgagtttattttcttgattttctttttgaatttatttagatagtgtgtgctcttttgagtgagctctctagatagtgagtttgcttcattgtgtctgtgcgtgatgacagcacaagtgtcaagacgaggcaacaaggtgcactacgctttatgcgcaagacactgcaaaatcacatacgactatacatgacaattgaaattgtttttatccagtataccgcatggacatcttaatagcataggataaagagaaaagcaataataaccaaaggttggagtttaggattggtttatttatttataggggtattagcatggctaggattataattagctagggtttagctttagattagcgatagtaaggttggcaagtatagcggctaggatttagtttattaatttctagcctacatgggagacttctctaaccggtgctgacaaatagcataatggccagaggattggaaggttggtgcaggttgtgaggtggatgtgttattctgacaaccatggatggtagtggggcgggagagctaagtgtgcagtgtactgtggagaccaaggaaacaatgaagctccaatctctgtaggcatcgataagtgtggtgcgaggaatagcagtacttcggctttgggattatgttatgtggagctttatatccaacagtccgatctcgaacgtccttatgaaaggcgtaaatttccaaacggtgttttttaagtggctaaggggtaatttggaataagaggaataatattcaaaagattgaatttaatataattctaaattggaagtttaaatggcatttaaatagattaagaacattcaaataaaatatgaaaatataaaaaaatagtatcaatagatagagtttgaatttagagtaatttaggtccaagtttgacttgaatcggttttatggttgaatcagttttatggtttgggagaaatgggctctaaaaattgaactttggattaaatctagaaaatacgaaacaaaactgtttatggggccaacctgtcaaacactgttattcttttcttttctctccttcctcctcccgatcacctctctctttcttgttgcaggccgtggctagggttggggattccagcggctatgatggccagaggccagggcggattgagagaggaggctgtgtgcacgacggtggcgaagtatcccccgtagtggaacggctaattgtgccagcggcaaggtcggtagctaagagtgggcatggcggattggcatcgaggaggccgaaaggggatgggtggtggcttcagcgtagggtagttcagattaaattgatgtcatgggaagctctagcctctatgtggatgatgatgataactcattttgtggttggttgtatttacacccaaatttgtcatctaagattcggattaggaaaatattgtcaaaatttggagagtatcggtttgcttcacggagctggtatgactgtcgtatgtgggccagtcagaccgctgcttgtgtgccggtcaaactagcagagtccgatctcgagtctgttttcgtcaggcctcggaattccttttttgggatggcatattttgggtttttgttgatttttttgtcccgagttggacgtggaggaggcaagaccaacccctatataaagcacaaggccggtttaattggaagaagaatctacacagtccaatgtagccaatagaatcgctttttcaatattgcacctacttttcgcctagttctagcctagttcatccatctttgtcgatttgcgccgtaaatcatccgccttcactgcaagagtacagaattcttttctaggtttgttccgtaaacctaatgttcacccttaagatgggtgtgtatcgcttgtttcatttaaatcggctccgctagccggtttaatctatcgaaacccattttgatctagcttttgctagattgaggtggtcggtgactccataccaccgcaaggtgtttaggtgtctcgatcatgattgtcttcttacaaaaaaaagtttccaataggttggttgtaactagcgatggaaaggaagctcgtggctcgttagctcgctcgacttgtgacaagctcggctcggctcgactcgtttcattttcctaacgagccaagctggcattttaactcgttagagataaggagccagctccagctggctcgcgagccttaacgagccaggactccaatagacaacagcaaaggcccagcccaagacaacagaaaaaccctagtcctctcctcactcctcacggcatcggcgtcggcggctcatcctctctggctccgcttgattcctcgatccctcccccctcaggcttccgcaatggcgtagtgcgctgccactagtcgctctcctctcctcatctctcgctgcgacgccgcccggccatcctcttccattgaagaagctctcctcgccgccgccaactgctagggccgtcgccgcacttccccagccagcgccaaaagctctcctctcttcacctctcgccgcgacaccgcctggtcatcctcttccaccgaagaccggccacctaccccgcccccgctggccaccaccccatgccacacgccgcccactgcccaggcgcccaccgatggtttggctctcgagcctaatgagctagctcaagctttcaaatgagccaagccaagctaggtttctagctcgttaggataacgagccaagctgagccagctcgttatcaccaagccgacccgagctggcttgctatccacccctagataggtgctatagctttctaggatgtactgagacgctacaaacaaaaaggctccaccggattatagctggacgccttgatggagaaatgagcttgcgcaacgaaaaacagagcagtgcacacacttggcctcggacttcgacgaggacttgaaaagcttcaagtatggcataacgatgcctaaatttcgcgttacaccagaagttgatgaaggatttggcttgaattggtggagtgtatgcacgcatagtgctcgatcactgtcatgcacgaggccgtgcactttggcgcgtggacatctatccttcggctgagcaaggggcggtgtaccaccatggtttgggccgaggtggactggcttacgttgaggaataagttcatttgaggtcccttaacttgacaccgactctgatttcgtccctaaaccacaataccagatacaccctcaattatcaaaactggtgcaaataaggtcccaaggcagtttggatgtcggtttcggtgacgtggcatttacgtggctggtttccgtcggacttgagggagaactggtagacaaagaggtccaggaagaaagggagtatggtttgggcgcgcggagtctacgccgaagccgaggacaacgagggacgagtggcgggagggtggcgaagatgtccaggtaggtggacgcgaggggccagccacagcgagggaaatgagagggagtggatgttgccaggaccgtcaaagaggaggacgcgctcgcctgctctgtcgttcttcttgctgtccacccacccgtccaccatctcgcctcctccaccattctcctcgccgcgcacccacccgtccaccaccgctcctcgccgcccacctgcctgtccaccactgtctcacctcctcccccgttctcctcgccgcccacctgcccatatgccgcctcgcctcctccgtcgttctcctcgccgcccacctgcccgtctacgcagatccaggtcgccgcactctccgctactgacccttggcgaggagctcgattgcggtattaagggaggagcaaaccaagcccctcccttgctgccactgccacgtggccattggatcgtgggtgtagccttgctcctatgatctcgaggttgagggtgctatcgatcccacgctgggggtgggagagcgcaaccttcttgtgcgtgatgaggaagggcgcgtcggtggcggtggtggcggagagaagggcggcgacagcgaggagtgagaatgaggaagaagagagagaggatagagagaggggatgagtgaagatgataggtggggccacatgggccctaccatgttttatttgtgtgtgcatctgattgtgggccccataatttttatttcgagatcaaattgccacagtcaaaggagccatgtaggcgccacgtcagtcaaaatcgggcataatactgccgagggatcacgtttgcacggttttgtaaggttgaggatgcgttgtatccggttttgcggtttagggacgaatttcggactcggcgacaaattgaggtacctaaagtgaacttattccttagtttgatatcaggttttgtgggacgaaatttgactgggctgaggttttgcgccggctagaatgagcttgaaattctgtagagcacttcatggacatggacagccaggggcggatctacccattaggcggggtgggtcgatcgactcagctatgactcgtgttgctccacgctctcaagacccctcttactccattatagtagttatgggccatcaaaattaggtataacaaggtgtaaacacccaacaaattgaggcaattatgcgaatgaactattaatacgatacatgttgattgtttctgattggttacagacagtgtgataccttgatgtttttttttgtttttctttctgtaatttgtaaataaccttttcattttataaaaatacactgcgaggtaaagtcctggcagtatttccagtaaaaaaacgatacgtgttgtgttcaaatgctcttaacgagtgaacatttctgttctccgccccatatatattttaaagctgcgtccgccaggacagcatagttttgtattttcaagatatttcagataataaaatgaataatttggaggggcttggatgcaaagtctcagtgtaggtgtaggagtaggagtaggccatgatgatgtaggaatttagtagaattttcgtggactaaagcaagaatttgaaattcaaataatatttgaatttgagaggaattgagagtttgcgtcaaattaaaaaaaaattgaggctaagcctatggtactggagtggagggaataagtagatgaattagttttagatggaaagtgatttggaaaggcacttgggggtttgagcaaatttggaggaataggattttattagcacaagagcaaaccaaagatcccaagagttttactgtgctagggaatagatatttgatttgaagaaaattttgggcatgggaatatgtggaggaaatttatagaatatttgtgacgagatgaaacatcaacgatttgggatttaaagctagagatagaatatgggatccttgaaccttgtttagaagggataaattcaaaaatgtttaaattgaagaaaggagagatttgaaaattgggatcagacttacatgaatttttctataaattttttagaataataaaaaatgcttaacattctaaattcaactcaagaaatagaaatgaaaaggcggcatgacgcaattcgaaatatttaaattttgaggatgttatactattgattactctctgtcctaaaatatagccatttttagctataaattatgttgagatggaggcagcagatcataaagcgtggggaaggagcccggaggacccacttccattcctttgcaggattcttctcgaaggaagaagatgtctgctgatcgatcaccgggatcgacctcatcatcaaccaatggttagcttcttgcaggatcactacaccaacactggcaccaaaggaggcaaatgatcatcaccaagtggcactaatggcttcacctaattaatctggtcagtaccaccaaataccgcggtagattgaattttggtggcctgtttaggctaagttttcagatcttgttagatcagaaacttacaactatgatgaacagtagcccttaactatccttttttttatttggagagatttgtttccaggctattgctgttttattaaagctgcatgtcaaacatactccctccgtcccaagaaaaagggacacaactacaccgagagtgctagctggttagtgctaaagggagacaccattctttctaaaaaaaaaagctactagtacactcaatatctatgtatttttttcttcttagagaagattctcttaaattacttatccgatttataatccgatttcacctttgtgttcgtaacaattaaatctttacaacaagatctcacatgattatatttttatgaaaaatcacaaattacttttatgatatgtctaaattacttctagatttcactaagttacttcttagacatataaaagtaaattcagtaaagcttaaaagtaatttacatatattatagaagtaacttataacaaaaagaaaagtaactttaatttagaactatatctagattcattaacatctatataaatgtgggcaatactaaaatgacttacattatgaaacggggggagtaactctctgtagtagaaataattatattgtgagtaagctgaaataagaaactatgtagactgaattcgtaagtaaagtgtagagaagatttataaagtccacaaaatatagaattaactaaaaacaataataaaaattaacttagagcattctatagaagtaatttagtcaaatttgaaagtaacttatatatattataaaagtaacttagtatataataaaagtaatttacaactataaatattttttcattgtaatataatcatgtaagatcttattgtgaagatttaattgtaacgaacataatggtgtaattggattgtaaatcggataagtaatttgagagaaaactttataagaaggaagaaaaagacacacatatctaagaggaaaaacaacacgcacatcagcacgtgtagtagtaattcttctcacaatttgatcgtcgctggttaacactaaaccgagagacttctcggtttagattttaccaagaaaaagataaacccatgtttagatttatacccagggtttgttgttttttggaaggatgttcagatttatatttagagtttgttcttttttttaaggacgaagggagtagtctgcagctaatggtagaggtaaatttcatctagtaatgtatggtagaacgtattgggaatacttgaatttatccttcctatgcttacaaaaaaaatttggcatgactattggaaagggaaaacatttctaaaatatgccttttatcatacaaatatatttcaacaatgcaatcttcattggtcagcatttctggaacacaacatgaagaaaaggtacacatgccaaacaaatgaaagatttgctctattaaaaagacaatttgaattactaggaaaaactgataattcaaatttacgacttttgaacaccttcttattattaaatgttcatcgaacgatgaaaaaaaatacttcacgttgattttctatttaggggaaattttagagttgtgtttttctgctagggaatagatggttctccaagttagcccttatttgtcagactgcaggaaacgttcgatctgcagataagaaatacatgatcaaaactagaaaagattcaagtggcatgggaatatgtggaggaaatttatagaatatttgtgaggagatggaatatgaaggatttggatttanagctagagacagaatatgggattcttgaaccttgtttagaagggataaattgaaaaaatgtttaaattgaagaaaggcgagatttgaaaattgggatcatactaaaaggtatttttctataaattggtgagaataatagaaaggcttaaaattcataagttctactcaagaaatagaatgaaaaagcaacaatggtgcaatttgaaatatttaaattctaaggatgtaaccatactgattagataaggcatggggaagggacccgaaggaccgcttccaatccattgcatgattcttctcgaattcattggtgagcattccgggaatacaacatgttgaaaaaggtacacgtgccaaacaaacgacaggcttgtggcctgttcactttgatgccaaaaaaaccttaccaaaatttggcattaccaaaattttggcatagttgccaaaattttgccaacttaccaaaattttggcagaatttcttatatagttaccaaaatttagcagcaaactaaatgtagccacttttttttggcaactttaccaaaatttggtaaggttgaaaatggcatcaaagtgaacatgcccttggtttattaaaaagagacaatttaaattactagaaaaaaactgataattcaaatttatgtcttttgaacaccttcttattattaactgttcatcgaacgatggaaaaaaaggcttcacgttgattttctgtttaggggaaattttagagttgtgtttttctgctagggaatagatggttctccaagttagctcttatttgtcggactgcaggaatagttctgcaaataagaaacacatgatcaaaactagaaaagaagcacaaaatgaaaccagacatctaggaacaagcggttgaaccgttgaagattcaccaaatcgagaatatggcatctctaccaaatcgacaatatagcatctccaaggcttcgagatagtactagataataaatctgctttccaggtcgtgttgataacagatctgcttggttaacttcctaagtatctgtctatgttgctatgaacagaacacaatcatgtgccttgtgttctggcgaaaaagttactatcatg

SEQ ID NO: 26885 - DNA, 7098 bp, Oryza sativa
aggtaaaaggaatatttcttcaatttttttcatcagtacttatcattctaatctataattctgactgctcctttactattgactagtttctctgcatttatctgtttttcacgagcttgaaacttttataagcacttacatatctttggactgattacctgtagatgcctaaaatagttcagcctaggatgtctgaacaagttggaacaatagagtggtataatgggataaaaatgacaaaacactgtacatggtgaatgatcgaatttgcttcattgtgggaaatacagaaattaattataaaattattgcataccttcatgacgggcgtctagttctttccactcgaggctgcccagccgttgccgcaggcatgtagggagcacttttagagcagggcattccataattataagcccttggagggatgagtacgcttgcggtgaattgggtagtgatgatgatgccaggcttttgcagtaacagagcgtgagttttaccaacgatgggagctcgcccgagtgaggagactccagtgattcaggaggagagaagtggtccccagctggtgatgacggttccaacacaggagcagacacaatgttgtcactgcaaggcccttcaattaatgttgacccacgtctctgcttgccgaatatggacttaagctcagggcaacgtcgtatgtgcaaatacttgagagatggtggggtgttgaagacctctaccaaacttttacactcaattattgttagtgactccagacgtgttaggagttggcctccacctgatgttgaccgctcaggagcttgtgcgtatcccttcagtttgttgcagctcactatccctaatgtcttcaaggataccaagccctgaaattctttctccggccagtggatgagcacatcgcatctacaaattctcaaaactataagctgtgcaaaacatgtccatagtgcatgtgcaccagaaaggaagaacatgttgaagttatctaggcgcatatctgccagaggggattcacctttccaattctcattgtcgtccacccactcaatcaaattgtgttcagctggaggcgctgtttctacaccttcctgcagcaagctcagagtggacaatgaagtaatgtatcttggtatgcaaaagagcaactgttgggagcccttcgttatgtgtaaaacactaagctttcgtgcttcaggtagacttgccaactttggacaatccataatacgaatgttctcaaggttagggaacattggtgttttgacatgtgttgcttccacctgttgccatctgtcgattttatttaactcaatgagttggagctcctgtggaaaatttggcagcgcagttggtgtcttattgttgtcgttgtcacaactcggctgttcttgcctctcagttttgtcccaccatcccttgaaactcttcagattttctagtgtgagctctttcaattttggaaatattgaacatgtcgtgctgttctcaccaatgctacacaaatattgcaatctatcaaatccagccagtcgaagaagttggaggtactgcagctgccacaactgcggaatattttcgcaccttgtataactagtactgagatcaagctctataagaccttctaacatactaacccatgatggtaatgttgtacctttgtaggaggccaccttcagaaccaacagattatcatgaggtcgtagagcttccatcaccttgttatgactagaatctgctgtttcattgcgaggttcttcattgtcccatactaaagacaattccatgattttccttttgctgtcaagcttggtatgtattgcatctgactctcttacattctgtagctggggtagctctaggtgaccgccaatgtctaatttctgcagctctccaacattactgcatttaaagccagaacccactacaaaacaagtgagtgtctgtagggaagtgagttttctgaaatccggaggcatgtgcttcaaattcaaacaaccatgagtgtagaggtgacggagcgaagtcatgtacttcatttgtttaggaagtcgacggaggcaataacaatcagataggtttaacgtttgtaaactatatagaatgcttatttctccgggaagtgcttttatataagtttttgagagatccaggtaccttagatgatgtagaatctttggttttagttggatcaaccgcatctctttactcagtttcaatgctcgcacagagctatattttgccaaatgctgaaattgtctatcaacaagtacatcacatagaagtgtttggacagattgacacctcttcttcatataatcattcaacgtagtgtcaggctcattagatgacaaaagtatatggcggacagtacttggaaaaaactccttttgactaggattttcagttatgctaaaacattcgtttcccataacagatagcgcaacatcgtgcatcaaatcgtgtatcctacataaccttctataacaattcccatgtttgcttccatattcctgaaatgggacttgtttcatgtcttggaagaatgaccttgaggccaactcatggaaaatatagtttccaatggtttctagagggacattttttttcgtctgggataaagccattggccatccatacgtggattagattgtctacgtcaatcacataatctttgggaaacatagcacagaaagcaaagcattgtttcatgtatgagggcaagtcatcatagctgagcttgagtatatgtaaaattccagtctcctcattgcatatactgcttctcattaatatggcctgccattcttgcacagtttccttggtacgaagtagagagcctagtgctgttgcggctaatggagatccaacacatctgttgacaaacttatcaatcatttcaacttgctcattaggcttttcatcctttctcaaactaaatgctctcgtgtcaatgatttccttgataatgctgttctccagagcagtaaggttatatgcatcagttgtctgcattagttgagcaacttgttcatcacgagttgttgtcaatactgcactgccgatgctaccatgttgaagggaagcctttaacttttcccacttatcggcatctctgctccaaacgtcatccaatacaaggaggtacctttggccgctcactaatttttgaagcttctgcagtggcttgtccttggtcacttgactcacatgataatctatttggtgtttgccatcctcttttacttccttgctcctatcagctagtttaactatattttcagcaatagagtcaacatcaaaagggtcagatacgcatacccataccaacaactggaaatgcttctgaatttcactgtcgttgtaaactagttgcgctaatgttgtcttgcccagcccccctattccaactataggaagaaccaagagatccgggctgctagcttgaccaaggagaatattaacaattttcagtttttcttggcttcttgatttgctaataatgtttgttgggtcaaagatctcagaatcagtttgcctccactgcatggaaactaaaggctgaggttggaatctgaacctaaaggcattcatctccgtgacaaggacttcaatgtcatgcacaatcttgcaaagtcttttgtccatcctgtaccggaacatgacacggttgtgagtaggaaagagttttaccacatcgaagccgagcgcggtgtagtgcccattcttcttggcttctcgccaaagagcctcatacttgaactcgtcgaagatgtcatttgcttcgtaggccaccgtcttgagctcctcgagccaggctttcgctccttctctttgttctgacgcctgcttctcagcgtcggagatgacgtccaggatggccggcagcttgcgcttcaggatcttgtgctgctcttccaagccctccatcaccctgtactcctgtaggaggtagctggagaccttatccttcaccatggacagcagtggcttgaccacgatgctggtcaccacctccgccatttttgcacgctcgcagccagaggtacgcacaagcagaaggatgaggagagcaaccacacttcgaattgcacagcatcaattcgacgactctcctctccttttatctttcttctttcctcaagcatcctacagagtgtctccaattaattaatatttgctgccatctttgctgtgagagaataacttttttggggattgatccttctaacaaggcggccctgtttctttatttttatttttttgaaacagaggtggctctggaatcttgacgacattatgaacattaggtatactataaagttttttttctctcatttaaacaaatcaagaagacagtgctactttgtagaattgcgaagaagctacatcatagtatttatgatatggtttaggtatatatgcaaagtgatccctagcttgattctttttcttagttgggcaagagtaaaccatggatcaacttctcggccaggttactgctggcctgccgctcgatcgagatcgttaccgctgcctgcgccggtggacgagtctcccctgcacaccacatccggccagaaggacagaggcggagctaataaggattcaagggctggcaatgcaacttgcgtggggggttgtatatggatggtgtttgctccgtgttattcagtgatgagattatttggcaattggcacttggacaggccagctctgctacgtttagtctactcccttcgtcccaaaaaaaaaactaacctagataaggatggaacactttatagtacaacaaaagtgtacctaggttggtttttttgagatggaaggaatagctgctatgtcggttttgacctgtcgggaggaatatctgtcttctccgaccttctacatgattctggccgatcctggatcgacaatccgacggtatatatggatggtaggaatgcttcaactgcagaggtttaggcgctagtcgtctgtggagtcgattcaaattcgaacctagcccccacgtcattctctgtaggtagctgacagttgagaaaaataataaaaggatttcgaaattagcacgtgaattgggaaaacttaaaaacctacctacagaaaattttagctccaagttgagtgaaccaaattttcctagaaaatttcaggtttacaattggaccgtgctgtgtttgaataaatagtagaactttcattttcagcatattgacacttgtaaattgcatatctttccaaacaactataaaattagtaaaaatttcttcataaacaatatactattcaatgtgtaacatctcatgaattttaaagcatttcccatttccatgtttctttggtattaatttttagctttttttccccttgtagatagatatccaccccctcaaagaattttgacaaagaacctgtgataagtctgaatacaaacataaagcatctatgtatatcgaacctatattgaactgagtgcttagccgtgctaaagtatagtaaagttcaaagcaaatgcttagccatgctaaagtataggaaaggccaagaaaatggataaagccattagacgtacctttcacttgtgagcaattgaatattatacgaagactaatcatgtacctaaaactttggattaaatctagaaagtactccctccatcccaaaatgtttgacgccgttgacttttttaaaaataaaatgtttaacgccgttgacttttttaaaaatatttaaccattcgtcttattaaattttttaagtaattattaattcttttcctatcatctgatttattgttaaatatacttttatgtatacatatagttttacacatttcagaaaaaaaatttgaataagacgaacggtcaaacatatttaaaaaagtcaacagcgtcaaacatttagaaaaagagggagtagtaaatagtgttcatcggggccaaccggccaacttgtcggtttctgttttctttttctttcttttctctccgccttcctcctcctgatcccctctctctttcttgctgcaggccgtggctagggttggggattccaatggctgtgatggccgtggccagtgcggattgggaaggaggctgcgcacgattgcggcgaagtatatataccccacagtggaagggcttattgtgccagcggcaaggtcggtagctgagagtgggcatggcggatgggtggtgggctggtggcttccgtgtagagtagttaagattaaattgatgtcatgggaagctctagcctctaggtggatgatgatgacaactcatttttgtggttggttgtttggttgtgacggaggaggccggcccagagggttggtagctgacggagcgtggggctcctcaccgggagaccgcgcaggcccccctttgccggttcggccgggggcgctaagtgaggttcttcgccctcgatctgaggaacgtcagcgagagaagaagcgcacaagacgcgggcgacgtagacaggttcgggccgctgagaagcgtaacaccctactcctgtgttcttgtggatctgtgtgtgaaggaatacagagagccagagagcgagagagagttcaggctcccgaacccattcgccccttcttttctttttatctggttaggggtcaccacatgggcctctcgctgcctaagaaaggaaacatgctttttacaatgagggctaatctacagccggaagtgacctctgacaagcagagcatacgcctcctgccccgctcgccagctttcccggtggacgcccatttcaaccttcattcaatggccagcgacttccttgccatgcttgtgctgaagcctggaatggatctgaccgggactgacataccaactccaggagttagcacgccggctccggctagggacgagagccaggaagctctcatcattccgacgggacggggcgaggcgtgtgacaggccgcctgttgccacctaacccgcgatctgaccggtctgtgaccggtcacacaccgcgactggtcacggaccggataagcgtgcgctgcgctgcattaaatgcggcgtggcgcgctcgtccaacctgctataaatgcggttaggtg

SEQ ID NO: 26886 - DNA, 17205 bp, Oryza sativa
taacccacacatgtggcgccaaaaccacagggggttggggcgccccaaccctcggggccgaaacgggagcggcccgacccctcggggagacagagggaggggtggccacgtcaccctcgggcccgaccccccccgagggggtcaggccacgtgggtgaccgcggctacccaagcctctagtcacgatacccccggccccatgtcaccgacagcagccatggcgccggacagaaaaactcaaccgagaagggatgatgatgtggttgtttacacccaaatttggcacctagaattaaaataggaaatattgccgaaatttggaagtctaccggtttcctccgaagtgggccggtctgaccgccgtgtgttgggcggtcagaccggcggtgtgtggccggtatgaccggcaggtctgagtccgactctgtttcatcgggtctcaaagtttccttgctcggaaaggcatgtttcgggtttcctttggtttctaccccgagttggacgtggaggagggcctatagagggcaagaccaacccctatataagggacatggccggttcattgtaaaaaatcaatctacaatcaatcaatcgaatcgtttttcatattgcttttagttttctcttagtttgtccatctttgtcggtttgcgccgtaaaccgtccgccgccgctgcgagagtgcgacatctctttgtaggtttgtcatgaaaacctttcgttttgcccacgagatgggtagctatctagaaatcggctccactagccggtttagttatcaaaacccatctaggtttagctctttgctagatcgaggtggttggcgactctaggatcaccgcaaggcttaaggtgctgcgatcgtgcttgtcaacttgtcaaaaaagttgccaacacgatttttggcgactccgctggggaggagatccgttcatcgtcaactcaacttcgacttcgccatgacgaagccgccatccaagacggaggtggagccatctaatgtgatgccggtcacattggatgacttcgaaggagaagatcgcaaagctatggaggagtacatcaatgagctcacacgggaggcgttgatgagagcaactactaggactcgtcaaggcgtgatcatcaagcccgggccacgtcccaagctcgctcccgacgtggtaagtaatgacgaggtatcacaatctatccaacaacaaattgcatctacaatagattcatctatggctaattttaaagatagatttgatgtaatgtttaaggataaagttgatgggtttttaaggagtaggctcggttcttttatggatgattacacattaaaggataaagcctataccactgttgatcaacctcctatagatacaatgggtagtaaaaccgatggaacggcattcacggtcggtccgaccgggcctgacagccagtcagaccgcgacatagccgtcggttcgaccggccagacggccggtcagaccgggtattaccccagcggtcagaccggctttcaggctggtccgaccgcacatcatgacgccggtcagaccgggccttgggccggtcagaccggcgcaattgtcccaatacagggtatagatccaatgactaatgctaattatttgtaccactttagaacatttgatcctcctgtatctactgctacaagtaatcctcatgttcccccacatattcctaatgcttataatgatgcttctaggggatatcctcgcgatactagacaaggccaatataatcatattgcgccacaaacacatcctattaggccaccaaacccactgccaaatccataagagcctaataacatggaggatatgattagtgatattatgagtaatagattcgggattgaaactaggaatcgtgctagagcttacaaaaagccatatcctgattattatgataatgtgccgtttcctcgaaattatagagttcccgaatttgctaagtttagtggtgaggatggtaagaccacatgggagcatgtaggtcaatttttggcgcaatgtggtgaggctaatagtgatacttttaaattgcgcttgttttctttatctttatccggtaatgcttttacatggtttacttctttaccggcaaattctattcatacttgggctcaattagaagaacaatttcatgattatttctatactggggaaactgagcttaggttatgtgatttgacatcggttaagcaaaagtataatgaatctgtcattgattatattaagagatttagagatgttagaaaccaatgttatactttgaatataactaatagagatttggccggtcttgcttttaatggtttagttgctcctcttagagaaaaactagatggccaacaattttttgatgttagtcaactcatgcaaagggctctggctcaagaaagccgggttaaagataataaaaaatttgctagaccatttgacaaaaggcctaatgttaatgtagttgattatcctgaggctagtgataatgaggaggagggtgatcatgatatttatgttgtcgaatggtcgtggactaataaaaataagccttttgtttgctctaacttaatgccgactcctcgcaaagatcggcaaagtgaagttaagtatagttttgatgtggccaagtgtgataagatttttgattaccttttgcaagaaaaacaaattagattacctaaaggccatgtcataccattgcaagaagagttgaagcgtcgagcatattgtaaatggcatgattctcattctcactctactaatgattgcaatgtgtttcgacgacaggttcaattggccatagatgaaggacgattgaagttcaccgatggttccaagatgaagcttgatcatgatccttttccggtgaatacaattaatttcaatgataagaaggtgttgattcggccggagcaagccgaatctactaaggggaaggaagtggtcattggggaaccaaggtccaagatggtagtgccaaagaaggcggaggttggcgtttggaaggagaataagagtggagcttcaacttctaaggctcctaggaagaccaaactgacctttaatatgcttttggagaaatatgagaggcaaggtggtgagaaaattcgcaacaaagggaagagaccaagatcacctcctagggaacgatttggtcattcaccaagacggtcgcattcaccttcatatcatcatccacaagatatgtcatggggtccctattcgatgccgccgccgggttattcttatccctacttcatgccatggggggcaacgccgccaatgtaccatcatatgcctccaatgcaattcaaccaagggtggggaggaccaaggaggccaattcatgagtgattgtcttctccaaacaatagccggttctatggtaagaatcgggttaatgaagaaaagagggaaggaaaacgcgtcaaggtggaagagaggacttcggaagtaattactatcaaagtggggtcccatgatgtgcctataccttctggagatggagttggaaagtccccaagcaaaaaatccgaagccggtaccagctcctcgcagacgaccggtctgaccaggccctctggccagtctgaccgcggccatgttgccggtctgaccgggccataaggccggtctgatcgtcgacccgatagtggtccgaccgacgcctcaggccggtctgaccgtgtgccacacatcggtctgaccggcgcgtctggccggtctgaccgggctccagcgccggtttgatgagaggattgtaaagggcgatgtgagggcttcatcgtcttcaagcaaagtcaatagaggacattatttacctcctggaacagagccgaatcctaggtggatgcctgaggatttgacggctactcaaaagagaaggttgcaacgtcttcgggcccaagaactaagggagaaaaaggccgaagagcaaagggataaaaggttcaatgagttgctaccaccaccaatatggaggcctaaatccatagagaaggcaaaaccgattgatgtagaggagaaggaagaacaatcggttgataaaagtgaatcatctccaaagaaagacatggatatcaatatggtatgtatgttgcctatggagttttgtgctatggatgaagccgaagttgctcaattctcattaggtcctaaagatgcggtttttgagaagcccgatgaatcaaaccgtcacatgaagcctctctacctcaaaggctatgttgatgggaagccggtctctaggatgctagtggatggaggtgccgctgtgaatttgatgccgtactcgttattcaagaagttggggtgcgaggatgatgagttgaagaagactaacatgattctcaatggcttcaacggtgaaccaacggaggcgaggggtatcttttcggccgagctcaccgtgggaaacaagacgctaccaaccgctttcttcatcgtcgatgtgcaaggtaactacaatgttattttgggccgttgttggattcatgccaattgttgtgtgccttctaccttgcatcaatgtttaattcaatgggacggtgatgatgttgaaattgttcaagcggatacattggccgaggttgcaatggccgatgctacttttgagtggcgtcatgggaatatccaatgcttatcggggagggatctttctagctatgattttattagtatctccgatggcaaatttgtacctatctctgtaaggccggctagtgtagcacggctaagccatataaatttgtatagtgagtaaagaggataatttagagtggttacaaaaaagggtgcaagaatatcggtctacaaagaacgatattggagaaactgttgaagattttgatgaagtggagaagcttggacaagggtttacatcggccgatccattggaagaagtagacataggtgatggaactaaaccaaggctgacttttgtagacaaaaacatgagagccgattataaggttaagataatcgagctacttaaagagtatgttgattgctttgcatggaagtaccatgagatgccgggtcttagccgtgagcttgttgagcatcggcttccaattaaactgggttttaggccttagaaacaaccgcctcgtcgttttaatcctttactatatgaccgagtcaaagaagaaattgatcggttgttgaagacggggtttattaggccatgtcattatgcggagtgggtttccagcataatcccggtgagaagaaggggagtggtaagattagagtttgcatagattttagagatttaaataaagctactcccaaagatgaatatcctatgcctatagccgacatgatgattaatgatgcctcgggtcataaggtgattagctttttagatggtaatgccggctataatcaaatctttatggcggaagaggatatgtacaagacggcttttaggtggccgggatttgttggtttatttgagtgggttgtcatgacttttgggttgaagaatgccggtgcgacatatcaaagggcaatgaatttgatcttccatgatttgctaggtattatcttagagatctatattgatgatattgttgtcaaatcggatggtatggaaggacacatagccgatttgaggttagcgtttgagaggatgcgccggtatggtttgaagatgaacccacttaaatgtgcttttggtgtgtcagcggggaagttcttaggattcatggtgcatgagagaggagttgagattgatcctaagaagatagaaaagattcgtgatttcaaagctccgacatgcaagaaggaggttcaaaagttgctaggtaaactgaattatttgaggaggtttatttctaacctagcgggtaaaatcgatgcttttgttcctatacttcgcttgaaaaaagaagccgattttacttggggggcaaaacaacaagaggcattcgaagagttgaagagatatttgtctactccacccgttgtgcgagcgcctaaagccggaatgccttttcggttatatattgcctccgaagacaaagtcattggtgccgttttgatgcaagaggaagatggcaaggaatatatcattacatatttgagccgccgtcttttggatgctgaaacgaggtatgtctttatagaaaagctttgtttatgcttatactatgcttataccaaattgaggcattatttgttatctagtacatgcatagttacttgtcaagccgatgttattaaacacatgttgcaaaggccaattctaagtgggagaattggcaagtgggcatatgctttgatagaatatgatttggcttatgaaccattgaaatctataaaaggccaaattgtttgtgattttatagtagaccatcatatagatattgcttatgagggagaggtttgcttagttgaagttataccttggaagatttattttgatggttcttcttgcaaagaaggtcaaggcataggggtagttttgttttcacctaatggcatgtgttatgaggcatcggttcatttggaatattattgcacaaataatcaagccgaatacaatgctttattgttcggcttacaagttaaatatgtggaagctaaatatgtggaagcctttggtaattcggaattggtggtgcaacaagtcgtcggaatctacaaatgcttggacggatcactaaataggtatctcgattcatgtttagatattactgccaattttgataattttgctattagacatattgctaggcgtgataattctagagcaaatgacttggcacaacaagcatctggttataatgtgaaaaaggggttatttctgatattagaagagccagtgcttgattttaaatcttcgtgcgaaattggcaaaactggagaccaggggcggtctgaccggcgttgcatggccggtctgaccggtgaccaggggcggtctgaccggctgtatgctgccggtctgaccggcgaccccgagcggtctgaccggccctgcgtggccggtctgactggttttgggcagagcgctgggggcacgcttcaatcaatttggaagccgaattaattaagaattcagacatttgtgcccaggatgcagaagaggattggagaattcctttgattcaatatctgaaggatcccacgcttaaggttgatcggaaaattcggcggcaagcattcaaatataaattgcttgatggagatttgtatcgccgaaacagagatggtgtcttgttaaagtgcttagatgaagatcaatctaaagtggctatgagagaggtgcatgaaggaatttgtggaactcatcaatcggcccacaagatgaattggttgcttaggagagcggggttctattggctgaagatgattgatgattgcttcaaatattatagaggatgcgaggcttgtcaatggttcggcaatgttcaattggcgcccgccgccgtattgaaccctataatcaaaccatggccgttccgaggatgggctttggatttcattggtcaaatttatccttcgtcatcaaaggggcataggttcgtgttagttgctacggattacttcaccaagtgggccgaagccgtacctttgaagaatatgactcatacggaggtaattgactttattttgaagcaaattattcatagatttggtattccgcaaacattaactatggaccaaggtgcttcttttatgtctaaggaagtgaagagttttatcgaatcttatggcattaaattgttgagttcttctccttactacgctcaggctaatggacaagccgagtcgagtaataagacattgttaatgctagtgaaaaagaagattgaggaacacccgaagaggtggcatgaggtgttttctgaagcattgtgggcgcataggatatctaaacatggtgccactaaagtcactccttttgagttggtttatggtcaagaagccgttttaccggtggaggtaaatcttggttctcttcgttatatcaagcaagatgatttgtcaagtgaagattacaagatgttgatgggagacaaccttgatgaagtcatcgacaagcgcttgaaggcattggaagatatagagaaagagaagaagagggtggccaaggcgtataacaagagggtgaaagcgaaattgtttcaagttggagacttggtttggaagacaattttgcctttgggtactcgatccaaggagttcggtaagtggtctcctagttgggagggtccttatcgagtgtgcggcattgttcgagggaacgcatactttttagagacactacaaggggagcgttttcagcgagcaatcaacgggaaatacttgaagaaatacttctgagcgtttggcaagacgcttaggaggtactatggcctgtaattgggttatcgtcctaagaccaaaaacatgttctatgcttttagattcacgttgttcatcaaaaaggcaggggggcatgtgtttagacccaaatttggcagttaggattaaaataggaaatattgccgaaatttgaaagtccaccggtttcctctgaagtgggccggtctgaccgctgtgtgttgggcggtcagaccaccggttgagggccggtcagaccggcggtgtgtggccggtctgacggcaggtccgagtcctactctgtttcgtcgggtctcgaagtttccttgctcgggaaggcatgtttcgggtttcctttggtttctaccccgagttggacgtggaggagggcctgtagagggcaagaccaattcctatataagggacatggtcggttcattgtaaaaaatcaatctacaatcaatcgaatcgtttttcatattgcttttagttttctcttagtttgtccatctttgtcggtttgcgccgtaaaccgtccgccgctgctgcgagagtacgacatctctttgtaggtttgtcctgaaaaccttccgttttgcccacgagacgggtagctatctagaaatcggctccgctagccggtttagttatcaaaacccatctaggtttagctctttgctagatcgaggtggttggcgactctaggatcaccgcaaggcttaaggtgctgcgatcgtgcttgtcaacttgtcaaaaaagttgccaaaagtggtttgagattttgaaattgataggtggtatagcttctaggatgtactacgatgttaccaacaaaaaggctcactggacggagaaatgcgcttgcgcgaggaaaaacatagcagcgcgcgcacttggtgtcgaactccgagaagacttgaaaagcttttagtatggcataatgatgccgaagtatcgcgttccagttccacccgaagatgatgaaggatttggcttgaattggtggatggtggtggagtgtatgcacacatagtgctcgatcactgtcccgtgcgaggccgtgcgcatcggcgcgtggacatctacgcttcggttgaccatggggcaacttaccaccatggtttgggccgaggtggactgatttagggtgcgtttggttagacttttcaacctgtttttttgcttttgcaaaacccaaaagctaactaaagggtctaaaagccacagctacttttatccaaagtcaacttttggtgtagtacaaatcaaaagcaactctacccccttattttcacttgcttttgggaaaaaaaattactcatccctaccattacgaaaaaaatggttcgctattcttttcccgtctcctcctccttgcgagtcgcacacggggagagggtttccgccgccgctgcccacggccggcgccggcgcccgtccggccccgcccagcgccgcccccgcccttccccaaccgttcggcctccgccggcgctgtcaaggccgactccatctccgctgccacgcgtctgcctccgccgtcgccgcggccgccgcacgcgcgtctgcctctgccaccactgccgaggccgactccatctccgctgatcctcttgccgaggcgcttgtcgacgtcgacaacgcggcgtcgcggcgcgcgctcgagaaggccgggttccagcaggaggccgtgctgtgcaactactgtgtcgtcaagggccagctcagggacatggtcatctacagcttcatctccactgatcctctcgtcgagtgatcaatggctaatcatgttgctgtgagattttttctatgtattgtgaatgtatgtatgataaaaaaaatattttgccaagaaaccaaattcagattactgcatgcaaaccagcaagaatttcagccacaaagtacagcaaatcctgcagtgccattctgcaagatgataaattcaggcaattcatcactacccagcagactactaatgtttcttccccaactaatctctgagaaaggtacactcatcgactcatcgtggggttggttatcgaatctatcttctccaatcccgattgatagattgaccaaagcgaaaaccgaaagaagttcagtgcatgaagtacaacaggaagatgatcagatgactgacgagatcatgcttcccatcctctgagaacggtggcgcgggccacacggttgacgccgagggtgaaggcgcccatgcggaggtcgcagtggtggctcctgcacatctccttctcatccctgaacccgcgggtcatgtaggtctgcccctgtcgccgccgccgcggcgcatgtctgcctccgccaccgccgctgaggccaactccatctccgctgccgcgcgacttctttttttttcaacgccatcgttcggtcgtacatcggcgggcatgggaggtggccgtgctggagctccggcgacggcgagcgcgcgtgcacggcagcctcagcctcgccgcccgcgtatgcctctgcctctgcctcggcctccgccgccgccaaggccgactccatctcttcttctttttttttccagagtgtatgacatgtgggacccgcttgtaagcaagactaatttttcaaaagccatagttgttgaaccatacgagcttttccaaaagtcacagcccatatttcacagcttcttttcaaaaagcaacgacccatggctactttttcaaaatccacagctcaaccaaacacaccattaggttgatgtcgggctttgcgggaagaaatttggctgggctgaggttttgcgccggcaagaatgggcttgacattctgtctagcaattggtggacatgaacagtatggttctgtattttcaggaagtttcagagaataaaatgaataatttggaggggcttggatgcaaagactttggtagaacttttttggactaaagcaagaatttgaaattcacacaagagttgaatttgagagggattgagagtttgggtcaaattaaaaaggaataagttcatctgaggtctcttaacttgtcaacgaattcaatttttttccttcaaccagaaaaccagatataacgggtccctcaactgtcaaaactggtgcaatataggtcccatgacggtttggacgacggttttagctgacatggcgcctacgtggctaaattgactcggtcttcatctgacgtggcagtgatgtaccctgttggtatttcttacgaccacagataaatccgcaagcgcacagaataccactgtagcactttaccttcgggtgaccccaaagggatatattgaactcagggaacgtttgtaatctacctaaggctaaaaaatctacctaaggctaagactatccaaggacaataactgatggtaggctagctaggctagagaggactttctatgtgttttagttatctaagctaagtaaaggaaatttcctatctgttgcattgggcaccaacccctgctggtatgccagcgtggttcctgctatagctttatgatgtacccgaacgtggaggattactacgacgggatttagggttgtcaccacttgccatctacctctaacaaatccgtgggatacacaacaaacaaaggtaatttctaacttagacaccacgcctaagttattaattactaatccctccgtttcctattataagactttctagcattgcccatattcatatacatgttaatgaatctagacatatatatgtgtttagattcattaacatctatatgaatgtgggcaatgctagaaagtcttataatatgaaacggaggaagtactctaatacttgcgcaggaacttccttctttacccagagtcctagtactagaccccttagtacgaatactaaataatgaacccgcaaagatggaaatatatcttacttagtctaagtaattaaataacataagaaatgatcttgaatccatactttatagaagaagtttctccgaacccggaacagagtgtaccgacagctccggtactcctcgaaagctacactcgtcgaggtagaagtcggagagagcgccaaacttccaggcacttctcaagagcttcctctcactctctacctattttctaatgtacaaagatacaatagaggctcttgtaattcagctcaaagttgtgtattgtgaagtgaagtgagctcctccttttatagcctccatatgacggttacagctatcggaattgtccaaaacacccttcaaccgtcattgggaagaaatcaggaatgtacacatggaagatggtgatcaatgaccttagaacggattcggccgaacccagaaaccctcctcccggcatctccttcggccgggaggtcgcttaatgggcccccaacatcatgtactatgatttggcccaattctaagtggttttgattgacatatgggccctccaatccatgtaaacacatcttggttgtctggaggtgtattttgtcgtatgacgggtgtgttttctctttaaaatacctgcatacacatatttcaccaacactagtgaaaatgattagtaataaaccctaccactaagttggataccatattttatttcattatatgcaggcgttgatggtcagatattatggtttaagaaccgtcaacatggtattgacgtggcaatttgcttgagaaaataacaaaaactgtggtcctacatgtcatttacacccaaaaaataattaaaaagtggggcccacgtgggccccacatgtcattctcaccctcttattccccttcttcctcctctctccccatctcccctctcttcatctctctccaggagagatggggagggcgggagatagcggcgcgctacagccggcgggagaagggagaggagggagtggtgcgtggcggacgacgagagactagagaggagggagcggcgtgcggcggccggccaacatggtcaccatgcacgccggacgacatggtgtagttgtcgctcccgatgcctcaaagggagaggagcacttcaccgttgacaccgagcatggcaacgacgaagcagaggatgagcacgatgagcggcaagaggattggtggcatcctccttgttctcatctctagcagcattgctggcatcctccttgttttcgttgccaatctgctaccactcatcgtggacgatcacaaaccgtggcggcgcgaagacggatgagacgggaagtggaagaggaggtgtgtgtcctcctccttctcgaacccatcgttgtcatcgtcttcggcggcgtaggcggcagggaagcaggagctgtagttgccgctcgcaccgctctgaaccaccctccgccgcctagagcggtcgccgccgctccgcccgccacccgccttgccactccgagcttctccctccaccgccgaaaaggagaaagggagagaggagcagagatgtggccgccactcgccccgctccgctccgcactcttctctccaccgcctggagcggtcaccgccgctctgaccaccgctcgcctcgcagctccgtgctccgccctccgccgcccatgtgccgaaaaggggaaagggagaaaggagtggagctgcggccgccgctcacccggctccactcccctcgctgctcgcctcgctctggcagctgggtgctccggccttcttgcaggttgaaggggagatagagaggatagagagagacaaggggagtagtgaggatgacatgtgaggccacatgagccccaccattttttattattttgtgtgtatttgacatgtgggtcccacggatattattattttttcggatctaattgccatttaggcaccacgtcaatgccacgttggacgaagacttagtccgtgtagaagccacgtcagccaaaaccggtatcaatactgctgagggacctcgtttgtatggttctgtaagttgggggattcgttgtatccggttttctggactgaggacgaaaatcaaactggacgataaattgagggacctagagtgaacttgttccaattaaaaaagttgaagctaagctttggtactgaagtggaaggaataagtagatgaattgcataattgatggcctttcataatagcattgcataatttatggcctttcatatttaaaagttacatttttcatattaaatttacattttaatactcatgttgactaggtctttttagaaaaatatcatatgggtgccccatatcatagacagatgttatgcaatagatgtatattttctttgtctttattgacttacatgcaaatatgtaacaagttatatgcatttgaattagaggtaaggatagcttgatacacatacaatatattcattaataattttttagtatttcataagaaaagagcgagacaatgaacattcaattaaaaagaatggaaaaacatcttacttttaatttgaaattaacttgtcaggcatgtttttaacaaactaatacacatgcccgcgtgtcgtgtgggctaccttcctagtttatacaatatttgtgaggatatggaatatcaacggtttgggatttaaagctaagagatagaatatggcattcttggacattgtatagaaaggataaattgaagaaaatgaaagatttgaaaattggcattagactaaaagagaattttctataaattcttgagaataataaaaaaactaaacaatttcataaattcaactcaagaagtagaaataaaaaagcggcatgatgcaatttgaaatatttaaattttgaggacgttacactacttattagataaggcatggggaaagaacccggaggacagcttccaatcaaccgatggcttcttgcaggataactacaccaacacaggcaccaaaagtaggcaattgatcatcaccaagcggcactaatggcttcacctcattaatctggtcagtaccaccaaataccgcgatagattgtattttggtgacctgtttaggcttagatttcatatcttgttaaatcagaatcttacaactatgatgaacagtacccattaactatctttttttctggagagatatttgtttccaggctattgcagctttattaacgctacatgtcaagcatagtcggcagctaatgtaagaggtaaattttgtctagtaatggctggtagaacatattcggaatacttgaatttgtccttcctaggcttacaaaaaaattggcatgaatattggaaagggtaaacatttctgaaatatgccttttatcatacaaatatactttcaacaatgcaatcttcattggtcagcatttctggaacacaatatgatgaaaaggtacacatgtcaaacaaacgaaagttttcctctattaaaaaagacaatttaaattactaggaaaatctgataattcaaatttacatcttttgaacaccttatttatcaaatgctcatcaaacgatgaaaaaaatgcttcatgttgattttctatttaggggaaattttagagttgtgtttttctggtaggaaatagatggttctccaagttagctcttatttgtccgactgcaggaaacgttctgcaaataagaaacacatgatcaaaaccagaaaagactcaagtcactggtggagaaaccctttgtagttccggttcgtaacccccctttagtcccggtttccaaaccgggagtaccaatccgggactaaagatcgctatctttagtcccgggtgaaataaccgggagtaaagatcgatctttagtcccggttggtaacaccaaccgggactaaagatcgagctgaccttttttttttttgcatggccctgttgctgcatggtttatatatatatatatatatatatatatatatatatatatatatatatatatatatatatatatacatatatatatgtatatatatatatatatatatatatatatatacatatatatatgtatatatatatatattatattatattatatgtatatacatgcataatatatatgtatttatacatatatatgttatgcaaatgcatatgtatatagatatatatatgaccaaaatatatttacattatagaaaatgtttacacatgcatatagaaacatatgtagtcatgtattaattacaatccattatatgtcctagctagctacgatttcgacgtagcagtagtcgctgctagctcagaagataaggaccggtgaattgtgtttccgtcgtagtagaattcacccttgggatcaaggatttcttcattgatgaatcccatgagttgttcttgaaccgctgcgataaattccttgtgtgtggtcaggttatccctcatgcgaataaactatatgaatgtatgaaattgattagtaattaaacaagaaatcgctacgtaatgaaattttgaatttatttgtacgtacatcgagctctcttgtggtgatgatttggtctgcaaggcagtggcaatactcgcacacgtaatagccgcacaagttagttccctgcttttgctttgcgcactacaaataaatgacaaacaacgagagatctaattaatatacacttgtatgtatttgaatcggagaaatataaatgtagagcatgtgtactcacaggaaatttgaacttccgcctaagtctttctctccatttgccgcggaccaaatgacggaaccgataccaagccctacatggagtttaaagctatgattcgtagtagcaattaacgtaacaagattttcttaattaacaaaggaacttatgacggtacctgtagacccccgtttttataacaggaatcactcgtgtaaactataccatttccctggatcaagtagtctggtacacacgaattcataactggaataccaatg

SEQ ID NO: 26887 - DNA, 1419 bp, Oryza sativa
tgtcactaaccctattttttgccttccattgcaacaactccagagtggtatccaactttttgtgcccctgctcgcaacctgggtacaacgaagttctgtggtcctccaacatcttgtccaatttatgggcctccttttcactttcgcagtcctccctggcgtcctgcaacatctgaccaagatcatccgcaacgtcgttaccaccagcagctatttcctcctcgcccgtttgatttccttcaaatccaacatactgagcaaagtccggaatattgtcgtcttccacttcatcttcttccatttcaacaccatgctctccgtgggatgtccaacaattatagcttggcatgaaccctgactcaaacaagtggaaatgaatagtcctggatgcagaatactccttctgattcttacacttattgcatggacaacaaataaaacccctttgcctgttagcttcggccactctcaaaaaatagtgcacgccgtcaataaactctttggaccgctggtcagcatacatccattgccgatccatctacatgagtcaaaaaaaaccgtacacaaataattattcttacaataatgacagtcatacaataattataagatatctttattcatacaaaaatcataaaatattacaccaaataattcttaaaaactatttgtaaagttttaaactaattttaatgtgttttacttcttttaattttcattttagtttgttttctattatttaagattaactttcactagagttttccttctcaactattttataaaaccttgtttagcaaatgaactaaatttctatatattctttcttccccacacacattttctctctcatcaacttacaactaaattttggagacaaaaaaagtgtgaaaaacataggtgcaaatgtagtatgacaaaaaaaaacattggaggatgaagttgcaaaccttttaggcacctccgatttgtatgtaatcaccaaaataaattcaatagaaattttggcatgacctcccctcttttttgaagaaattttgaagcttgctcgggcagctggaggaggaagaagacatatatataggggtgggactttagtcccggttggtagccccaaccggggctaaagatcaccgggatctttagccattaccaaccgggactaaagttaccaaccgggactaaagatcccgggggggcttgacaggccctgacagcattcgaaccgggactaaagatgatctttagtcccggttggtaacacaaaccgggactaaagatcaaatatgcccgttacccttttgaaccgggactaaagatcatctttagccccggtttttattgcatccgggactattgtggaaatcggccgaccgacgaaagatggtttctccaccagtgagtggcacaaaatgaaac

SEQ ID NO: 26888 - DNA, 1047 bp, Oryza sativa
agttggcaactctacctgaagcaccaaagctgagagtattagtatttcccgaagataaatcattgatgtggttatccatagcaagatatatggcaacactgtccgatgtcagattaacaattgcagcttcttcctcacaagtacaatgtgcaatacaacaggtcagtggtacagaagaatttagtcataaaacttctaatgcaactatggaactacggggatgttacttcttctgtatggattgggaatgttttgtgaacctgcaagatttagtaatcaactgctgcaacgaactcgtctattggccactgaaacagctccaatgcttggtatccttgaaaagattaacagtttattcttgcaataatctgactaaatctggtgatgttctagaagcgccattagaaaaaaatcagctactcccatgcttggagtatatagaaataaaagattgtcccaaattggttgaggttctcatccttccttcatctctaagggaaatatatattgagagatgtggtaagctcgagttcatatggggtcaaaaggacactgaaaataagagttggtatgctgaaaacaaagatgatttgaggtcagaatcttatagcatcctagtatcctctgcagatgcacctttggcaacaaatacacatttaccttgtatggagtctctaacagtgataagttgtcaaagcttagtagtgcttctcaattttcccctatatctgaaggaaatacacatttggagttgccctgagcttagatctataaggggaaagcaggatataaaagtcgaaagtaaatatgttgagcgtaataacggcatggctatatcagaatctagcagtgatctcagtgcatctataactatagaagatcaaggaacatggagaagcaaatatctcctgccatgcttagaatacctaagaatagcatattgtgtaagcttggtagaggttcttgctcttccttcatccatgagaactataattatttcagagtgtcctaagcttgaagtcctgtcagggaagcttgataaacttg

SEQ ID NO: 26889 - DNA, 7469 bp, Oryza sativa
  unsure (1)..(7469): unsure at all n locations
aaaaagcttatttaaccgcttcagtttagttttggttaacatttgatacattgagatgcttaaacaatttttatgcataaagcagtagaattgattaatgaatttttgaaaatttgtttgtgcaagataagcatgtggctatggaattgctgcccataagagaagttcacaggacagcagcgcaataatggtacgattgataattgcactcgtgctgtatgaattttgcacagttttgcttaatgggagtgtcccattcttaaagcttactaaagtcttgtttggcacaactatcgaaggtttttaggagctaggtatttctaagtccacaaattcattaatctgtatctgcgattatgttgacaatatttggatgaatcattttgttcctattttaaataaaactagcatggtggcccgcacggattgcgcgcatcattatattttctctcttataatagcatacatattttctcaatttattattaaatatattaaaatgacaacataattttaaattttgtactaactttaccaaactaccgacgtgtaatattcatacagtattgtatatatgtgatagttattgattatttttaatatcaaattttagttatttctaaattgtattcctatatggactctaggtttttcttcctatttttttaatttcgaattttagttatttgtaaattgtatttctatatggactttaaactgtacttttaatttattatttttatttcaaattttagttaattctaaattcctaatattccttttttaatatatactcttcttttaatattccttttttaattttgaatttctattatttcttagttgtatttctatatagactctgtactcttcttcttaaattcctgtatggactctatactcttcttctaatatttcctttttcaattctgaatttctattatttcttaattgtatttctatatggattctaacataattttatttttctttttttaaaattctgaatttttattgattctaaattgtataccggcatggactctagtctccttttccaatattccttttttcgccgggacaacgaagaatgccgaccgatgtatatcccccctgcaggagggggacaaatgcagtgcgtcaaagcatcgccttcacaaccttaagcnangnnacaaaggctataatgtccctaaagttggcgctgcggcaacacttaacgagctaactagccctgctatttccatgtttcccattcatcacacatgatcacacacagttgtgtgaccgacgaggatgttccctcgaaaacccgtgcgttgcactctttccaaatcaaccacgtaacgaggatgacctcagcgtcgaagtctggcggtcgatcttcgcaacagactgtcgggtagcgagccaccaactggcaaaatctgaggacagcagcgagcacaagaagctcaatcgagcctggacctgcatccaaacctgctgcgataaggggcaagcctggaagatgtgttggcaggactctccatcctcggagcaaaaaagtgacaaattggtgcaagcttccaacctcggcgctgcagcttatcgactgttaaacaggcattgcggacggcaaggaacatgaagaacttgcatctcgctgacgcacgggatttccaaataatcttgccaagcgggcaggatgttctgccggccaaaaggatagagtaggtagaccgcacctagaagtcgccacttccagatcatagagtccgtacttccggggttgagagaaatcccggcgaccatgtcccagagcgcaaggtatttgtttatgcgaaaacacgtgatctggaagatctgcttaatttcagtgcaggtccaaaaatcttgcctttaggttcgtgagcgtgccggttgatttgatcttgcaatcaacaagaaataaagacaaagaaaccatggttaaatccataaatgatagccgattggccagccgccgatgacgtatcatttatctttgagccgatgtcatatttgattcgatcggcaattataaataagtaagaactaaatctatttgattggctgaagatattaatagcatataatgcttccgtcgatatatacttaaatcaagtgattgggatagatcggtcgccatgccgagacagtataaatctcttaaatcgaaatatatattaacaaggagattataagcattcacagcatagccgataagatagatccagcatgtatcggctaatactccgatactactttatattaagatattaaagcaagcaaaatatatcaaacaaaaagcttaatatatgtaaatacgacaagatcttaacataatgggcaaatttaacatatcggtcaagcacataatatatgaaggagttaaatcaggtaagatcggctgaaaccccgatactactctaatcgacaaccaaaaggcaggctaaagactgagattctaatcatgacttataagatcaaactcaactgatgcagctataagtatgaaaagaaggacaatatctagacaatcaagccactggctgtttcatggagtggtggataccctatataatctacgtcaacattggtatttaacctgatcggctgccttccaatgacggatgttagccgattgaaggttaaataacgatattgttagagattatatagggtatatgataactcaaagaattacataaacaatattagagtatcataaagatggaagcattaatcccgagaacgcaagccgccataacaagtttagccgatcctgatcgctgccgattcggactttagccgattctcgctctgtttctagaatgatctccatcttggattccgcttcggatttatctttatctccgatacttgaattaccaaatttggttgttaacagtattcccctatcgcttggacagacaggtcgcccctaacatcttcaatccaggaattgtcgtggaggacggcaaccaccatgattcccctcagcttgacaaaagagaaaagaattggaaatctgtactgcactgatcctccgtccggcaaccagctatcgcaccaaaacaaggtagaggctccgttccccagcagtactttgctaccagtggcaaagcagtgtagtgactttttgtcagcaagaggtgcaacgcgcgtccaggaacgctctagctcagtgcggtgcaatcaaatccaccgagcgcgaagcgccattcccattaggcgtaggtttatgatccctaatccccattgctcgatagggaggcaaagcttctcccaagccaccaagctgcacgagaccgcagcatcttcgtcgcccttccaaacaaaaccccggcctttcttttcgatttcgttgattgcccaggctagtagttccaacggacatgtagagtgggagcgccattaacactggcttgatcagggctaagcgggcatttggagataaaagcttgggcttctagccagccagatttttggcaagcctatccatcatcgattggatttgcgctttcgtcggtttacgcacagaaagtggcagcccaggtaaacaatcggcaattgcttgattgggcatgtcaacacctccgtcacctcttcaatttgggtatcggtgcaatggatcaggatcaacgagctcttggccagattggaaaccaagacggtggcgtcgcccatcagcttgagcacgaagtggattgtcagcgcatcccatcgggaaggatggaagaagatgatggtatcatctgcgtacattgaggcgcggagcggcaaggaatccgtagcaaggggggaaaacgcgctacggcgtgccaccgttgcgcaaagagccacaaacgcctccatcacaaggacaaaaagcaacggcgagagaggatccccttgcctgagtccccgagctagcctgatcctctgagtatctctaccgttcatggtgacggtggttgaagaagtgaaaagcagagtagaaacacagtcgcgccatcgagcgccgaagcccaaatgtcagagcaggtccaaaaggaattcccatgagaccgtatcaaaagcttttgcgatgtcaatcttcaacaacatggcaggcgttttggaccgatgtaacttcttaaccacaccttgaatgtagaggaagttctcttgtattcttcttcgcctaatgaaggctgactgtgcaggccctatcagctcatccattcttggggcgagacggagctccagaattttggttagaatcttagcgaaactgtgaatcaaactaattgggcggaagtcagttagttgattcgggtcctctttcttgggcaacaagatgatggaggccgtgttgatgagatgcaggtgctgggaattcgctctccaggctaagttaagagccgcaaccaggtcacccttgataattccccaacagaccttgaagaaagtggcgctgaaaccatctagccgtggcaccttgtcacttggtgacgccatgatcgcctttttcacctcttcctcagtgacgtcgccctccaattcagagagatcgtgggccgccaaaccaatcgagtcgaggttaatggacgccgaaggcggactatacgtccccaaaatattgaggaaatagttgtaggaagcctgcaacttatcttcctcggtggtagcatagacaccgtcatgacagagggtaggaattgcattctttcttcgatgtgcattgattttaaggcggaaaattgctccgttgtgccgctatgtttgaggaataacagcctggctcgctaacggaggaacctatatggactctgtttttctttttctccgattaatatgagaatttctaggccatgagagtgaacgtagaggctcctttttctatttctttaataagttaatagatatcgaattttaaatcagtgtaatttaacatacaaactttaaatccggcatagataaaggatgtggagctatcaaacatgacttaacatagacattgagttatatggttaaagagacgtgttttaacgttggggtcatacttatttgtctgaaacgttgatctggaggaatgttaacaagatttgtcttcaataacaaattaattctgaattaacatatacacagatttttgcaaagccgtcccaggaaaaaaaattgaaaaaaaagcatggccaacgagcaagaataggtccataactagcatggccatagtggatcaataattgcagttgatgaggaaagaatcattgcacagttgtgcttatctggaagggtcccaactgtgacagcacaaagatatagacaagcaagtcaagaccagtccagtcctaacttagtattatagttattaattttaggtttgtaattattggaattggcctgtactctaaaagtttttactatatcacgaggaaactataattgactaatttcgaatgttggaattatttaatggtcaggaaaaacgaccaaaaactagtatgtatattgtgctgcagtttctccctttcatttttatgtatgttggaattatttttgtttacacatatcatctatccacatggcctccttcctgttaggacttctgaagcactgccaaactaaaatcttcaggatggccataattgattgcttttgatgatttcacccttattttgctgcgcgtatacgtttgaattctttttttttttactgctgagatctgcatttaggctattactaaccatctcatcagtgtgttacgtagccacaaaattcaacttctttttcaaggagtataggtacactgaattgtgagagcggaactcatgcaatcagttagcagcatcgcaccgttgtaacttcctacaatcttaccatcgatgaaaaacagagaaaaagggtagagatggcctactgtctttttcataatttaatgacctagatttttcataaaggctaagcaccagtccctactttgtttagcagcttctggacatcaattgcttgtcaggttgggaatgtagcgtaatttacaacgggtgttcattccctttcaaagtaagtggctaataattatattcaggatcatgacaaattgcaacttgctgcacacagcgatggacaatgacagcacattacgcgcaccttttcttctaccagtggaggtccatcttgtactgattgattgggacgctgtccaagataaattgtggacagaccccattgaaccaccagttccctctccatttcattgatatttgtgtgtaagctctacaatgggtgaactggtgaccagcatggtgatcgggccactggtccacatggtgaaggagaaggcttccagctacctcctggagcagtacaaggtgatggaaggcatggaagtgcagcacaagatcctcaagcgcaagctgccggccatcttggacgtcatctctgacgctgagaagcaggcatctgaacacagggaaggagctaaggcctggcttgaggagctcaaggcagtggcctatgaggcgaatgaagtcttcgacgagttcaagtacgaggcgctacggcgtgaagccaagaagaacgggcactacaccaagctcggcatcgatgcggtaaaactctttcctactcacaaccgtgtcgtgttccgatacaagatgggcaggaagctctgccggatcgtgcagaatattgaagtgctagtcgcagagatgaatgcctttgggtttaaattcgaacctcagtctatagagtccaaggaatggaggctaaccgattctgacatctttgacccaatgaacattgctagcagatcgagagatgaagataagaagctgctcgttagcatattgctctcccaagcaagcaatgtaaaactcgccgtccttcctattgttggaatgggagggctaggcaaaactaccttagccaaactcatttacaatgagcctgaaattcagaaccatttccagttgatgatctgggtatgtgtgtctgacaactttgatgttgcgtctgttgctagaagtatagttgatgcagttcctaaaaaaggtgataaagtaaccatcaatgaaaatcaaacctcggcacttgacgagcttcagaaattagtgagcgggcagaggtatctccttgtattggacgatgtttggaatagggatgatgaaaaatggcgtaaactgaagaaatgcctcgaacatggtagcactggtagtgcagtgttagcaacaactcgtgaaggaggagttgctgaactaatgcacacaactgatgcatataatcttactgctctaaataacagtgtcattaaggaaatcattgacacagcagcttttagaccgaaaaaggagatcaagcccgctgagctagttcaaatggatgataagtcattattatctaaaaagaaggaaatgattgatcagtttgtggagagatgtgctgggttgccattggcagcaaaagcactaggttctgtactttataccaagaccagcctggaagaa

SEQ ID NO: 26890 - DNA, 23969 bp, Oryza sativa
  unsure (1)..(23969): unsure at all n locations
ctgcagccctcatcgataattttgaaaggttgagcaatagaatcaataatattgcgatgccttcaactaactctgagttattaaaaaacgaatgtattgttgtgcctcttcctttggatactaatgttttgcaggtgtctgagaacaaccaaggtaatgaggaagagaagaaagacggggatcaaaaagaactatccatagctccatgtatgcttgaggaatgtttaattgaccaagcgcctataatttctaaagatgagaaaaaaggcaatgataatggtgctacaactactcaaggtatgcatagttatgatgtgccaactatgtccactacttatgctatattagagcaacccatagtggaaacaactgttgaaatacctctgtcacaaaacaatttgcttgaagtttcttgtgataaataagagttgtgcgatgcttcacttatatccatgccacaactagtgaatgaacatgttagttctatggtagagccaccatgtgttgagtttaaacatgttattcacattactagtgagaatgaagagcttaaattgctatattctttaaatactcggggttatattcaatttgatgatctttgtccactcaactgcttagagaataaattatttgctagatttgaattgccatgtccttctgatgtgatttttcatgttattagcaattatgatagtaaaggagaatataatgtgcgttgagtatatatttgttcgaatttgactacacctctttttcatgatggaatatattgtctagaggactgcatgcgtatgtaattctctatcaagttcctctagttgtttaaataagttacaggttggtttgcaagaaggggagtgttgtgttttttcaactacaaagatttcaggatccaaccatatggtcatcaaaaaatgttcctcaccggatattgtgatagataaagataagttcaatacgcgccatgacaaggtgaaaccgaggacggtttccaatcaagaaggggaggatgatgaggacacaactagcacggatataatcatgactaccttatgtattaatcaaccaaagctgcatatgttttatattagatttacttgttatatatttgaacaaacgttgctacacaatgagttttcgtttgcagacgtacttgcttgggcgaaagaaaagagaccgagcagaaggaatgcatggatgattaaagaagttgattggggaccaaacgaagaccttctccaagaccactttcatctcaccacgtcacttttggtccatagaagacaatagataaagttctacacattttggattcggattcggacctcctgacatcatcaacttcaaacggacctagtcgctgatctagaacgaatttcggggcccatgagttcttgtttgatagtttttggagtctactttcagatggttttggtcccaccttttctttcttttatcttcacccctgctatcttcgagaagcatcccagtaaaaccttctcaaccaatggagcatcaatctattttccaactaactgctccgcggggcaaatcctatgagccaccttcttcatcgaagccaatttttagaactgtctatgagattcattccgagttaatcagtatggtttaggaaaaacctttttctagtgttgaccaggaaaatccttaccatcatctgcgggaattcgagcaactttgctcatgccttaagattcggcgcatgaagcaagaaactgtgcagtggaaattgtttccgttttctcttcaagagagagcgaaacaatggtacacatctaccgtagggtgtgtgcaatcaatgactaggagaaattacgagacaggttctttctcgcctttttccttgtaacccgtgttattgctcttcgtgtagaaattctcagtttccaagtagataaataaaaaatcaatcggtgcagcatggtccagattcactaatttagtatagtctggaccaaccttgtctatacccgatcacctgcctgttacagcattttcacacaggtctggataaggagtctgcattccatctaaacattaccaccagaggatcttttatgcacaaaactccatcagaaggaaaagtaattctagatcgaattatggaaaatgcatccttcaagaatcagagtgaggaaccactccttgaggtatgagtatctagaattgaggaatctttggccgagtctaatctttaaccctccacttcaaatgattcggctgagaaaccttcacccgagccatcgcatgttgagaatgaagaaattcagactccaagatgtgctcccaagttcgaggatgatcttgatgatgattatggaaacaccctgaactattttagcaaaaagaaacaacatattcccatgccacctcccgatccaatagagtttcagtttctaaaagagacagttcaggagttgacatccattatgagcaacgaatgactaaaggaggcagagctttcttccgaagtaattcggataaataccgctcctcgaaccattccttgtcatttataggggaataatgttggaattatttatagtccaacaatcggtgttaacattatttcagaatcttctgcattcgcttacttaagcgataaggcaacaacaccgactgacaaattcttcaagcaccctaacgggagccttattgaaggatatgggattgttcaagatgggcctatcatctgtgacggcaaagaggcaatcttggatttccatgtcatcgaaatccaagaggtcgatgttctcatcggattttcaatcgagaaacttctcatcaatacccctcgattgggctgcctcgagttctctttaggggggcggatacattctcgttaccctttgaccaatcgaagtacactctaactccctccctgaagatgagtatgcagaggaagtaagagcggtgatgcctttcgaatcaaccgaatcactcgttgaagatgatgtcctagacttcatccaagaggatgatgattccggtgaaactcttgatcttcccagctttgaaccaccgcctcgacctccgctagaactcaaaccccttcctcaaagcctgcgctattctttcctacatggagacaaagaagcttgcgctatgctttcctacatggagacaaagtagcccctgtcattattagtgacaagctttctgaagacgagaccagtcatcttctttccgtgctagaaaagcatcgctctgttctaggctattccctcaaggatctcaagggaatcaatccagttctttgcacacatcgcattcccattgagcccgagagctcgccatctagggagcctcaaagacggtttaataatgcgatgagagaagttgtgaagaaagaggtattaaaactcttgcacaccgggattatttatcccatgccatacagtaagtgggttagcccagtccaagcagtgcctaagaaaggaggaatgacagtcatgcaaaatgctaataatgagctaattcctcaatgcactgtcatgggatggaggatgtgcattgattataggaaactcaacaaggccacaaaggaccattttcccgtacccttcattgatgaaatgttggaacggctggcaaatcactccttatatttccttgatgggtattcccgttatcatcaaattcccatccatcccgaagatcaaagcaagacaacgttcacatgcccatatggaacctatgcatatcgaaacatgtcatttgggctatgcaacgctcccgctttttccagaggtgcatgatgtccatcttttcggacatgatcgaagaaatcatggaagtcttcatggacgacttcttggtctatggaaagaccttcggtcattgtctcttgaacttggacaaagtcttgcagcgatgccaagaagaggacctagtacttaactgggaaagtgccattttatggtccgtgaaggggttgttcttggtcatcgaatatcagagaggggaatcgaggttgatcgggctaagattgaagtaatagatcaacttcctcctcccgtcaacatcaaagggatccgtagcttcttgggtcatgctggcttttatagaaggttcatcaaggacttcactacaatcaccagaccattaactaacctgctagccaaggatgctccctttcattttgacgacgtgtgcctaaaatcctttgaaactctcaaaaaggcacttgttttcgctccaatcattcaacctcctgattagacgcttcccttcaagagtatgtgtgatgccagtgatttcgctattggcgcggtcttgggccaaaggataaaaagcatcatgcaatctgttacgctagcaaaactccaaccagggttcagctcaattatgctaccactgagaaagagcttcttttggctctttttactatcaataaattctgatattacttagtgggggccaatgtcataatctattctgatcatgcggctttgaaatatttgctcaccaacaaagatgttaagcctcgtctcttgagatggatcctcttaccccaagaatttgacttagaaattaaggataaaaagggagtagagaattctatcgcagatcatttgtcgagattgcaagtcactaacacgtaggaaccaccgataaatgactttctacaagatgacatgctgatgatagtacgcagctccgacccatggtatgcaaacatagtaaactacatggtatcgaagtacgtaccaccgggagaaaaccaacgaaagctgaaatacgagattcgttgtcacatctaggatgagccatatttataccgagtttgctcagatggactcttgaggagaagtgtaccaactaaagaaggacacaagatcatagagagatgtcacgcaacaccatatggtgggcactatggtgcattccgcacacaagccaagatttggcagagtggattctactagccaacgatgtatgaagattccaaggattttgtcagacgttgccagagctgccaacgacaaggagggatcactactcgcgacgcaatgcctctcacatacaacctacaagtggaaatattcgatgtatggggcattgactttatgggaccattccctaagtctcataattgcgagtatatcctggtggcagtcgactatgtgtccaagtgagtggaagcaatgccatgtagtgcaacagatgccaaacacgcgaagaggatgttctcagaagtcatttttcctcattttggtaccccaagaatggtcataagtgacgggggatcacacttcgtcgacaagaccttcagagaacttctacgcaagatgggcgccaagcataacatcaccacactctaccatcctcaaaccagtggccaagcagagacttcaaacaaacaaatcaaatatcctacagaagacaatgcatgcaatgggggaaggatggaaggataagcaacaagatgctctttgggcatgccggacagcccacaaaacgcaaattggaatgtcaccttaccagatagtctacgggaagacatgccaacttcctatagaactggaacacagggattactaggcaatccagaactggaacatggactttgaaggagctggagaatagaggagaatgcaattggcagacctagaggagaggagagaaaaggcatatcacaactcaaagatctataaggagagaacaaaacgctgcacgataagcgggataaaaatcaagaaatttaagccgggagacaaaatgctaatgttcaattcaagagtcaagctgttcggacatgggaaattgaaaagcaaatggaagggttgttcgatgtcatcaacacctcatcacatggagcaatcacactccgtgatgaatcaggtaacattttaaaggtaaatggccaacgttaaagattttccttgaaccggatgaaaatttggatgaagaagtggatattatttagctaattgactatgaaccatgatgatctcatctaaaatttgcttagctctacaaaaaattgcattttcgttttctccttagcttagtttgtgagtgtgaaaattttggaggctgaccgggccgaccagggttcgaccgaaccagggcagcgcccgattgcccccaattttcaaacctggatctcctcgcttgtgacaacagtagaaacccggtcagtcatgcgatagctacgttagatcaatctagagttcattaaattgaacttgtgttcatcttcctctctactccactcttctccattcatccagctcgtgtcttgagccaattccatgcccaaaaacactcaaatggctaggaaatccctgaaacactttggtgcatccacctcccacacctttgatctcaatagggaacattctacggcaaaccaacttgtgccactgcatgatctgccgctagaagaagtgtcacgcacggaaattcactagtaatttccgaactaatttatgcataaaatcctcgtccaggaatcagccgaggtacacaaactgacaatttaatatacaaatccatcataataataacgttacatacttacaaaagaaaagaaaacagcagcggaattaacggtctagcgatggcttcagctccactcctacagacagctcaactggggtataagccaaacgtcttctccttctggatcctttttcttcaactgaggtttgatgattattgcaagaatgagcatatgacatactcaacaagccacacagcaaatatgcaagtgcacaaggataccaaaggatggcataatatagactcatttgcaaaagcagcatttagcaaagatttaagagaagtaaaacagtagagtactttaatcattaattttaatcaacactgaacaacacgcccatgctgctcaagcccaaccattctgaacaaccatacccggctgtacagatctactctaaaccaggagctacagctgactgctattgttgcatcatatggttgaggtagcgatgaaacgcttgccagtcagcttgctattgttgcatcatatggttgacattttcactccctctcaaaaccttgctctcaaaattcattgaaagttttgcaaactcgcctcaaattcacacaatttgctgcaaatttttgtaaggtagcggctagtggggcccacatgccattactagccgttatccatgcactatatatgcagctcggctgggagagggaagtcacaccactttaactcattttcactccctctcaaaaccttgctctcaaaattcattgaaagttttgcaaactcgcctcaaattcacacaatttgctgcacttagtttagacactttgcatatacaagtttgctttagttcgctgcaaggttaatcggcgggtatttgcttaacccccgtccgagtagtcttgtattcttgctctttgctgtagctatgaagaaatgacttttgggcatattcaagagacgatcaagctcacggacaagccgacacaataagctgagtacaccttcttccgcggatgaatccatggaggaggcgtacgttccaccgaggctgtacgacaactccgatctcaacctcatgggcaaccggaaaatgcaagcctatcatatgctgaaagaccgaacgtgtgctctgacctgagcatacaactcgaccttctgaaaaggatagatatgaatgttgattttcataatgtttggtgtgctatagtttgggataaatttgcatgtgtagacgagccgggttcccgcttgcttaccatgcagtaggcgatggtgtactttccggttattctgcaaggaatatcacctttcttggaaagaccttagcttacatctaggctttgacaaaacatgcaaagttgatttcaggaacacatttcctgattttaacaagtgtatgttttggcaaagtattttgggtctctcatcctgtagaaagcttagaactaataacatccataatcctaccttgaggctgttgcataagtggcttggtttaatgctgtttcttagagctgatatccagatagttcgtgaagatgtactagtcctattgtatgccatggttagaaaaatcaaagtttcacccgttcaacccatgatcaagcaatggttagaaaatgtgaagttgtctggtcctgttgagtgtatttctttggtgactcgtttaacatgaagagttgggactctgcttaatatgcaagtatcttgtattcctgttacccactcttatgttaatgaggcctatttggttcaaggccacatactcaaacatggtccaaatgattctcttatgtttcccggctatacaaatgagattccgttacctaatccggagtttcatttgtataactgccgagaactaaccattccactccaagtggagttgccttgagatgtcccacgcaggataacgcgacgaatggcaagaggagcacctcaagaggcgtcttcctcttcaccaccagtgcagatgtatgaaggcagttgggacccgactgcggatgccccaggttagacccaagttccacaacatgacgctggaggttcatcctggcagagtgccagcgacagccagtggcatgtaccacaggagctgcactggggatactcatgctcctccagttcaagtggtccatctcgatcctctcggatgcgtcgctcagtctcctcttaaggggatctgggagaactcacccgaggatggatacacttgaactgcaagcggggaacatgcagcacacactggaggatcatgtggtgcagtcacgggagtggcagcagtctgttgatgaacagttcgcaaacctcaaccatatgatgcaacaatagcaagctgactggcaagcgtttcatcgctaccagggatttgatccccgccatgagccatagcaagaaacaagcttcgggggagatgtctctccccccactaaggtaacttgtatcacattgcatattttcctttcattgcatgtttcaatttctgcattgcatttataaacctgaaaacaacataaaaatttgcaaaactaaaaataccaaaaagataggctagatttattatgctaggtaagacatgcttagttcttcatgttgaaatgatgaatagttgctctgttttatatctctcatatatgggtttatggttaagtactctctcaaaatttgaataggagtagccaacaattatccgggaacctgaggtaagtgagctgcactttgctgatctgagtctaggttgttgcgagatatgagatagcaaataagagttgctatgaccctgctctaagtttgacttgaattccggatgttttattttccaaaatgataaatttgaaagttcctcaattgatataaattcctaccagagccaaaaatattcatattgattaagccatatacattttggttacttgtaattccattgaactttgtcaaatctttgtgacttgtgtagatacttttcatgctctatgatcaagatcatacacccacatatgcacacatatgctaagcttctacactggaagatagcatccatatcatccaccatatccatgttatcattatccacaaataagctctccagccatacttcctttccaaagaaaaatcctttgcaaaaatgaaagaaaaaaaaaagagggaaaggtatggctatgagaaaaataataaattcttgctctcccaaaagtggagcataaaaaaaaagaggaaaaaaagggaagagaaaaagtagccataccgtctctatgaaaattaaaggatattttggaggaaaagcataagcacaaagaagaagcattttctttatccacattttgttttctatcatattttccaccatattattcacacacactttgcacgatcttgatcttgagtatgattagtcatctattttagtccaagtttttgacttagtaataaatgtgaatacaagtatgccatgtttgatccctaccaagctccacatatcaaaccttagagtaggaatcaaagaggcaaatctggtgaggaatccatattcatacaatttgagtgatctagagaatcatttgaggaacttggctttcttttgcaaaaaaacatttgaaaacttccggaataaaagttgaataaagactgggtaactagcgctctaattgctgttttgtctctcaaccgctcaagacaaggaaaggcagtgtctcatgggaatcaggggtaagggtaagccaccgtgccaaacttatttaatttgagagagagagtacccataccatgtatctgtatctttaagatatacaacattgtagcaactcctgatcaacaaccaagtctttattcctttcgtccttttctcgggacgagcaaaggttcaagcttggggggtttcgttgacggtcgttatcgaccagtttcgaccgtcaatattaccaattaataaagactagttatgcttgcaatgcataaattccaaataaaatatctactttgtcacgcccggaatttctatccaaaattccaaacgcttacatgtgtgttaaaccctcgtccaggaatcaaccgaggcacacaataacaaaattgataatagagtacaaataattaactatttaatattcgcaaataataaattgcgaaccggtgccaggccggttcggccgaacccctggtggaccaaatcggccccacatttagctgttgggttccaacgactagtttggtggtggtcgtgcaaacttttgccaaaaattttattttattttgctcgcaaaaattcatttgaagaatttgcttcaaattcaaatctcaatgtgcctttgaaaattcaaacatgctctgatgcaatggaaaataaatatgagataataactaccaatttacctgttggcaagggcgacgtcgtttcaggtccgacgagcacgaccgtacctccgacgcatttaactcgatgaggtacccggttccggaggtacatgaacgggtgtcttctccttaacccgccataccttcttggtattaggtgcgggcagcggcctcttcgtaactgggaacgcaggtgaaccaacttgtattcccggcttcttggatgtcggcttaaggtgctgacggttcctcgtttcttcctgctctaggaacttcatcatgaaagcgttgaggctatccgtccttctgggttttactttgacctccttatgggtttggtccgttcttgatctaccccgtggagcaatgctccatccttagtctccttgtggatgattcccgttgttgttgttcatgagcatgacgttctcacgggtttttggacaatccatcccagagtgaccggtgttgccatagacctcacatgttgtgttaaagtccagggccttaacggtgccctgcttggcatccttctcattgttgtccagtctcttcataaggagagacaactgagcggtgagcatttccgtcctctcgatggtgcacatgccgcgttgacgggtttggagtcgttcctcgctccaacccatatttgagacttcttctcaatcaggtcagtgatatctctgaccatctttgagaagggtgctccttcatcagcagcgtccagatgatcccgggacgagggggttaatcctttgaagaaattttgtaggatgagtcactcgtccatcccatgatgaggacgggcggtgacgcattcctgcagcctttcccaagcttcaagaatggttaatccctcgtttgctgaaagctggatattcttccacgaagagcattggtcttgcccatccggaagaattttgaatggaatgccgttgagcgcttattccgggttttcaccgttgcacggttgatgtagaaccactgttctgctctcctgaggagggagaacggcaacagttggagtctgactcttctgacggtatacgtgctatagctttccaggaattgctgcaaatgagcacttgcatcctccttaggctttccacagaacaggcaagcctgcgccatcgttaatttagttggtcttcaaatcaaagtcaccatctcccctgctgacttgggttccaattggcatgttactagcagagggagtagtgaacatgaaaagtgtcttctcagccatatcgtgcaattctggtggcgcggaattggctggtctaattgccgatagagtaaccttgaggatgaacgacacggggtcggcttcacttcaccagtgactctagatatgaaattggtcggcagatcagaaccagtcctgtactaccctgttttcacataaaagagaaaacaaacaaggtttgcctacaaaggacaatgactatatatagaggtaaatataaaattattagctagtagtaaactcttaatcatttatcttcccctgcaacggcgccagaaatgcttgttggtatttcttagcgacactactggaaatataattcccagcaatagcactaaaaatactcatggtatatttatggttacagatctgatccacaagcgcacggatataccattgtagcatttcacacgggagtattccaaggtatggtatttattttatcctaaggaaagatatgataagagagtactatgctaatagtttttatattacttatatacatcaaagtctatgcaggggttaattcagttcaaagggtagggtgacacacaggagaaagaactaagaactactctcactaaaatatagtctaagctaagttgagaaagaataagaaaagtatcattcatgtacttctactatacatacatctttagtctatacttgctattatacagtcatgcaaccaataccccgtacccagtgtccttctggtgtttcgagaagccacccctgactgtcgagttccttacgacagcccgtcatgaccatacaaccggagctaaatacggaagagtaccttccccagggaattaacttaggattatataccgcgcggaggaatacccatactgagctgtcaccatcagcggcccacctctcatccgcagtatataaccccaattaatggtatctaataatctaagcaccacgcttatattactaaatactactctacatccttgcaaccgacatagagcaaccgaataatcggacactaaacccacaccaatacacctatctggaaagctagttacgtgactatattgcttcaagtataaagtaaagtcggcactcaagtaatatgaatggaataaattaccgaacttgtataaagaagaatattctattaattcagtaagtcttacaaaagaagagagaaaagctactatagccatacccgaattctcctgaagactcgaggactatgaagactattctatttcctactccactagcactagaactactaaacaatacttgagagagctcttgatcttcttcttgaggtgtgtgtgggaatgaatgagaggaggggtatttataagtggagaggtgccttgggagtgtggagatgctccaagcatcctatgagcatctttgctctcctcttgacatgtggcatgatgaagcatcctaggagcatctttctccctccttgtgacatgtgtccacggcggttatttcaggtagaaccgatcacaaccaccatgggatgtggataacttccagctgatgaagaattgggctgatcgggctggctgctggttcggccgaaccagggggttcggcagaaccctggccgagcccaatcagcccaccatttggcatgtgtttctcccaatggatcctcagcttagtggtatgaattatggccttgtttgctcatgttaattctgtattattagcccatctatccacaagtctgcttctcgacagcgtctgattgatcattcgtctattttctgtcgattctcctccatttatatgtgcttcttctgcatacatgttagtagcatagtatatagtggaagtagatattttatttggaatttatgcattgcaagcatagctagtctgcattaattgggtaatattgacggtcgaaactggtcgataacgaccgtcaacagcttttatcttgttcttgcttgtttcttcgatttgcttgaaggaataaggttgatctgcaccggcaagatcaacaacccactgagagatgtatcgatcgctaaggtgcaacacaacaacgtctagtacggttgtagtcgggtcatcaacgtttctcccaaatcgtacttatcatcaactcaccgaaagatcaggccaacaatagccttgagtgtctcgagtggagctcagggttcatcatcatgacacttggggatttattttgaaaataaaacttcttttgggacttacttctcagttggtttcatcattttacctaccaaggcaatacaccaatatatattatcaaaccatttatatatgtgtatgactacttgttattatattgagctttgctaaattatcgtgactcgtgttagatatctctcatgctctcgtgatcaaggttgcacaattaccacattatccctataaaaaaatgctaagcttctactctggaagttggtaatataaatttccatcaccatccaaaaataaactctccatccagtttatgcctgcttcacctagagactccttgaaaaaaaaatagagaaaaggagggaaatgtatggctatgaagaaataaaactttgctcttccaaaatatggagcaacattgaaaagaaaaaaaagagagatattgtagccatgcaacctccaaaatattgaaaggagaaaattggagaaggtatacacaaaaggagaaacattttctttatttctttttcccatccaccactacaatattcattccacacaagttgtgcaatccttgatttgagagtatgattgactatcttcttgagtccaagtatttggctttgcaatatatatgatgcaggtatgtcccgatttatccctatcaagctccacatacacagccttttaggctagggataaagtttggtaaaatataccttggcaaggatctacataaattgcaaaatacttgagtgatctgagataagtcaatatgaggagtatagccagctttgcgaaaattcatgaaaaccccgagagtacaacaaaagaatacaagaaggaccagaatcgagactgtttcgtctttcaattacctaagatggtaagctagacacttctgaagctcacaggtacgagaattgttttgaataatttatgtgcttgcattatatcttggagaattttatcttacatcttaacctttaacctttactcaggaacaagtaaagagctaagtgttgggggtttgttggcggccgttaaatgccaattctatgccgccaatacctgcataaaacataataaatgacacatccaacatagtggtagggtttaattctaatctattccatgagtgttggtgtatatttggatacagaagataaaccaccaaagttgggaggaaacctagacttaagagagagaatacttttatctatccaagagtgggttttgaacttcatcgaattatcagaaaataggcccatgttcctggaaatagataaggtagaaggagaaggagtaacaagccaaaatctgggcctgttgggccagaccaaggttcgcgctggttcggcccaaccccaatctcagccgtccagactgaggtttggcacggacgctccagatcttctcctgatggtggttgaggggtacttcagacatttcgcgttctccaaccgtcattacctgataaggacatcaccttctcatttcattcacacacactccaagtttttgagttgaattgtaagaggccctattgtactatattgtatactagaattagggagagagtagagtagtggaagttggaggaattccggagttgtcggtaatcctctacttatttttttactctattaattactctgttttaatcgaaatatcatctagagtaattaagatttattatgtgagagttatttcttagttagttcctaatcaatatacgggatcatttattattataatcgagtaaaatatagtgtttgctttagtgtttagctaacgctaaagtagtttttaactgcgtagacgtggtgtctgggtagttaatttctggtgtttgcttcatatcccacattaggtttgaggtgggtgtagaggtgatgacagccctcaaatacactcatgtcctccctgtccgggtactttgtagagccatatctaggagcagcgggctggccaacgcccgaagtaccgcgttaggataaaattgaactctctgtagacactgcctctcactattaaatcttctctacccttagtctatcttatctttatgtctttggatgaaccaggtgaagagctgacacacacgttccccatggaaatcgataccttggaatacttcaagtgaagtgctacatcggtatctttcgtgcgtttgcggattctatctatgatattaagaaataccaacaatgacatcattaataattggtcccacttgttatacacaccgtgttttttagtccgtgttacagttggctacaaatctatagcccacttctcttctctctcatcacttatcttctccacataataagctnatcctcatctcatagtctattattgtacctactcttataggattataggattccatgtaactcgagtatcttcctctctccttggcgttaaggatttgccactcttaaaatttgctactggacccacatataatagatacatgagggcttatatgttatagaaagcgagtggcaaataattaaatgcctcggcaaaataaaaaaaataaatgtcacaacagaaaatgtcccgtctagtctcctctcgtccttgcgccatctcgctgctgaacaagggaggggcgccgatctccatctggcgagcagaggaggagaggggatcctggtgagtatccacatcgtctttctgattcatctctctctcccaccgggactacttttgtctggaatttgcttgcgttcgttaaccctagcttctcttctagatctagaagaagctcttctcttaatttcagagccttgaccttaatacaagttacagtttgtttgttccccaaaagtttgggggttcaattgaacccccatgtcccaagttggatccctggcttttcggtcgcgatctagctagggtttattttgtctgggcagcgttgagttgcacggattcgattttgttctgtgaggggtcctgcgattgctgctatagtagggttaaagttctaaaacttggactggttcatgaagagaatatatagaggctttaatcctgtgcttaagtttttctactgcatgttggatccgcccctgagcccagcaatgattatattagttagtagtcactattcaacactttattagattattccagtggatttgaaggatgaattaaattgaacatcaacacataattatgaaatacagtgataatccaaatgtttcgtcatcacaaacaaaaaagaattggggagccactacataacaaaaaaaaaggtatcaaaccacatatacttagcatatatctattccattcattgtcatactggatggtatctagctatgtgccaactgcttagatctgtagtaaaattcggaacatcgccttgctcaccatggatcactactggcaatgcattcaacatttaatcacacatgggcattggttgtgttcctcattcaatttgccaaatgaaattcccaccatagcttacctgaataatctaatatcagaaccaattgggatgtgtagtagtgaaattcaaggcaatcatgattgctggacagctgaagccatccagcataggcctgtttcacttagtatgatagttgtgtcggaattaagtactcagatattggaagcaaataaactgtttttttttctccagagggatgaaaatcaaaacatgttagttcaattttgtgtgtatgcatgtaagtggtaaatacaataatcaatgccaacatgaatgattcgattagttagagtgccacttcttgctggtcggaaattgcttggcatgataattggtatttatcagctaataaatgaagatatagttttcattcaacaatcaatatttcaagtattgttgatcgtctgatccaaagcttatcaatttcgtgttgatgtggctctgtcagatggctttgtgtagtcagatggcttctttacttagaatggtgtagttagcatcactggtagtatatactaattagcagtagtatatacttgtttttatacgttgtattatcaatatatgctacattcctcgacaaagatgtactaccttttttcggtcagtatatactacatcccttaatcaagcagtatatgcttctttttttgctcagttagtatatactagaagctagtagtggtatgtactgttttttagctagaagtggtatatactgtttttaagttagtagtggtatatacctttttttatgttagttgcagtatatatcttttttaaagtggtatgtataagtagagcagtatataccttttcaagtcagtagcagtttatagaagtacattttttttagttactagcagtatatacttttcttaaggtagtactccagcagtatatattgcttcttacttagtatagcaggatatgaatttttttagtatatgctatttttaagttagtagcggtaagtttttctttttactgttatctgaagatcaaaagtatcgataaattctgtaagatgcaaaaggcagtatgtattgagatgagaatatgaagaagagagccgttctactctatatataaactaaaccatacgctgaatacaaacaagaacaaacaatccagccagtatatctcattcacttcatgcatacagcatctaaaaaagcagaatattcaatacgagaagcacaaagctctgttttcttttctgagcaatatatactcgattctcagaatgctttaaaacaaaattcagctagcaaatcacactttctaaacaagggcattttcccatggcgcaacacatactctctgcgctagctgttgcagggttgaggtaagcaattgagtcattggagtcaacacgcgttcttggcgccggctggcaaccatctgcacgcatcaattagacttaattattgaacgaacggaagaacaaatttggattgccatgaaaagaatgcatcacaatcaaaataaaataaaataaaatccccaccgttccgtgcagcgtcgggctgcctcattagtcttaattgcttgctgcatgactgcatccctcgatctggagtcattgggtcagcggcgaaactaatatgaagaagtcgtcaggtgccctgctgttggaactagctagcaaggctgtcgtcatcccgtcggcaacgaggtagatgaaccgctgcgattggatgagctggcgcgccgcttgggaatatgcagtcgtcattctagatcgacgttcatgatctacacatcgaaaaataaaagtcagctgcatgagatctacattaaacgaaagggaactgttgatctgcaatacaagcagagaaagtaggaaggattacatgcctggaaacagagcctatggatccataccatagatcacctaggaatctctgttgaacggcttgtagagctgtagatgggttatatgtgtgtgctctgatcaactggtaatgtcgagggagatcgatgtgtgacacctcccgcctgggaatgacatgggagagcaaggcgagacatcgcccacctgcgcctgcgatgggaacgccgccgacgagattgagtcgtcggcgctgccgactggagacgagggtttttcttttgagattgagaacgatggatttatacgatccattcggtaaggacgtcagttctgtttatttggaataattaacaattatgggaattatttattttcacaaaaatggaacgggttcgtattgatgcacccattagcagggacagggaaactcaatcacgcaggtttggatcaacggtggatgagagcaggtgtgtgtgtgtatatatatatgtatatatatatgtacacatacatatgtacatacatatatgtacatatacatatatatacatatatacgtatatatacacccctcccctagaataactattctacaccccccatctcccaagggtcaaacccacctcccccacattccctagggcccaaaaaccccctcccacctcggtcaaagcgtcctcccgccggtcaaacccgccaaccactttgctgttctcgtcttgcaggaatcatgcagtaacaggacggtcatcgtgtagtaacaagataactttctcgcagtaacaacatcaaaaagtagtcatgatggatctagttttgttaagtgtttttttttgaacgtcatggtgcaaacggattagaaaaacaagatattatgtgagagatattgctctataaagattgagatttacctctttttagtcctcgtctcactggaacggcgtagtaacgagacgaccaatgtgtagtaacacgactgctttccgcagtaacaacatttaaaaaatagttatgatggttccagtttcgttaagtaccttttctactgatgccatgatgcaaacgagatagaaaaataagacatgacttgtacgttactgctctctaaagattgagatttagattttttttagctctacaaaaacattattaccatagtgtcactgttactatgcatgttctctgttactgcaaatttcgccatatcgttattaccaaccgtgcagtaacaacatataaattttgcagtaacaacacataaatttggcagtaacatatcatgttactacccttctgggataatgttactgccgaatcatagtaacgaaggtatgattattacagcaacataactgatttgttctcacacaatttgaacatatatacaaagcatgcaaacaatattttctattcacataacatcatgtggtgaattggttaggagagtttgccatgaaccatgagatcataggttcaagtcttaatttcaccaattttttttaaatttttctaataaaagagagaagaataggaggaaaaaagagagaatggagggagagaaaaacgaagaaaaaaaatagaggagggcgctaggaggagaaaaagcgaagaaaaaagagggctctgcccgggatcgatcgggaggaggagaaaagagtgaagaaaatcgagggcaagggaggaggaggagggcggcgccgggagaaggaagaaaaagaaaaaaaaagtagaggaagaggcgccatgatcgggaggagaaaagagcgaagaaaatcgagggcaagggaggaggagggcggcgccgggagaaggaagaaaaagaaaaaaaaagtagaggaggaactgaggaagagggcggggctaggagggttcgagatcgggagtgcgaggaggacgcccgcgcgatcgggaggcgggccgtgcgtggccttggagggagggatggatgggctaggaggagggaggagattggctatgtgggaggggggtgtagaatagttattctaagggggaggtgtagaatagagctgtcctatatatatatatatgtatatgtgtatatccatatatgtatataggtatatgtgtatatatatgtatatacatacatatatgtatataggtatatgtgtatatatatgtatatacgtatatgtctgtacgtatatgtatgtatatacctatatgatgtatacacatatgtatacctatatgtatacacatatgtatacccatatgcatatgtgtatatgtatacacatatgtatatgtgtatatgtatatatctctatatatatatgtatatatgtatatatatgtatatgagagagagagagagagagagagatagagagaccagtattttagaaaagttgacccttttgctattctgctaggagaaaaaataatcttgggcatggaagggcgctcctcaaatgaaatatcatcagctgaagctgttttggtgggagcactgtcttctggtgttaacgtacgaaacacagtacagtattattcattgtattaaaaaaatcttaaatttgattttaatcttgtttctttatatatgtggtttcaaactgtacagattgttatattcagtcttcaatttaacctatttcttgtccctttttgtttagtactaaatggagaaaacctaattggtgttatctcaatttgtaggcgccaacgtggtttgtgctcaagatcacattcttgctactggctttctgttttactgctatgctttctctagcattcttttcaagtgacttcatgattattgcacatgttcttttgcttgtgaccattggcacggtgctatttgtgcttctcaacaggtttgtctctccgttttctctacctgcatccaatctttacagtcgtcaggatgaatattttgagttatttttattactgtatcaatctttacaggtttctggcagaaactggtctggtaccagttgaacaacagatgaaggagatgggtattcataaaatagaagctacagagaaggacaagggaaactaagccttttgcttttattgacatagatgacagctcaaaatattacatcattgaacagtgtccttttgtacagactgtatatgctcattcaggcatggatgtaaatttcaggctgacactaacacattttgatgaagctacatttatctaggaatataccacttttaggaatgcttgtcatcctcctttgatttgctcttcttcctcttgatgtaacagaaacatgagcagcaggggaactgaaacaagaacttcatcgtctgtttattcacaccaataccgtgtttgtggaagtgttattgtgtttatgcagaacggatttgctcccaaacccttacatatatagtatgcattgattccttgcttagttgcttatcagaagagagttgaaattgtggcccccgtccttgtcagctggggcttttcacctgcctgcacttatactttgtttagagggtttggttttttatggaacattatatcaatcatcaatcattccgtcagttgtattgtattgttatatcaagggcaacgtataactccctaaaactgacatagaagtcaagatcttttgaggtcttgaagttgggcaagctttcgtgcctctttgcctctttgcaagacagaaaggatattgttttcgttctggatgggttttctggtgcatattctttgtttgaagaggagctttgtgctgtctcgtacatttagattttagagagaacttacgtcaaaaccaaatacataagcattgtaagtacaagaccattagagctaacaaactgtcagggaagtccttaaattgtgctaaaattttctggttgttcatcggttttgtgacgatactggtatttttgtcgaagccggaattcaaaaccttcatctacaccagcaatacaatatgaagtgcaagaccttcataacttgtatccatgcgcttccttcagattattagcttggagttcaccgacctttagggagggaacaaaagtaatagccacaaactgtttatcatcctatgacaaatgattgaaatgcataacaaagaaacttatgtggttgataaaaaaagagtaaattgcattagcgacacacgaacttatcaagtgagtgtaatctagcgcaataacttataaaacttataaaacgcttgttttggtatacaaacttgtttgctgaccaaaaatttgctcagcaagattgatcttgttgatttgaatgttgcgtaaatatgtatctcagaagaaaatcagtatgtcacttagacaaagatctgttcaacaaaatatagaatatggcgtaatgattgtataaagattaaagaaataaaaaaccaaaattaatgcaagagaaaattccctatgtagcatcaaaaaaagttgttcttcc

SEQ ID NO: 26891 - DNA, 4964 bp, Oryza sativa
taatttatttatgatgttcaactcagtaaaattagccttgccatgctattttggctttggttcatacgcaccagacaagttcatgcaccagcgctttacaaattcattcactagattaaacccacctggcaagttcgtatattgctgatgcaatttactctaaggagaaaaaaagtggtgagaaatataaaatattaataagtcactgtacttcattgtgtctgctagttacttttgagttgtaaaaaagaaattttcagttcgcttcctcttaatgcattttggaacctttttatatctcctcgatctttgttcagtcttttgcaaaaaaaaggaaaataaaaggaaaacaaaaaaactatgcaaatatggactaaagtaagcacctatcggaaattttcatattagattttctgacgtgtatatatgtcttctacataattagatcaagaatagcaataaatattgtataaaagcagttgcataagagaccgctctaaccgtactacaattgtaaagcatagcttagtcaaattttaaaaaggaactaaacaaaaatgaaggtttgcataataacaatttagttcatctttgtgagttattatttgagcaagccaatcacctatatcccttgtcaatattagttgtaaagcaaaccaaggttgtcttgctttccttttacaaatcgaatacaatgagtaaaacagttacatcaaagttattattacttggtatttacatgtatacagttaaggccatgtaagcactttcttatcacttattaaaaaattgtcagcaaacatacatagcttcaataagcatgacttctaaatgaatcatagtagtctttgcccctccatgtatagtgtcaaaatcagtaataacaattatatgtttaaattaggagaaaatactaacctgatacacccaacatcagtgacatatttgccacaggagtagaactttagactgaacaaacccattctgaagtttgcaatagtacttgtgatgaccaatatattatgggtgcaacagacatgaacaatactgatccaaatggaaacaaaattcacgtactccaaaatgattttatcctccttttcatgaatggttcaatggataacggttatgatgcatcagtcatatcatgactgacattcttgtattggaaggtacaagtagtacgttcattcagtaaaagaaaaggcaccaaaaaattcgccaacttacagttacaccagcgcagatagtttcgggctgttctaggcttctagcaagcaatgaagtgagacactgccattacccttaatccagtgacattacagcatcactatcttaaagggatgttagctataaagatcaaaacgtgacattatgactacaaagatgtcatcagaacctaagccctttggtacattgtcaccagtaatcccgacaagagcataatccatctttgaagtgatggaagcgctgtaaatctctgatgatgatttctctttcagtgatcttggtaatgaacttcattgctgtatggcaatcactacagacccggagattctttattatatggatcactgatcttgggactgaattcattagagcaaaagcaacagcaagcttttcactatggattcgcaatgcagactctttctcttcttcatccaaatcatgaagaacagaacccgtgtttggtacatagcctgcttcttgcattctttcaagcagtttctccaaataagaatagatttcaatgtgctgtgggtgactcttgtcgccaacataaaacaaatagattttacctttcaactcaaaagagctatacccaggaggcttttctattcttcttgttttgaccagaagccttatccgttccacatctttccacattctagcctctgcatatatattagacaacagaacatagtatccactattgcttgcatccaattcaaacaatctttttacagacatttctgcaagctcaacatttttgtgtatgcggcatgcactaagaagagctccccatatagcagcatcgggtttgaccttcatttctttaatgagactataagcttcatcaagacaaccagcacgaccaaggagatccaccatgcaaccgtagtgctccacaccagcttcaataccaaattcttgcttcatggcattgtaccaatatcggccctcatccaaaagaccagcatgactgcaagcggctaaaactgagataaacgttatgtagttaggccttagacctgatcttttcatctcggtgaaaatctcaagggcttcttgtccgcgaccatgcatgccataaccagtaatcatggcagaccatgaaaggatgttcttttccttgatttttcggaaggccctacttgccatttcaactcttccacacttactgtacatatcaactatggaagtaccaacatagacattttcctccaaacccatccttaccacctttcaaatacaaacatgatgaaacttcagtcataatgtaaataaatatttaagaaatcatagaaatgtaaacttatgatgcatatcctcacaaagataatgggcatgtgtatgcaataaacttgtcacaaaaaaatgttacaaacatcacaaatggaggattatacaatttggaacctgcaaatagatttgcattttctagggtcaatttttttttctcgaaaatgcaggagagctgcatttcatttcattaaggggaagaaaaaacaatacaaaaacacaacacaaagaaaaaacaaagtaggagtgcccgagccctcctaccgagacccacacacactagactacccggggagcttagttgcctaggttagccgtcccactaaggagcttttgaaggtgagaagctccagcaacaccccaaagatggccctcattttctatcacttgtaagaccgtcgctactctaggattggcgttgttgaaaacgcagtcattgcggtgcttccaaatctcccaagctactaaggttaccaaggagttaatccctttcggcacctccttcggccagttcttggttgcttgactccaccacctcaggaagcggttggtagagggctgaggcgcagcctcggcaaaaccaagtctcaagaagattgccgtccaaacttggcgagaaaaaacacaagaaatcaaaatgtgttggatggattcttcactttgatcacaaaggggacagatcactgagtgttgcagcccaagctttgctagacaattggctgtccaacacctattattgaaagagactgaatacatgcaaatggatagtaacagtttgtggactacagcggtgcttgaactatcactatgttaagttcattttggaagagattgaatgtgcaattttagttactagagaaagttaaatatattaagttagttacatacaaaaggcacggaacacatcaactataaaacaatatctgatattactaagagaaatagtagtgtgtagaaagcttttggagggctcatgcctatatgtattgttgaatgctagtatattgctatgtattgtaggctcatgagcttctttcccacgattaggaactgaacccttcacaatgcaactaaaatgtttggtctgaaacagcagatccaagcaagtaatttacctgattatgaatgcgctttcctgtctgtattgcccctgcatgcgcacaagccagtagcacagccgacaatgccacagcgttgcatttgattcctccgccaacattcagcatcttgctatacaacccaattgcttcggctgacatcccattctgtgcgtacagagcaatcatcgaattccaggacaccacatccctttccattgtatcaaacactttcctggctacctccaagtcacgactgccacccttagcgtacgagtctagcatcgtgtttaccaccccagcattcctttcgaagccaatctttgcaataagcgcgtggaggctggcagtaacaccacggtcagggacacgggcggaagcagagaacgccaccagagcggcagcctcgtcgaccacagaagcagaatcggaggctatcatggcacggaagagttcgagcgagtggtagactagattgttgcgtacgtagccagatgccatagcggtgacgatgacggggttggggtcagggatttcgtcgaacgccctgcgggcgtccatgggacgggaacagtggtggtacatgtggaggagggcggaggcggaatacgggtcggaggggaacaggcccgagcggagggcgaggagatgcagctggcgaccggcggcgagggacctggcggcggcggccgcgcggagggccgggggcagagccgggcggagcgcggcggggttggcgcggacggcggcggcgaacgtggcgagggcggcgaccgcgtcgccggaggagaggaggtctgcgacggccgcggaccaggacgcggggcgcgacgggtcgacggcgcggaggaagagcgcgcggagggaggaggcggtggtggtcggactcgggacgctgcgctctcgttggcgttggggattgaacgcgggagatgggtgggcaggcggcgtggggagtggatttgggagcgatgtcatgacgcttgctcccgccattgccgagccacagccagtcagtcgccactgctcgcgtgccaccgccgctgcggctgctcgtattcggccgccgtcgtcgctctcgcactcggaacttttttcgtttttagatttttttttaatatttacagaaataatctatggaccaaaaaaattgcagaaatagcccctgccgccctaatggtgggcggcaaggtgacgtggcagacggtggatcgaccacgccgtctgccgccgtcggccaaaattgcgcttagcccttgccgcccgtacagagggcggcaaggggctaattgcaattttggccgcccataaagagcttgcggccgtacttttttcatctgggtc

SEQ ID NO: 26892 - DNA, 27855 bp, Oryza sativa
gggacccagatgtaaaagtacggccaaaagatttttctatgttatgttaataataaataaagaagtatttattggtaaaacttgttaatattgttataaaaatgtattgaagttggttgttgcgcaatttcatatgttaagtgaggtattattttgtaccttattcgacgtattagtactcggataatttatataggcctatcgcagtttgggtcgtagaaacattatatggacttaaacaaggagaattatgtaacatgaagaaatagtagtacaatttgaacatgatacaactatttgcattgcggttacatagatgatattagattcgaactaggagggaggtagtgcaatagttgaacacaacgacgatgtagtaatgggacaaggaagcatgacagtagaaatttcaatatgccaagttgtccgataatagctaacccctacgtgaggatccctctcctctcttaaaccgcgctttagtaaccctgtattgctctggtagttcaagctgcacaacacgactaggtggagttagaacccttctggtgtctatccattctctgtattgacatctccttggtggttcctaggaggaaagaatagatgtaaagcaagcaaagttagtaaatgttgtgagaaaataaggattcatgtaatcaaaatattcttaccatgaaatcgtcgtcaagaatatttggacaaacaaagaaccttcgacccaatgttgtaggatttatggaacgaagaacctgacaacgatcaccacacctgcatcttggacgggcttcccatggagggagtgccgtagttagcacccgccagtcgctctgttattcacgacattgtcgttcataagccgcttttctctgtaagtattgctcagtactttcggatgcgaaataccagcgactttcttgtaaacaagtggttaggtcgagaacgggattttctgtatcgacccactcgatgtatgcgcaagctgtagtgcgggtctgccgaatagagtagtgttacgaagaataaagcgattgcccatacggaatgaataagcatatgcagataataaaatacctcacggtcatagttaggacacctaaaaaagcgccttcctcgaatatcaggactcctcgaagccattagttggcatcgatcaccgcataggcagagaggacgctggcaccaaggtggtagtaggtatacacaaggatcgctacgccagtttggatcctcaacacctcggcgtctagccattgacgaaagccggtcggatttgtaatgaagcaagtggggaagagagtactgaatgtgactgagttctgaaagattgtgaggcctcactcgttaaggcgacttatataggcgcaaaaaatcgagtgatacccctgacatgtgaacgtggtggggtatggtgggtacgcctgattggcgccgaaagatacatgcatgatcggcgccgaaagttacattggtcgtatgcgccaaatggcgggcaaatactcgtatcacacgcgaataaaggaggctgcatccgtgcggcagaaagtagtcgtgcatgcgccgaaaggtatcgtgcatgcgccgaaaggtatcgtgcacatataacaacaacgtagtcattacacaagcatacagtactggaaagtgaagcaagtaaacaaagagaagactgctctactggccctgccccgcgccgcgaccacgcttggtcctccgggcctgtgctcgcacgtggtcctgggagtaggtgaaacgatccggtggcacagcacgggtagcacgagtgtcccgcggaggagtggcctgcgcctggtcctgcgtttgcaccggcggtgcgcctcccagctgtgaggggccgatgacgtcctctgtcgagcctgaagcgaagtcgaagtcagtgatgtcgaagaggaaggtggaaggtaacaagtggtccgacgaggtcccagcatggtccagtggtggaccctgactcgacgtgccggctgcctgtgacgaagtcccggtgtactgccagaactgcgctgagtgcgaggtcgacacagctgcctgagacgctgaccctgcagcttgggagaagtgggcggcctgcgtcatagcgaactgggcgaaacctacacatcgacaacgggacccttgtaagctaagacataaaatgtatgtaaattgattgtcgaagtaatgttgtttttttaagtacctgtggggggcacaacagaaggcctagccgaggaaggcggggtgctgaacggtgcacgaaaccctgaagcaatcggcaagtgaaacggctcacttatatgtgcgaggcatatacagaaatagtaataaaaatacttacctccgtgcggagggggagtcggcctaggaacgtgcgcagctggacggggaccagtcggtacgggtggccgctgtacagctgcgtctgcccgagcaacgtcgtctgcacgacaggtgagcactcggagaatcgagcgcatcgactccaccatccgcgtgtacgtcgtcaggtgctcctctacgggtaccggaatccccgcgcctaaacgttggatcgtcgttgaaccgtcaacgatgacccggttgatgtcgtcgacctgcatggttaatttgttcgtaaatattcataaaatttgacgaagagaaagacatgaaaacataaaggaatggtgcgatgcagggtactcacagcacgagcgaagtcctggtcgcggtgcctgacatagaggtctctagtgctcgcaacgtggggctgctgctccaagggagcgaaggtgaccctagtacgggtgcgtggctggtaccagcgtaggtaggcctggtacgactcctcagtgtgtggctctccctcgtggtccacgacctcctcggttgcgagcaaccagtcctcaacaaaagtcgccaacttggcgggccagtcgccagctgactgctgacccttgcgcgagtacctgcgaattaatgtgtaatattagtgtgaaatgacagatgttacaaattattgtgaacaggcagattttaatgcaacaacgaaaagcgtagtgcaagatcttaccggtgaacagcagctgggacggtagtcggaaacggtactggaaagggctgacggaagccgaactgccgcatcacgcggaaaggggcgtgaggctcaacgcagatgtcgaagaccatcggaaacgtagtcatccagtacgcctggtccctggtgcagagtgtggacagacccaacggcgcacgagcctgggtagccgtggcactgtagggctcccacacgacgtcagtcggcagaaggcggtcgaactccataacaaactcaggatacgaccgcctaacctggacgtgagcccatcggcgctgcaatacgagacgatcgatgtgatgtacaatgaacttaacaattaacttaacaatacgataagatcgatgcaacgtacctgacgacggcaccacagagtacccatcgtagggtagtcgacctctggtcgctcctcatacagtgactcctcgtacgcgtgctggtccacctcagggaggccgatcgcaatcctctcagctgcccagatagaaagaaagagagggcacccaccaaaggtcgcgctgggatccgtcttcgtgcaagactcacaaagtgcacggtacagagccgccaacaacgcggaaccccagctccactgaggcacctcgcctaccgcggcgtcggcgatgctcctagcgtagtgcacgaatcccttgtcgaccgcgtgcccgtgatcgccacagaacatcacccagccaaaaagccagagcaagtacgcctccaaacatcggctgtaggagtactcgtcggcctccgcctgtagctgctcaacctgcaagccgtcgataaaatgttaggcaccttaactgcggactaaatatgtaatacgattgtcatttcggtacaaaaatactcacggtgaactgaagcagccacctcttcgtaggtccggtgttgcggtggtgtgccaacggctcgaacgggaggtgcggtgcgcgctgtactagtgcgaaacgtgccgtcagatcgtcctgccagtccacagccgtggtcactggcccaacagcgtctcccgcgagcggtagccccaacaagtacgatacgtcctgtagggtaggggctacctcaccgcacggcaagtgaaaagtgtgcgtctctggcctccatcgttcgaccaaagctgctaggagggacctgtccacagtccatcgcttggccgggtccacgtcgccggccgcagcctccaccagccgacacatcggtaggaggccggcctcacgtagcctgcaataacaaattaatatgtcattataaaaaatattacagtgcaactaacttatagtaaaacactgttcgtacctctcgacaaaggagtcgtgaaccgtgagtagctcaccgcacgtccgtgcccggaacgtcccaagctgagccccctgcaccgcagtaaggtgagaccggtgtcggtgatctatcgccgggtccaacaactgaggtgtatcctgacgtgccatctctgaaaaatatagtgtttcgtgttagaacaattcaaaaaatagtactgtaaaacaaaagataacttgcaaaattatgaaatagtaataaaatcatgagattaattatgtacaacaagagtacaggctatttaaatatagcaaacgttactaatggtacataacgatgacgtgcaatttaacatatatgtagagttcaataatataacataacattacgtgtcgaagtccgacatacatcagcatacctaaagacgttaggcgccttagtccgacgttacatcacgagacctaaagacatgacatgccgaagtctgacattacacgacgaaacataaacacatcgataagttcgaaacgaattacaagcaaatccacatgccgacatagaacataagaactacaccacgtagccagacgtggcacgacgacgcctaggacgtggtcgagtggaggtagtgccttcacccgtagggcgagctccatctgctgctgatcctgatagtcctgcctccgccacacttggtttctccttgtctttaggacaatgcttgtaggtgtgcccatgttcatcgcatttgctgcaacgcttcaccctgccagcctccgactcgtccatatcgttgcggatgcgacgagtcctcctccttccagccttgcctcggagcttcgatgggtcaggaatattgagtacttcatcgttagtctctgtgaactccccagctatgccgaacccataaatctcgccgctccatgtatgatatattgcttgcttactgaagtactgtgacacatatactgcatctggtatgccacactccgctgcggcagcaatgacatgggtgcatggcctgtggagcagcttcggctttgcacaagagcaatgacatgtgccgtcggctttgagaacacactcctgcttcactctcttgcggtagatacccctgcctgccttatcttgacatagtatctcaaacctgtgctgttgggtaccttgcactagagctcgatgtttcatggcctttttacgcaactcctctagctttttctgcatgaaagctccaaacaaaatgctgttgttcggcatagagggaagaactgcctggaaccgatccctaaaatacctgcatgtcccatgtaaaatgaactccactatgccaactagtggcagtccacggacaccgcgcatcacccagttgtaaacttctgccaaatttgttgtcattattccatatctagcaccacctgtgtcatacgccttggcccatttctcttttggttcatgcagaatccactgagaaaatttccgaatctccaatccagttcttctaaccaatgttggactatccgttgggagaggtccaagagcttgaggagggtaagcaacggcggtcgatggagccgctgcacgctgatcactgcatttggctgtcaactcatctaatctcttccaaagctcattgaattttttctcctggttctgattgcacagcctcttgaacatgttcatgagctccttgttcttgaattgcttgaagaaattagctcccatatgacgcatgcaccacctactctgtacatcttcccaaacaccggggtatcctcattccatactcccaaactgcaactctcctatcgctcgcagaatgccagcgtgcctatcatgtatcaggcatacatttggcctcataccaacaacttttgttttaaccaatttcaggaaccagtaccagctgtcggtattctcactctcaacaaaagcaaatgccaagggcaatacctgattgttcccatctacccctattgctgttagtatctggccccgatactttcctgtcaagaatgtcccatcaatgcagagaacaggacgacagttcacgaatgccatcttgcatgcatgtagagctaagaacgccctttgcagcacactcttgccaggatgttcaattgaggggaatttcttcacttcgtaagagctcccagggtttctttcctcgataacaccaagcaggcgtggcaaattgtcatacgaggcttcgtaagttccaaatctcatctctattattttctgtttggccctccgggccttggcatagctaatagtatacttgtatgtctcttcaatgtgtcggattattgaccttggttcatatgtgagattatcgatgacatgcgcatacatctcagatgcaacaaatgcacatgtaatgttcctgtggtatttctgaacaccaggtagaaaacatgtatgcttggtaacaactgtgtcacgtcctgataaattcatcccaaaataaaaatcattttctaaaaggaataatagaattaattaaaattcgaaaagaaattgacaaatactaaaatacgtgccagaaaaattcgaatgtggtccggagaatttttgttaaattctccttggtctaaaaggagccctcaaattttacttgaattttcagagcaccaaaaatatttattaaacaacaacaacaattatcaaagtttactaaaaagaaaaactaaaaataaatccccctcctccctttgggccaagtcgacctctctctctctcggcccgcggccaaagtcctctcttcctccctctctttttccttccctctctctctcttgggccggcccggcccatctccctcccctctccctcctctccccgcggcccactcggcctctccccgcgcgcgcgccgctgacgggcgggcctgcccgccaccctcgctgacgggtggggcccacctgtcatccccttcctcccgccgcccccgtcctccccgcgtgcaatcaataggggggaattattccccgtgattccctccccctttccccccaattttccctccctctctcccttggattcatttggaaaccctcccctaatcccgccggcgccattgatggagccccagagcgccgcgccggtttccttcccctccggccgccctctcccccttccaaccctatataaaccctccccgcgcttctcccgtccgtttccgcctctcgccgcccttcctcctcgccggaatcgagctcgcgccgtcgttctctctctccaccgtcgccgccgagctccggtccgccgccgtcgtcgccccagaccacctcccacctcggcaccgcctccttcggcttcgccgcatcgtcgccgacctcgtccacccctccgtttcgctcgccgaccgccggaactccgtcgaccccgtcgacccgagccgcaccgccgcctccctcaactccggccgcctcctccgtcgccgccgtcgccccggggtgagccgtggaccattgcctcctttcccctttccctcccctctctcggccgccgctccgccgcgccggtggtcgccggcggcgaccatcggggcgcgggcgcgccgcctcccgccgaccgcgccggcgtggccgccctcgggagcgccaagtggctgccgcgtggggcccggccgtcagccgcccgcgtcctcgggtgcggctgacgcgtggggcccactgcgccggccggtgtgagcccgggtgcacccggtccaccgtggaccgtgaggctgccgcgtgggccccactcccatggacccggtccgcgcgccccctcccctcggctgacgcaataaacccttttaaaattaaaatttaaatgaagaaattcgcaaatattcatttaaagagcatataaacttcaaatggccataacttggccatttgaactcggaattggaccgttcaagtctctaatttttccttaagaagtcaagaacccatttttgtgctttgttcctgcttgttatatggagtttattagagtaaaagccttttctttttcgttggtcgtgtagacgctgcagctttggaagatccgctttcgtggaggttgaagccgatgtttgggaaagcgagcaaggcaagtcacatcatccttgagcatattgaatcctagtttataaaattattttgatttaaattaatacattatcgctttatttaaattcccgcgttatcactgttttatttagccatgcctatttacctttgttaagacattattattgctattgttattattaccttgttcaccctagaataaacaaaaccccaactagtgggtactctattcatggttccactaatatgaatttaggtagatgcttcgctgattaataggacaacattaggtggtttttataactttagactttgggaatattcatatctcttggatactatggaatggttggcttatggtggaattggacatacccctctcttcctctttcaaagcccctaaaacctgtttttcggtggggtttgggtgcatgccagttgtgggaagtagcaccccggccaatataaggactaagctcgggcctctgttgcaaagcactaccgtacttccacatgtctagtgggtaaggcttagtttgtggctcagtctggttataaacaaaagtacacggatggagatggacgaagtcgggggtccatggacatctctaggacaaatgaaggctacacgagctgcggcccggtagtcgagatgtcatggcacagggcatgtgtcctgctgctaggggctcaatcctgcctgcctgtcccgggggttccggccgtaggtggggttgggtcggtactcttgtttatggctaggatgggttgggaactatgtcacgtcttccgtctgtataccgtggtggtatgtggcacgtggttacacgtgaggaagatgtgtcttgtgggtaaagatgtacacctctgatcagagtataatctattcgaatagccgcgccctcggttatgggcaagccgagcaatgtacccaagttagtgttttaattcttaaaatttgcttaacaactaaaatgtggaatggttggcctgggttggcttgggacgagctgggacccagggtcgggttgccagttcggtctgaatcatcgtaggccttgggttaaggcaggttcgtgtgggttcacggccttgattaataatactgtgtaactctaggatcgtctttataaaatggctttgggcaactaagtgacttttaaatactgttttctgcaaaacttaacccctatattattaccccttgtacccccttgcattaatcatgcatctgccggtgtggcttgctgagtactatggttgtactcattcttgctctatctttctccccccttcagtaagagaagctttggagaagaggtcttaggtggagtcctggcttataccccagttgagcgcctgtgaagttggagccgtaggcccgctagtccgctgctgtttatttttgattgtcaggccttaagtgcctttgtaataatgtaaatattatcgatataataaagatgtgccttttgtaccacgtttgtgtggtgtaccccggcttttcctgggacagggattaatacactagcgttcgagagaatgtatttttctcggtcgcgacaaactgacactgtccaataatccttccatttccccttatacgcatgcactctccagggacaaccatctttttccttaacacaccgaacttcatattgcgaccggttcgacttggcaacccaaaactctctatgaagtgacactacaaaatgttttaccgcctccttcatatcttctgctctactataaatcgctccctgaataacctcattttctttgtactcccgtctcacactatcctcttcagagacgatcagcccagaaaaatcctcactagcccattctgctggattaatatccatctcatcatctgacgaatcaccttcctctacatgctcgttgtcagaatcctccctctccatttcatccacaatggcaccgacagtctccccctcgtcggccactccacctggttgaatgcccactggagctactacgcccccgtcctctcgtgcgttgacctcctccacagaagtctcgtttacttcagcacttggtccctcgccatcatccatgttcgtctgcacacctggatccttcgggtgaacaaacggaaccaaagctagaggccacccgcgttgcaatgcattttccaaataccatctccacactcgagagttttgaactggcattagttcccaataaaaaccctcagttgcccgacttactataacattgattgttatgtcacttgtctgtggatcaactctcaagcccctcattaaccatccttttatagaaggtacactcctctcagccggtctatcaattcccctttctgatacaataaaatctgacagatctaccccagttggctcgtaacggacgtttcctggtccatggtaaacttggaatatttgtttgttcgacatatctgtcaacgaaataactagatcatattactctttcatgcaataaacatctacaacgtaatatcttcttgtgtaagccaatgcaacggtaatgtattaattccaaactagcagatctacgtagttaccgatatctacaatacgcacttctagattagtacaactaaaaccctaaaaatataatgcatttattcaaacaaatttttaaagaatacacactatttaactcaatagtcacatataggatctatgaatattacctgaaatcggcgtctgaatccggcagggcttcgccccttcttctcttctcctcccctctcttcttttttttttcactggaattgaggagagaagaatgagggctgggggctgggcagcaggccttttataggcagcgaggcctgccgcccggccagagggcggcaaggggccgcctgcaaaatagccggccccgactggcttttttgcattcgggccccttgccgccccaccagagggcggcaagggttttcctgcaaaaaaccctccctccgtcaccgcccgttcctcccccgtttgccacgtcagcttgccgccccagaggtgggcggcaggggctatttctgcaatttttttggtcgatagattatttctgtaaatattaaaaaaaaatctaaaaccgaaaaaaattcctcgcactcgtaccgtcacatctgctttgccgtctcgtgctgggactcggtccatcatgggtcgtgcaaacatgggccgtgtggtacagccttcgtcgtgaggaataagttcacttgacgtccctcactctgtacgccgagtatatctgatgtcccctaaccgcaatactaaatgtgtatccctgaactatgtaaaacggtcaaaaaaaaaaaaggtcccgaggcagtatagatgcatggttttcgctgaggtggcaacctagtcggcaaaaaaataaaaaaacaaaatatgaggcccacatgtaagtgagaaggaaaaatgcgaggcccacgtgctagcatcatcttcttcctttctcttttctttcttctcttcgcttctcttctcttctctagtcttctcttctgacgccggcggcagatggggagaggcggcctccgacgagtccgcgccgctcgtcctcgtcggcgacggcggcgaccaaccccggcacccccggcacgctgcttggcctcgcgctccagcttctcgcgccggcctcaccatcatcttcctcgtccccaaggagtactcttgggaggtcgccatccaagttgtggttgccctttcttgcatcgtcggtggctccattgtcttcgcctgcacccggcccgccgaaggagtcgaagtgagggaggagctcgtccaccgctagctcatccgccttcgtctgcagtagagggacaacgggaaatgggtgccgcacccgacccgccccgttgccaaccctattgttgatctgttccttgccaccgattgaaggttggagaagttctaggtcaggaatatactgttggcaactttttgttacaagttgataagcgccatcgcagcaccttaagtattgcggtgatcctagagtcgccaaccaccttgatctagcaaagagctaaacatagatgggttttgataactaaaccggctagcggagccgatttctagataactacccgtctcgtgggtaaaatggaaggttttcaggacaaacctacaaagagatgtcgtactctcgcagcggcggcgaacggtttacggcgcaaaccgacaaaaatggacaaactaagagaaaactaaaagcaatatgaaaaacgattcgattgattgatagtagattgttttttttttacaatgaaccggccatgtcccttatataggggttggtcttgccctctacaggccctcctccacgtccaactcggggtagaaacttaaggaaacccgaaacatgccttcccgagcaaggaaacctcgagacccgacgaaacacaatcggactcggtcctaccggtcagaccggccacacaccgccggtttgaccggccctcaaccggcggtctgaccatgttaacaaccaaatttggtagcatttgtatcaggaaaaaggatttggtcaaagcggagttggaggcggagatcgagttcggaaacagagcaggaatcggttggagtccggatcggctatggttaggatcggctgagtctgagtcgagctaaataagccgatatagccgattccgacaatacgacttgtacgcgacatcgggttcaagttgatgtatttcaagataattgccacgcatggatagagtcctaggaaggcaattgtatctattaattaagatattttatgtaaatcccttatagataagtgtgggcaaaagtctgccgcaaagacttgtggtatcttagagtttgttagagataatggttgtgtccggtatgggcatatattgtaatcctcgggtataaatagaacccgagccctatgtaatttttaacacacgttcaatacaatctcggcgcatcgccatcctttttgctttagttttgtttcgatgagttcttgctttcgggttgagctgcatcgatttcgatcttcaacaagaggtaaaattcgttatgacggatcgcattcttaggattagtgcttccatcttcatgatactctaatcttgtttatgtaattcgtcgagttatcatatatcttacataatctttagcaatatcgccatctaaactactatcggccaatatctgtatacagaagacagccaattaggttagatcttgacgttgatctagattatatgagatatctaccattctatgaaacttctagtggcttgattgtctagatatcactcttcttttcatacttaatgctgcatcattcatgtttgatctattaagttgtgtttagaatatcgatctctggcctgctttctagttgccgattagaatagcatcggagtttcagccgaatgtatctgatttagttatatttattctatatgtctcattgatatgctaaatctgccctttatatcaagatattgctgcatctaagtatactaagtcctcgtttgatattctatacttgctttgatatctttatataaagtagtatcggagtattagctgatacacgctagatctatctgatcggctacgctataaacatatataatcccattgttgacatatatttcgatctaagtgatttatactgtctcggcatgatgaccgatctatcccaatcacttgattttaagtatatattgatataaggggtatatatcgttaatatctacagccgatcgagtagatttagttcttctttacttattcatgattgccgatcgatatacagatgacatcggcccaaaaataaatgatatgtcatcggcgtctggccgatcggctatcatttatagatttaaccacagttttcttgtttttatttcttgttgattacaggatcaaatcaactagcacgctaatacatccgaaggcgagctttggacctgcactgaagttaagtagatctcccaggccacgtgttttctatcaacagaccggccaacacacggcggtcagaccggcccactctgaggaaaccggtagacttccaaattttggcaatctttcctattttaatcctaggtgccaaatttgggtgtaaacacatgcccccctgcctttttgatgaacaacgtgaatctaaaagcatagatcatgtttttggtcttaggacgataatccaattaccggccatagtacctcctaagcgtcttgccaaacgctccagaagtatttcttcaagtatttcccgttgattgctcgctgaaaacactccccttgaagtgtctccaaaaaatacgcgttccctcgaacaatgccgcatactcgataaggaccttcccaactaggagaccacttactgaactcccttgattgagtacccaaaggcaaaattgtcttccaaaccaagtctccaacttgaaacaactttgctttcaccctcttgttgtacgccttggccaccctcttcttctctttctctatctcttccaatgccttcaagcacttgtcgatgacttcatcaagattatctcccatcaacgtcttgtaatcttcacttgacaaatcatcttgcttgatataacaaagagaaccaagatttacctccaccggtaaaacggcttcttgaccataaaccaactcaaaaggagtgactttagtggcaccttgtttagatatcctatgtgcccacaatgcttcggaaagcacctcatgccacctctttgggtgttcctcaatcttctttttcactaacttcaacaatgtcttattactcgactcggcttgtccattagcctgagcgtagtaaggagaagaactcaacaatttaataccataagatttggtaaaactcttcacttccttagacataaaagaagcaccttggtccgtagttaatgtttgtggaataccgaatctatggataatatgcttcaaaataaagtcaattacctccgtatgagtcatattcttcaaaggcacggcttcggcccacttggtgaagtaatctgtagcaactagcatgaacctatgcccctttgatgatgaattataaatttgaccaatgaaatccaaaacccattgttaacagtgaaatttggtaagcccaaagttaccattggcttagagtcagtatcggcttcaaagttctagaatcagccgatgggagtcaagtcgccacgatgttgtgttcttggtggagtcggatcaatcaaaggaagcttatctagaagagtccgagttcaagaaggatgcgacatgacaatttatctattaattaggcatagtttgttagtttccttttatctttaggaaagtgtgttttgtgtcctataaggactttatcttttccttttatctttaggaaagtttctttcttgtccagcaaggactatgtacacccggagactatgtaatctatctctcgatcaatacaattcgacgcatcgccaccctttttacttctacttttgtttttacgctccggcggaacttggcacctgacgcggggctgcatcgtcttcgatctccggcgaagggataagtccaatgttccaccggtccaggcaattatatcgtctacgtcggcgtcgttcaaggctgcatcagtacattcgacctcttggattactctggtttggataatatatttgtctggctatttatcatgtctatgttaatctagtcttagcatatcaatttagctctatcggctgcttcttgctttagggtttctgccggtatcggctaaatcgcgttgctagattagattagcttagacatctaccaccctgaaaatcagtcaatggcttgattgtctagatattgtgttaagtttgatctactaagtcgtgcttagaaccataatctctagcctgcttcttgactgcatcagttaagtttgatctactaagtcgtgcttagaaccataatctctagcctgcttcttgactgccaataagggtttcatcagggtttcagccgatgaattatctagacattgcatcggcttgtaaggattgtgtacatattagatttagccgatgacaacaaaggtttcactatttaatctaatcttgtggatttcatgacatcggacctccagccgatgtgtgctttaaccttcggatcgatgcttatttatcatatcattatttgtcgattggtttatactggattatattgttattttattacatcctcatcagccgattgcctttatatcattatctacattggacttatagccgattgcttaaacctatcgctatcggctgatatcggcatcggctattatcggctatcggctagaactattcgatcggcttgtcagccgatcggctcattgatctgctatttgcatatcttgtcagttgcaggatcaaactgactggcacgcccacatctcaacaatctttggacctgcatagaagcagatctcccaggccgatgtgttcgattttttcgtcaacacccatcctcggaacggccatggtttgattatggggttcaacacggcggcgggcgccaattgaacattgccgaaccgttgacaagcctcgcatcctctataatatttgaagcaatcatcaatcatctttggccaatagaaccccgctctcctaagcaaccaattcatcttgtgggccgattgatgagttccacaaattccttcatgcacctctcccatagccactttagattgatcttcatctaagcacttcaacaagacaccatctatatttcggcgatataaatcctcatcaagcttaagcgtgggatctttcaaatattgaatcaaaggaattctccaatcttcttctgcttcctgagcacaaatgtccgaattcacagttaattcggcctccaaattgattgcaacgtgcccccagcgttctgcccagaaccggtcagaccggccacacagggccggtcagaccgctcggagtagctggtcagaccggcggcatgcggccggtcagaccgcccctggtcaccggtaagaccggccgtgcaatgccggtcagaccgcccctggtctccagttttgccaatttcgcacaaagatttaaaatcaagcaccggctcttctaatatcagaaataatcccctcttcacattatagctagatgcttgttgtgccaagtcatttgccctagaattatcatgcctagcaatatgtctaatagcaaaattatcaaaattggcaataatatccaaacatgagttgaggtacctatttagtgatccgtccaagcatttgtagactccggcgacttcttgcaccaccaattccgaatcaccaaaagcctccacgtgtttagctccaaccatctccataacttgtaagccgaacaataaagcattgtattcggcttgattatttgtacaataatactccaaacgaaccgatgcttcataacacatgccattaggtgaaaacaaaactatcaatatgccttgaccttctttgcaagaagaaccatcgaaataaatcttccaaggtataacttcaattaagcaaacttctccctcataagcaatatctatatgatggtccactataaaatcgcatacaatttggcctttcatagatttcaatggttcataagccaaattgtcacgccccaaaacgactctaaaatacatcctctaaattacgcctagaataattaaaatccgtgtgaaagccttcaaaaataaaaatgtgcaaagttaaaagtcaaataaggcttggaggatttttgtatatttcctaaaagcctaaaatgcgtaaataaattttagtggaattttcagagcacaaataataattattaagaaataaacaaagttaaaatgattttataaaaagaaaaaccttaaaagtcccccttccctcccttgggccggcccggcccatctctcctcccccctctctctctctcctctccccgcggcccactcagcctctccgggcgcacgcgccgctgacgggcgggcccgcccgccaccctcgctgacgggtggggcccacccgtcatccccttcctcccgccgctcccgccgccccgcccgcgccaagcgtcgtcgccgccgccaaatccgccacatcccgccgtccccgcatgcaataaagtgggcggaaatactccccgtgattccctctccctttccccccatttttccctctctccctcgcgttcaaacgggcggatttgtccccgcaaatctcgccggcgccattgatggcggccggacctcccgcgcctattccttccccgccggccgccctctccccttccaaccctatataaaccctccccgtgcttctcccgtccgtttccgcctctcgccgccctccctcctcgccggattcgagctcgcgacgtcgcccctatggtcgccgccgagctccggtccgccgccatcgttgccccggaccgcctcccacctcggcgccgcctcctttggcttcgccgcaccctcgccgacctcgtccaccccctcgccgagtccgccaaccaccgaaacgccgtcgaccccgtcgacccgagccgcgccgccgccttcctccgctccggccgcctttttcgtcgtcgccgtcgacctagggtgagccgtggaccgccgcctcttttcccccttcccttccactctctcggccgccgctccgccgtgcctatggccgccgccggcgaccataggggcgcgggcgccgcctcccgccggccgcgccgagtggccgccttcgggcacaccgagtggccgccgcgtggggcccggccgtcagccgcccgcgcccttgggtgcggctgacgcgtggggcccacggcgccggccggtgtgagcagggtgcacccggtccaccgtggaccgtgaggctgccatgtgggccccactcccgtggacccggtccgcgcgccctctcccccggccggcgggggaggcggcgggagcggcgggaggaaggggatgacaggtgggccccacccgtcagcgagggtggcgggcgggcccgcccgtcagcggcgcgtgcgcccggagaggctgagtgggccgcggggagaggagagagagagaggggggaggagagatgggccgggctggcccaagggagggaagggggagttttaaggtttttctttttataaaattattttaactttgtttatttcttaataattattatttgtgctctaaaaattccactaaaatttatttacacattttaggcttttaggaaatttacaaaaatcctccaagccttatttgacttttaactttgcacattttaattgttggaggctttcacacggattttaattattctaggcatcatttaagggatatattttagagtcgttttgggacgtgacaaacctatcccccttaaacggaatctcaaccccgagattcggaagaactggcaaaaagatcgggatgggctgccttcagctcgtcttcacgctcccaagtagcttcttcctcggcgtggttgctccattggaccttgcaaaaacggattacctggttcctggtcctgcgctccatggcgcccaggattttcaccggtctctccacgtaggtcaagtcttcgcgaacttcaatctactctgagtcggcctgctcggacggcactcgaaggcatttcttgagttgtgacacatggaacacatcatgcacgtcgcccaaggaggcgggcagctccaactggtaagcgacttctccacgtcgagcaatgatacggaaaggacccacaaaccgaggtgcgagcttccctttcgtctgaagccggtgtacgcctcgcaacggcgtgacccggagatacacaaagtcatccactacgaattctaggtcacggcgtcggttgtctacataactcttctgccgagactgggccacctttagattctcccgaatggtcctgtccttcgcttcagcttctctcaagatatcggtcccgaacacttggctttccccaacttggtcccacaatagtggtgtccggcatttgcggccatacaacgcttcgtacggtgctgtcacgcccggaatttctatccaaaattccaaacgcttacatgtgtgtgaaccctcgtccaggaatcagccgaggcacacaataacaaattgataatagagtacaattattactctaattaataagcgaataaaatgtcgttacagaggtagatagttcctctcaatcaataaagatctaagcagcggaaaataaaataaacggcgcagacggctccactccacaggcagcttgaccaaggctacacctattcctccactccatcagcctcattgtagaactcttcctctgatgaatgattgcaaggtgagtatatgacatactcagcaagccacgcagcaaatatgcaagtgcacaggataacaaaggatggcataatagggttgcatttgcaaaagcagcatttagcaaacatttgagaatttgataagacagttaagtaattaaacaatattaatccaacgctatacaacataccctgttgtataggcccaaccattctgaacaaccatcccggctgcacagttctatctccaaaccaggaatattccattccaaaccaggagctaatcaaatcattaccagtttaagcatctttttcaatgatgagaggtgtgagactaatcacgaaagacattgttagacccgcccataaccgcgggcacggctattcgaatagttttactctgatcagaggtgtaccactgtacccacaagacacaaccccacatcatgtcaccatgtgcctcaataccaccacggtacctcggaaaggagttgtgacaatacccctcgtataacacaatccactgcagcgcaccttcctggatcataatcacccccttataaacaaggcatggactccccagcaacccccgtgggcttatctccgccacttctcagtctggtgccccgcaatgaaccatgctatacaaaagataaagccgttgcccatgctggcttgtggttggcacggttaatgtttcacaaccgaaactcgtgaaccggtccttaattgtcatgagcacgaccatcaaaaccatgtgctcacaacccaccattatcaggttttagttggcacattaattaattaactaatcacgatcgaccatcgtgaactatcattaagccatcatgaaataatagtaaatcattagttatcccataaatgtgctaatgtttctaagtagggctaagcaattatatctaatatctagttgaaccaatataaataaagttcaaccagtcaaattgtaataacccaaggtatcaaggaataaggtaatcaagtacaaaagggccataacaaagaataggtcaattccacccaatgacattcgaaaatagatgcaatagttgaatagaaacaatagctttaaataggatcaacatgctcaaagggttgtttgggatctgtgtgacttgccttgctggccttggaactcttcaaactcttctccggcgaaaacggactctccggaaacgacggaatctaaacagaaaagagcaaaatcaccaaaacagcacataaacaagcatgaacaatacatgtggatatttttaatgtgtagatctcaactttagaaaaatttagagacttgaaccaactaaatcggagctaagatgaattagttatgaatttttaaagattaaatcggattaaaacacttatatcggtttaaattgaattatgacgcaataatgaattatttttgaaaaggaaaagaaggattattgcgtcagcgggctagggttttggtggaccgggcgcacgggcggcggttcacgcgaacggacggccgagatcgaaccaatccaaaacggacggccgagatcgaacgggtccacgaccggctcacggcggacgaccccgatgacgtcggcaatgacgtcaccgacagcggcggcgcctcggcggaacaaacggctcgggcggcgcacgctcgccggcaaacggcggcactaggacgcaaacgaagggcaccagcacgtagaggacgacgcggcgaacacaccggtgaccaaaacggcggcggaagaacaacgaacgacgacggcgacgaggaggaaacggcggaaaccttcgggttgtcgacggcgacgaagctccggcgatctccggcgacggcgaaggggtggacgaggacggcaacgacttggcgagcacgacggtggtcttcccgagcgacggcgacggctgaaacgacggcggcgcacggctggagcggcggcggcgacggcaaagctagggcacacggtgctagggtttttccgacgacgagaggcgaaggcgaaggtggcaacgggtagaggagacaccgagggtccttttaaaggggctcggaggcggcggcaaaggcccacggcggccggcgacgtggaaggaaagatcgggaagaacgaatccgagacaaactcgaatccgacgctttccaaaacgatttagctaaagattccaaaggagaaaggtagaggagatcccgaggatcatttcccctctatcaattcggccggagaaggaaaggagcggccggatttggaaaggaacggcggcggcgcgaaactagggtttcgggcggcggcggccggaggtagacgatggccctggcggacgcgcgcgcgcgcggcggcggactgggccgaactgggccgaagagagagagaaaggttttgggccgactttcggcccaaagccaaaagagactttttaaaacctttttcaatttaaattatttctttaatgcaattccatttattaaaaatactttcttagctcaaataaatcccagaaaaatctaggaattatagaattaagcaaagtatttaatgaaattttatctggcccctttttatattggaatttattaattaaaactagatcttctcttcaagacttttaaaattatttctaaaaattccatttaaacaacaatttataaattttaaattttcagggtgtgacaaacctaccccccttaaacagaatctcgtcctcgagattcggaagaattggcgaacagatgcggatgagctgacttcaattcatcttctcgttcccaagttgattcttcttctgagtgattactccactgaactttgcagaaacggataactcgattcctggttcttctctcatttgtttccaggatacggattggtttctcaacataagtcaaatcctcttggacttctatctgctcaatattagcttcttcggtaggtacccttaaacatttttttaattgtgacacatggaacacattatggactcctgccaaagattgaggtaattctaactgataagcaacctctcctcttctactgacaatcttataaggtcccacaaaacacggtgccaattttcctttgtgggggtggtggtggaggtagagcattatgctgtggtggattttggatgtgatggaggaaagcagccatcatgttggcctgctgggcgaggatttgggtgaggatggagttggtgtctggtgatggtggtggaggcgggggaggaggtggaggtgggccgccttggatgttggggttgctaccttcgggttggttgccatcaccggtagcagcacttctcctggttgtcaccatctgaaataccccatacagaaccagccaagagagagaacagactattaaagctaatcacccatgactaccaaaattattgaacttattactgatataaaatgggttcattaaggttcaggttgcttaagccaataaaataaaggcaggctccgacacagttataccacacaccggtataaccatgccccacatgactctagcagaaaaacaaatgagaagaacacacgcgcaagcctactaactgctcgtctacttctgcgacgggccagggcggaaggtgagcagcagcgcatcctccgtgctgccaacgccagaggctccctcctcttgcagaaccacgggcgcgggcttggcacgaggggtctcgacgaaacaggtccatgccaaggactgacgaacaagctcgggcctggaggtactcttgcgggcggtgatcttcaggctgcggcagacgcggcggcgcttggggtgacagacctctccctgggcgatcttgagctgacacagctgcgcctccactgcgtctaggtccttcttcagctgcagattctcctgacacagctccaggatcttcatgttgttctcgaccaacccgcggcgcaccatctggtggaagtcgatatgggccgcgtcgtacgcctccaccatgcgcgccaggtgcatgacggtagcgtcatcctccgagctagcatcccggaaggtggcgtagtcgcgggctcctccgcgacaagggtggtagcggtagggcgagtgctgcaactcgtccgggtagcgctggtgaagagtgccgatggcgaggcgtgcggcgttctggcaagcggtggagaaggaatctccacccgcggtgactgccaacgaagtcctctcgggtgagccaatgaggatcactgcagtgacctcccaagcagcgtggggctctgcatcgtcaccctcctgctccgggagttgcttgccctggtagtccactccatgcggataccccaagacaacgcacatgccccgcagctccaaaacgaaaccagtcaggtccagaccacgacggttgatgctgctagccatctacaaacaaaaacaaaagagaaaagcaacattttaaaggttagattttgacgataaatgaagcagcaggacagagagagactagaggattttcacaaataagaaaggatttttatttcgaaaatattgctaaggcttgggatctaaggctcgtcctagggtcaagggggctcttataccaacttgtcacgaccggaaataacccaacgggcgttccttacgtgcgtgcattattccttgtcccaggaggcaaggtacaccaaagttgatacaattcagagtttaacaagcggaagcgtaattaattaatttgttacatgggcggcgaagacccagcacacaagaagacaaacgaaaaacagcggaagactagggcgacgaccacaggcgcttgacggcaggcacgagctagacaccaaagccttcatcatctaggggctcctcttctgggtttgggaaaaattgagcaagactgagtacaaccaccgtactcaacaagacacaaccacaagtgcagaataaatgcaaggcagtacaagggagccataatataggaggttagggtttgccgtaaacagcattaaaagacacttagttgctcaaagctattttgtaaacacggtcctagagctatacaatattattaaccaaggccgtgaacccacacgaacctgccttaacccaaggcctacgatgattcagaccgaactggcaacccgaccctgggtcccagctcgttccaagccaacccaggccaaccattccacattttagttgttaagcaggttttaagaattaaaacactaacttgggtacattgctcggcttgcccataaccgagggcgcggctattcgaatagaatatactctgatcagaggtgtacatctttacccacaagacacatcttcctcacgtgtaaccacgtgccacataccaccacggtatacggacggaagacatgacatagtttccaacccatcctaaccataaacaagagtaccgacccaaccccacctacggccggaacccccggcacagataggcaggactgagcccctagcagcagaacaccggccctgtgccatgacatctcgactaccgggccacagctcgtgtagccttcatttgccctaaagatgtccatcgacccccgacttcgtccatctccatccgtgtacttttgtttataaccagactgagccacaaactaagccttacccactagacatgtggaagtatggtagtgctttgcaacagaggcccgaagaccggtccttatatggccgaggtgctactgtcaaaaccatgcaccccgagcccagcctaaaaccattttgatggttttgaatagagggggaggtgtgaatccaattccacaataatctaaccattccatagtgtccaggtgataagagtattcccaaagtctagagttgtaaaaccacctaattttgcctaattaaccagcgaagcatctacctaaaatcatactagtggtactatgagtagagtgtccactagttggagttttgtttattctagggtgaacaaggaaataataacaataacaataataaggtcataacaaaggtaaataggcatggctagataaaacagtgataacgcgggaatttaaataaagcgataatgcaataatttaaatcaaaataattttataaactgggattcaatatgttcaaggatgatgtgacttgccttgctcactttcccaaacgtcgtcttcaacctccacgaagtgcggatcttccaaagctgcaatgtctacacgactaacggaaaataaaagggcttttactctaataaactccatataacaagcaggaaccaagcacaaaaatgggttcttgacttcttaaggaaaaaaaagagacttgaatggtccaattccgagttcaaatggccaagttatggccatttgaagtttatatgctctttaaatgaatatttgcggatttcttcatttaaattttaatttaaaaagggtttattgcgtcagccgaggggagggggcgcgcggactgggtccacgggagtggggcccacgcggcagcctcacggtccacggtggaccgggcgcacccgggctcgcaccggccggcgccgtgggccccacacgtcagccgcacccgagggcgcgggcggctgacggccgggccccacgtggcggccactcggcgcgcccgaaggcggccactcggcgcggccggcgggaggcggcgcccacgcccctatggtcgccggcggcggccataggcacggcggagcggcggccgagagaggggaagggaaggaggaaaagaggcggcggtccacggctcaccctaggtcgacggcgacgacgaaaaaggcggccggagcggaggaaggcggcggcgcggctcgggtcgacggggtcgacggcgttccggcggtcggcggacttggcgagggggtggacggggtcgatggcggtgcggcgaagctggagaaggcgacgccggggcgggagacggtcccggcgagcggagaaggccggccggaggtcgtcggcgacggaggagagagagagcgacggcgcgagctcgattctggctgggagacggcgcggcaagggcggaaacgggtgagggaggcgcggagagggtttaaatagggttggaagggggaaagagcggccggaggggaaggaaaccggcgcgggaggtccggccgccatcaatggcgccggcgagatttgcgggggcagg

SEQ ID NO: 26893 - DNA, 2557 bp, Oryza sativa
cggcgggaggaagaggatcacgggtgggccccacccgtcagcgagggtggcgggcgggcccacccgtcagcggcgcgcgcgcggggagaggccgagtgggccacggggacaggagagagagagagggggggagaggagagatgggccgggccggcccaagggagggaagggggacttttagggtttttctttttataaaatcattttaactttgtttatttcttaataattattatttgtgctctgaaaattccactaaaatttatttacgcattttaggcttttaggaaatttgcaaaaatcctccaagccttatttgacttttaactttgcacattttaattgttggaggctttcacacggattttaattattctaggcatcatttaagggatatattttagagtcgttttgggacgtgacagccagttcggtctgaatcatcgtaggccttgggttaaggcaggttcgtgtgggttcacggccttgattaataatattgtatagctctaggatcgtatttacaaaatagctttgagcaactaggtgtcttttaatgctgtttactacaaaccctaactcttatattataacccccttgtactcccttgcatttattcggcacttgtgggtgtgtcttgttgagtacggtggttgtactcagtcttgctcaatttttcccaaacccagaagaggagttcctggaagatgaaggctttggtgtctagctcgtgcctgccgtcaagcgcctgtggtcgtcgccctagtcttccgctgtttccggtttgtctttgtgtgtgctgggccttcgcctcccatgtaataaattaactatttatgcttccgcttgataaactctgaaatgtatcaacttttggtgtaccttgcctcctgggataaggaataatacacgcacgtaaggaatacccgttgggttatttccggtcgtgacacaaatcatattctatcaaagcatatgcccacttgccaattctcccacttagaattggcctttgcaacatgtgtttaataacatcggcttgacaagcaactatgcatgtactagataacaaataatgcctcaatttggtacaagcatagtataagcatagacaaagtctctctataaagacatacctcgtttcggcatccaaaagacggcggctcaaatatataatgatatactcctttcctcttgcgtcaaaacggcacaaatgactttgtcttcggaggcaatatataaccgaaaaggctttccggctttaggcgctcgcacaacgggtggagtagacaaatatctcttcaactcttcaaacgcctcttgttgttttgccccccaagtaaaatcggcttcttttttcaagcaaagtataggaacaaaatcatcgattttacctgctaggttagaaataaatctcctcaaataattcaccttatctaacaacttttgaacttccttcttgcatgtcggtgcttcgaaatcacgaatcttttctatctttttaggatcaatctcaaatcctctctcatgcaccatgaatcctaagaacttccccgctgacacaccaaaagcacatttaagtgggttcatcttcaaaccatactggcgcatcctctcaaaagctaacctcaaatcggctatgtgtccttccataccatctgatttgacaacaatatcatcaatatagatctctaagataatacctagcaaatcatgaaagatttaattcattgccctttgatatgttgcaccggcgttcttcaacccaaaagtcatgacaacccactcaaacaaaccaacaaatcccgggcatctaaaagccgtcttgtacatatcctcttccgccataaagatttgattgtagccagcattaccatctagaaagctaatcaccttatgacccgaggcatcattaatcatcatgtcggctataggcataggatacttatctttgggagtggctttatttaaatctctaaaatctatgcaaactctaatcttaccgctccctttcttctccaccgggactatgctagagacccactccacataacgatatggcctaataaaccccgccttcaacaaccgatcaatctcctctttgactcggtcatataacaaaggattaaaatgaagaggtggttgcttataaggcctaaaacccggtttaattggaagccgatgctcaacgagctcgcggctaagacccggcatctcatggtactcccatgcaaagcaatcaacatactctttaagtagctcgattatcttaaccttataatcggctctcatatttttgtttacaaaagtcggccttggtttagttccatcacctatatctacttcttccaaaggatcggccgatgtaaacccttttccaagcttctctacctcatcaaaatctttaacggtttcaccaatatcgttctttgtagactgatattcttgcaccctcttttgtaaccactctaaattagcctctttactcattatacaaatttatatggcttagccgtgctacactagccggctttacagagataggtacaaatttgc

SEQ ID NO: 26894 - DNA, 7371 bp, Oryza sativa
aacaagtaataataacaatagcaataataatgtcttaacaaaggtaaataggcatggctaaataaaacagtgataacgcgggaatttaaataaagcgataatgtattaatttaaatcaaaataattttataaactgggattcaatatgctcaaggatgatgtgacttgccttgctcgctttcccaaacatcggcttcaacctccacgaaagcggatcttccgaagctgcagcgtctacacgaccaacggaaaagaaaaggcttttactctaataaactccatataaccagcaggaacaaagcacaaaaatgggttcttgacttcttaaggaaaaattagagacttgaacggtccaattccgagttcaaatggccaagttatggccatttgaagtttatatgctctttaaatgaatatttgcgaatttcttcatttaaattttaattaaaaaaaatagatttattgcgtcagccgaggggaggggcgcgcggaccgggtccacaggagtggggcccacgcggcagcctcacggtccacggtggaccgggtgcacgcggctcacaccgaccggcgccgtgggtcccacgcgtcagccgcacccgagggcgcgggcggctgacggccggaccccacagggcagccgcagggcgcgcccgaaggcggccacgccggcacagccgacgggaggcggcgcacccgcgccccgatggtcgccgccggcgaccaccggcgcggcggagcggcgcccgagagaggggagggaagggggaagcgaatcggcggtccacggctcaccccgggtcgacggcgacaacgggaacggcgaccggagcggaggaaggcggcggcgcggctcgggtagacggggacggcggcgttccggcgatcggcgaccgaaacggagaggtggacgaggtcggcgaggacgcggcgaagccgaaggagacggcgccgaagcgggagaaggtccggggcgacgacggcggcggaccggagctcggcggcgatggcggagagagagagcgacggcgcgagctcgattccggcggagagagagagcggcgagtggcggaaacggtggagggaggcacggggagcgtttatatagggttgggagggggatagagcggccggatgagggggaaacgggcgcggaagatccggccgccattgatgcgccggcgaggttagggggaaagtttccgagcaaatccgagggagagagagagggaagaatggggggaaagagggagggaatcacggggaatatttcccccctcttgattgctcgcggggcggacgggagcggcgggattcgcggcggcggcggcgctagggcacgggcgaggcggcgggagcggcaggaggaaggggatgacgggtgggccccacccgtcagcgagggtggcgggcgggcccgcccgtcagcggcgcgcgcgcggggagaggccggatgggccgcggggaagaggagagagagggaaagggatgggccgagctggcccaagagggagagggggagggaaagggaactttttagggttttctttttataaaatcattttaactttgtttatttcttaataataattatttgtgctctgaaaattccactaaaatttatttacgcattttaggcttttaggaaatatacaaaaatcctccaagccttatttgacttttaactttgcacattttaattgttggaggctttcacacggattttaattattctaggcataatttcgaggatgtattttagagtcattttgggacgcgacatcaaccgattgttcttccttctcctctacatcaaccggtttttccttctctatggacttacgcctccataccggtggtggtcgcaactcattgaaccttttatctctttgctcttcggcctttttctctcttatctcttgagcccgaagacgttgcaaccttctcttttaagtagccgtcaaatccttaggcatccacctaggattcggttctattccaggaggtaaataatgtcctctattaactttgtttgaagacgatgaagccctcacatcgccctttacaatccggtgctggagcccggtcagaccggtcgtagaccaccggtcagaccggtcgtagaccaccggtcagaccggtcgtagaccaccggtcagaccagccagatgcgtcggtcagaccgacttttggagcgcagtcagaccggcctgaggcgtcggtcggaccgctgtcgggtcgacggtcagatcggcctgatggcccggtcagaccggccgtatggccgcggtcagaccggccgactgcgatgagctggtaccggcttcggattttttgattggggattctccaactttatctccagaaggtattggcacatcatgagaccccactttgatggtaattacttccgaagtcctcgcctccaccttgacgcgctttccttccctcctttcttcattagcccgatttttaccataaaaccggccgttgtttggtgaagacaaacgctcatgaattggcctccttggtcctccccacccttggttgaattgcattagaggcatatgattgaacattggcagcgttgccccccatggcatgtaataaggataaggataacttggtggcggcattggataagaaccccatgacatgtcttgtggatgatgatatggaggtgaatgcgaccgtcttggtgaatgaccaaatcgctccctaggaggtgatcttggtcttttacctttgttgcgaattttctcaccaccttgcttctcatatttctccaaaagcatatcaaaagtcactttggtcttcctcggggcattagaagttgaagctccactcttattctccttccaaacgccaacctccggcttctttggcactatcatcttaggccttggctcgccaatgatcaccccttttcccttagtagattcggcttgctccggccgaatcaacaccttcttatcattgaaattaattgtattcaccggaaaaggatcatgatcaagcttcatcttggagccatcggtgaacttcaattgtccttcatctatggccgattgaacctatcgtcgaaacacattgcaatcattagtagaatgagaatgagaatcatgccatttacaatatactcgacgtttcaactcttcttgagatggtatgacatggcctttaggtaatctaatttgtttctcttgtaaaagataatcaaaaatcttatcacacttggccacatcaaaactatatttaacctcactttgtcgatctttgcgaggagtcggcattaggttagagcaaacaaaaggcttatttttattagtccatgaccattcggcaacatatatatcatgatcaccctcctcctcactatcactagcctcagggtaatcaaccacattaacattaggccttttgtcatatggtctaacaagttttttattatccttaacctggctttcttgagccagagccctttgcatgagttgactaacatcaagaaattgttggctatctagtctttctctaagaggagcaattaaaccattaaaagcaagaccagccaaatctctatcagttatattcaagctataacatcggtttctaacatccctaaatctcttaatgtaatcaatgacagattcattatacttttgcttaaccgatgtcaaatcacataacctaagctcagtttctccagtatagaaataatcatggaatttttcttctaattgaacccaaatatgaatagaatttgccggtaaagaagtaaaccatgtaaaagcattaccggacaaagataaagaaaacaagcgcaatttaaaagtatcactattagcctcaccacattgcgccaaaaattgacctacatgctcctatgtggtcttaccatcctcaccactaaacttggcaaattcgggaactctataattacggggaaacggcacattatcataataatcaggatacggctttttgtaaaccctagcacgattcctagtttcgatcccgaatctatccataataatatcactaattatatcctccatattattaggcccatgttgattcagcggtggatttggtggcctaataggttgtgtttgtggcacaatatgattatattggccttgtctagtatcgggacgataccccctagcaacatcattataagcattaggaacatgtgggggaacttggggattagttgtagcagtagatataggaggatcaaatgtcctaagatgatacaaataactagcattagtcattggatctatccgttgtatcggtataatcgcgccggtctgaccggcccagggcccggtcggactggcgtccagaggcacggtcggaccggcctgagtcccagtctgaccggccgtctggccggtcggaccgacggctaggtcgcggtctgagcggccgtcaggcccggtcggaccggtcgtgtacaccgttccatcggttctattacccgtttgatctaaaaccgagtttaaaaactcgagggtggatgaataggcggttttaaaacttttggctaaaaccgagttttgtatgcggaaacgtaaatgaaaacggttgagaggaagaagctagcctatgttgaggtttgcaagcctagggtggtaatagcacaaataaactctagtatgtaaacttactcaaagtaaatttgcacaaaataaaagagacaggtgacaaaggatttttccaaccgatatttggaagtttgccaacttcctacatcaccgttgaggtaagaccaacttcaccgctcaaaccacgaagccaccacaagcccccatcgtcaaggggtgggcaaggtgggagccaacccacgaagtggtctcccaagcctctctcactatggttgttctttctccactccggagatggcgaacaccaagccactcataatcaacactgggcctcctccacaaccttctcggagaggtcaccgggcaactactccaaaccatctaggaggtggcaacctaggatgcttgccgaggatgatcaagtgtcacactagctctaacaattaagcaatgcacttggattagcttaacttactctctaatacctcactagataaactaagtgcacaagggtgtgtgagtccacatcagtagataatgcaatcgagtaccaaaacattacccatactgctggggagtgggtatatatacccccaaccatcaaaactagccgttggagtcgaaatccccaacttttgtgctctgccggtcaaaccgccatgggatggccggtcagaccggacatttctagccgttgcagtgcattaaatgcactgacacaagggggctggtcagaccggccacgactcggtcagaccgccaacatctcggtcagctggcctcggctctagcggctctggatcaccaagacgagacctctcttcaaattcagggcagcggtcagaccgctatgggagctgcggtcagaccggacaacacactccggtcaaaccaccataagggttgcggtcagactgcaggtcacttttcagctcaattggacgttagtaaaacgacgatatctcttgactcgggtctcggaatttgactttcttggactctatggaaagcttattcaaagggttatccaactcatgaacaattaatccaagatacacaacttaatttagggagaaagggctcacactccaaaggatatccatcggacatacccacaagatgtcgctcactccttttggacatgcatgcccacttctctctttgtttgggacttgagaaaactcatcacacttggataaacatgcccaccaaatgcacctacatgcatataaactaatatggcacaagatcaatgcgttcgcttcatagacccctcttgatagaatgacgcctatctagcaagtcaggtctacaccaaacactaacaccggggaaagactatgaaaacaatattagttctattatatctttgccttgtgccatccaacttggggtcaatgcttgagctaagatcaacactcgtgaccattcgcttgaaccatatttatgccgaagtcttaaccatcctttgtcaagactttcttctcatcacaatcttgacttcattcttgtcaacatggcgatgtccttggcttgttgaccatcaacccattgtgtcatccattagcctcatcatggtgggacctattcctttgcgcagctcaaaggagaacattagtcccaacaaatcggttgtcatcctccacttgatgaccaaccggttgcatatgaaagatatgaatatgtttgttgagtattcattatacattaacaccacaagtgccatatatatactcgtacgcaagctcaagtgcaaagatccgatataaataagaggagaataacatggatatagaacatacacaataaatgaataggatttgcaccccccaaatatatgcatacaaataaatttataagaggggcaagtgtatgcataagtaaagaagaagcaatgaggtttatcctatacacatggagaaggcatgtagcaatgataatgataaacaaaaacacataccttcatgatctccatgttctcaatgtaaaggagactaaataagataagactcaagtaaacattagtctcacacttatataacaataacatgaaaatcatatatatatgaacctatcaaaaggtaggagtaagaagtgatacatatcgctttatctccatgcatttcatccttatcatgattaaggtccatcaccaaagaatgcatatctaccacatctcatcattgggaaataacctagttgacaacttataaaaaagagaggttaatcccataaacattggtttatcatctatcaccaaagtaacaattacacaaattgtttaatcccagatctttcaatcttttctctctttagtgatagataataactggatataacaatatagaaagatgagatgaacgataattttaaatcaagctagagatcttataataaacaaaatataaaataaactcccccttaagatatgcatacatatggatataaaggaacgcatatgcacataatcaatcaagatcaatgacggagctcacactatattttggatccacaagagagaccaagttagaatatatgaagtttaatacatacctctcatcaattttattttcatatccaaatgagactagccaaagaaaagctcataaaaacattagtctcaattaattagatttgtcattaattaccaaaaccaaattaaggcacatgaacttacaatctccccctttttggtgattgatgacaaatccattaataataaccatatttggatatgaaggatataaatcaacattatatt

SEQ ID NO: 26895 - DNA, 3954 bp, Oryza sativa
ccaaaacggcggcggaagaacaacgaacgacgacggcgacgaggaggaaacggcggaaaccttcgggttgtcgacggcgacgaagctccggcgatctccggcgacggcgaagggacggacgaggacggcgacgacttggcgagcacgacggaggtcttcccgagcgacggcgacggctgaaacgacggcggcgcacggctggagcggcggcggcgacggcaaagctagggcacacggcgctagggtttttccgacgacgagaggcgaaggcgaaggtggcaacgggtagaggagacaccgagggtccttttaaaggggctcggaggcggcggcaaaggcccacggcggccggcgacgaggaaggaaagatcgggaagaacgaatccgagacaaactcgaatccgacgctttccaaaacgatttagctaaagattccaaaggagaaaggtagaggagatcccgaggatcatttcccctctatcaattcggccggagaaggaaaggagcggccggatttggaaaggaacggcggcggcgcgaaactagggtttcgggcggcggcggccggaggtagacgatggccctgacaggtgggacccacctgtcagcgggcggacgcgcgtgcgcgcggcggcggactgggccgaactgggccgaagagagagagaaaggttttgggccgactttcggcccaaagccaaaagagactttttaaaacctttttcaatttaaattatttctttaatgcaattccatttattaaaaatactttcttagctcaaataaatcccagaaaaatctaggaattatagaattaagcaaagtatttaatgaaattttatctggcccctttttatattggaatttattaattaaaactagatcttctcttcaagacttttaaaattatttctaaaaattccatttaaacaacaatttataaattttaaattttcagggtgtgacaaacctaccccccttaaacagaatctcgtcctcgagattcggaagaactggcgaacagatgcggatgagctgacttcaattcatcttctcgttcccaagttgattcttcttctgagtgattactccattgaactttgcagaaacggataactcgattcctggttcttctctcatttgtttccaggatacggattggtttctcaacataagtcaaatcctcttggacttctatctgctcaatattagcttcttcggtaggtacccttaaacatttttttaattgtgacacatggaacacattatggactcctgccaaagattgaggtaattctaactaataagcaacctctcctcttctactgacaatcttataaggtcccacaaaacacggtgccaattttcctttggtgtgaaaacgatgaactcctcgaagaggcgtgacacgaagatacacatagtctccttcttcaaaactcaaatctctacggcgattgtcggcataactcttatgtcgagactgagccactcgcaatctttcttgaatgacctttaccttttcttctgcttccctcaggatatccgtcccgaaaacctgacgttctcccgtttgatcccacaaaagcggagtgcggcacttccgaccatacagtgcttcgtaaggagccatctgtaaactagcttgataactgttgttgtatgaaaattctgcataaggtagattcttatcccaacttccaccgaaatctaaagcacaagctctcaacatgtcttccaaaatctgattcaccctttcggtttgtccgtctgtctgtggatgataagcagtactaaagttcagcttagaacccatctcttcctgaagtttcttccaaaaatttgaagtaaactgactgcctcgatcagacactatcttcttagggacgccatgcaaacacacaatccttgccatatacaattccgccaagcgacttccggaataggttgtctttaccggaataaaatgagccactttggtaagtctgtcgactatcacccaaatagagtcatggcctgatgacgttctgggtaaaccagtaataaaatccatacctatttcttcccatttccattcaggaatcttcaaaggctgcaacaaaccggcgggtttctgatgttctgccttgactcgctgacaaacatcacatactgctacatattccgcgatttcacgcttcatacttgcccaccaaaatctttccttgagatcctggtacatcttagtactaccagggtgaatggagtataaagtatcatgagcttctttcagaactgcatcttttagatctttgttgtcggggacacagattctctcacccaaccatacagttccttgctcatcctccaagaaaccaatagcttttcctcttctcatattcttcttgatctcttgaatatcaggatcattaatttgggcttctctaacttgatcaattagagtgggcttcgcttctaaggctgcaacgaaacctctaccgacaattcccaaatttaatctttcaaattccttgcataattccaatggcaactgtcgtccttctgtagcattgcaatagccttttctgctaagagcgtctgctacaacattagcctttcccggatgataatgaattcccatgtcataatccttaattaattccaaccatctccgttgtctcatgttcagatccggctgagtaaagatatactttaaactcttgtgatcggtgtacacttctgtacgagtaccgaaaagataatgacgccaaatcttcaatgcatgaacgactgcagctaactcaatatcatgagtagggtagttcttctcatgcggacgtaactgtcgagaggcataggcaaccaccttcccatcttgcatcaaaacacaacctaacccaagtttggatgcatcgcaatacacttgaaaacccttctttggatcaggcaaaatcaaaataggagctgatattaagcgacttttcaactcttgaaaactctgctcacattcttccgacaacttgtacttcacatctttctgaagcagtcgtgtcatgggcttagcaatcttggaaaaattctctataaaccaccgataatatcctgcgaggcctaggaaactgcgaatctctgaaactgtctttggttgcttccaattggttacggattccacgttactaggatcgacggcaactcctccggctgagatgacgtgaccaaggaatttcacttcagacaaccaaaattcacacttgctaaacttagcatagagttgatgttctcgtagcttctccaatgcaaggcgaagatgttcttcatgctcttctttggttcgagagtagataagaatatcatcaataaagaccaccacgaacttgtctaggtattccataaacaccttattcatcaaattcatgaagaaagcaggggcattggtaagtccaaaagacataacagtacattcgaacaacccatacctagtggtaaaagctgtcttaggtatatcttcctctttgattctcaactgatgataccctgatcgaagatctatcttggagaaaacagtggcacctttaagctgatcaaacaaatcatcaatcctgggtagtggatacttattcttgatagtcacatcgtttagtgcacgatagtccacacacattctctgagtatggtctttcttttccacaaaaataaccggagctccccatggtgatgaactcggtctgatgtatcctttctgtagcaaatcatctacttgcctcttaacttctggcaactcattggctgccattcgataaggtctcttatggatcggagttgttccaggtaccaaatctattctgaactctatatcccttttaggcggcataccaggtaaatcatctgggaacacatcaagatactcccggactataagaatctcttccaaagatatctggttcagtcttgaccttaaagactcagatgacaatg

SEQ ID NO: 26896 - DNA, 2736 bp, Oryza sativa
cggcttctgattatttccctgttgtgtcttgaattgagcaatccgacgtttcttctgctccatgcgattgtacttgtcctcctgacgaatagccttatccactaatttctggaaatcaggataatctccaaccatgagtgggtaagaaagctcatcattaagtcctcccaaaaacttctcctggcgctcttcatcattgcgcacatcttccggagcataacgagcaagacgattgaactcgtgcagatactccgtaacaaagcgagatccctgggtaagcgacctgaactccttcttcttgagagacactactcctgatggtatatgcgtcttccggaaagcagcggtgaattcaagccaagtgataggttcagtagtagtcctattcaggcggaagtgatcccaccattcagaggcagggccatgcaactgatgtgatgcaaatgagaccttctcctgatcagtgcactgaagtaaatccaacttcttctctatggcatgcagccaatcactagcttcaacaggattagtggtactagagaaaacaggcggcctcacacgaagaaatcctgctaacttgttctggggagatgcatggttatttccttggttttgctgattctgaaattgctgcatcatcatgtacataagctgtgtctgttgagcaagaacttgggcaagagtgggattctctccattgttgttattggggttgttgggaccattcccgctgctgcgagtgttcaccatctggcatggacagggcacaagaagagaaaccggggaaactacttaggacagagaattactttaacttttattgatcttaactgagtttcattattacaaactaaagactctcacaccactaaactcaccaacttcctaacactcaaaagcaaacaaacgcatgcacttacatcccaccactgatgtaaatcacatgcgagccacacacaagcaaactttaagcaagcaaactaacacaacgatctaagacaacgacttaacaagtcactctagttcttccaagcatcggaggtcgattgaaggctcgtctttatcatcttgagttgctacccactcaatcttggaattgttgcgcttggattcttcttcttcatcacttatgatgatgaccggaggatccgcttgagctggggcaacttctttctccaccacacgaacctttggcgccagttgatagcgagggacaaatagagctctcttccttgcggtaagacgaatcctggccttctgcggcggtgcttctcccttcaatgcggctaattccttctccaaacgatccaccttgtcttctaacttgcaaatcttaccacgattccggtcttcacgatcttgagcggctaacacagtctccgcacgactttcatccatagcccacaacatctcaaccaaatgcttcgtggtagcatcattctcaattccttcagtctcaaggtactggcccggtcacttccctggggttggcgaggatggtagcgatactcagtgtcggccaactgatcacggtagcgatcacggagctctcctatggcgatccttgccacttcctgacatgcatggatgtagtttcttcctccagcttcaaacatcactgaggggatatcttcactattactgttcaaggtgactttgactcggcacttctcttcatgacgatcatgaggaatctgggcataaaaaggggcagtcccaaatccaatgacaaaggacatcgtacgcaactcctggacaaaaccctcaacaccaaacaggtactcaggcttgtaacgcggcatctaaagacaagtgaaaggagggagttaagacctttatccaattaatagcacaagtttttggattgatttgaataaagttagaaaatcagagtaaaaaggtaagtaaataaagtaaaccaagctttgcgagataagttaaaacagttggaaacgaggtcacaaattttgtaattttgaataactggtttcaaaagaaataaaagaaagttatgaaatcaacatgctaactttattttattgcagcaagattaaataaaaccatattgtaaaacttttgctggtaaataagccattagtacagtaatggatgtacagtactaataacactggaataaatttttaaatgagaaccattaaaagagattatgaagtgcatgtgccattagtttggtttaattaaaagagaaagggaggagaacagttctacttttccaatatttttagagggcttctatgggtaaccatttggcataacctagggtcaaagaggctctgataccaacttgtcacgcccggaatttctatccaaaattccaaacgcttacatgtgtgtgaaccctcatccaggaatcagccgaggcacacaataacaaattgataatagagtacaattattactctaattaataagcgaataaaatgtcgttacagaggtagatagttcctctcaatcaataaagatctaagcagcggaaaataaaataaacggcgcagacggctccactccacaggcagcttgaccaaggctacacctattcctccactccatcagaatcattgtagaactcttcctctgatgaatgattgcaaggtgagtatatgacatactcagcaagccacgcagcaaatatgcaagtgcacaggataacaaaggatggcataatagggttgcatttgcaaaagcagcatttagcaaacatttgagaatttgata

SEQ ID NO: 26897 - DNA, 679 bp, Oryza sativa
atctaccaaggcactgacttggatgccctatggtggatctagccaaccagtctttcagccgtcgctaccacaaggcattccctctcaaatcggctccgatggatgagtagtggaggagaaggtagtgatgagtgagctagatagattggagaagaatatatgttcagattctccgccgcctggccttcgccctcatgtggccattcgggacaggaagacaaacgcgaccgcagcgcagatatgtggccaggaagggcttgggaggagataacgatgtgcctgcaattttacactttggtcctgcagtggattttaatttataaatgagccctcagtctattatcagtacttcagtaatgaaacgtgtttagtatttaccaaaatataatgaatctccttaggatgattgtaaacctttggatgttctaaataaaaccgcatcaaaggaactttccaaatgtgtaatatttaaatggatttcacaataatttaattaacttctgtaaaaatcaggcaaaaaatatctaattagaaatttgacaatatatatatgcaatctattttcaagtacaataaaaaaaatataccatctattcagcttatcatccgtaccaataatttcaattttaaaactgccaaaaaaagccacattgttttttatataaccgtactaaaagta

SEQ ID NO: 26898 - DNA, 617 bp, Oryza sativa
aaagaaaccacttacttacctttcaaatctgatgtgcaaagaaaaaggaaagagatcgaggaactacatggacaatatcagagtatataactccatgtttgcatttacctccatgggaggaaaagttgacagagagataaacaatgggtctggaccatatgttttccgcatgaatggccagaactaccaccgaataggtactctactgcctgaagaaggcgataaacctcgctgggcgcaactttacatctatgacactgagaacgaagtcaaaaacagaattgacgcatcaacatcatcccataatagagaatcaatagattcacacattgtcttaggcctaaagaacatgctggacagagaaaacgtactagcacagacattcagaatagcaagagatagattcaaagaaggtgactatcataatgtaagcctacgacttataaggaagcgtggtggagatggcaggcagcataacatgccatcggcatcggaagtggcagcactgattgttaatgacacgagtgagaaccaaaaaggacgtgacataattgttcattataaagacacagggcccagaagaatatcagaaaaccatccaaaattgggctgcagga

SEQ ID NO: 26899 - DNA, 21754 bp, Oryza sativa
  unsure (1)..(21754): unsure at all n locations
ctgcagccccaagacgggtataaggagagcagaattttattggacctagggtctatttgaaagagctccaacttctaaattaaatttagctataggatgggtctggagtggagttgtggagcagcctaaacccagctccacctctttaattcattttgtgagagtactccaccggccagctccactctcattttagctaggttgagctaaaactgtttggctggacttcatctctagaaaaagttgagctggagctatatatcaaacagtcccttactatgcgtacaccacaacgcacttatgttttcgttattgctttacaaatgcgtggacagctagctatatataatataacctagcctagctcttctattactagcaaaagtatatgacgaaatgatcctattcaattccctgctagcgcgcgcgcgcgcgcgcgcgcacacacacacacacacacacacacacacacacacacacacacacatatatatatatatatatatatatatatatatatacggtaaatttgtttggggctccatggggcctgggcaccattgttgaaattgagtatatatccaattcaaatgagtatgaaactttttcaattacttaggtattaacattaactactttactaactagttcaaagcatgtttgtactgaatttgaacttgtttttgttagattttgattctaggtatatagcatccatacatataattagttaggtatgtaatcatggattgtgaaataaagttaaatttgagttgttttgttgataggtatagatatgaatcgaattattataactaggtatatactcacaatttgaaaatacagttaaaccatgggttgtctcatattcagtcacaaaagccaatataccctagctctcatcacaaacaagtgatgttctatctgaacaatccaatagtaatgggatcaattaagccatgactactctctgttacacgaactgatcatcctgtactcgatgttgggcaatataattcagcacggtggaaatgcaaaaggttggtcgtctggcaacgcggagcggccgtgcagggatgttgtctcctccaggaaagttctccacagaaatgatccatgtgaagaacgtgaantancaccanctgaaatctgccgttcccnaaggccaaactgcagaaccnacactcttgacaccatgtagatgaggtaggctcgccattcttgtggataatgagtcagaagaggaggaggtgcattttacacacagtccccatgcctcctactcccaaaagtgcatagcagaagaaggtgtgcctgcatgtagaactgaagaacagaagaagcataagggcatacacataaatacaagagttgctaccgtccagcaggcagcccggtaccaaatctaggcccttgattttgtccgatcgaatggacagcaaggtctagtacctccaggtacatttttgtccatgcgatggtaccagcactattgagagaggtggaagggcaatactgtattttcgcgtgtgaacggcaatattgcattgcctaaatctctcgtccttattgatctgattccctcgatatatggtggcggcggttacagccaaggttctggtgacagcgcaggttgtgctccaggtcgtcggtggtcatggagatacctgatgtggcggtggtgctccattagtcgtggcgaagagaggataaaaagagcgatggggttggatgatgagaatgcggcggtgcgaggaagaagatagggctcgcgcgatggggttgttctctctcgctcattccgggtcctaccccctcaagttggacagctggattagtttcagtaccacctggtactggtacctctcggtacaaagtgctggatggtagcaaatctctaatataaaggatttttgaaggatgtggcacatcctacgaatctagacagtctaaattcctagtactaggatgtatcaaatccatccaaaatctcttatattttggaatggaatgagtattataagtcgtttgacttttttctggtcaaacttttttagtttgatgaactttatagaaaatatagtactaatttgaacgaagaacaaacatattatcaaaatacatttaattttagatttaatgatactaatttgatatttcatatatatgttactagtttttctataaaattaatcaaacttaacaaagtttgaatagaaaaaaaattaaacgacttgtaatatgaaacgggagaatatttaactaggacgtagcccaatttcatgatcagaatttaacgagttgagtcagactagtccactaattaagctgcctttgtgtcagctcctacagtcctatctcctcatctccactgtcaattcgcttgctaagccgaatttgcggcgagcatggcaagaacaatctccgtggctatggaggggaaatccgtgatcacatgttggtactcctcgctcgccatgaccgtcttcaacttctccggcggcgacacgacgaggaacctcaagatggcctccttgagccgcgggcagccatggagctcggccaacgccagcgacgtcgccaccgtgccgacgtcgaggtgcctcaccatcttgtcctcgcacaccttcttcagctagcctgtccatgtcgtacctgtccgccgggacgagaaggtgcggcgccataatcaccgtgcgctcgtcgtcctccatctccggcagctcgtcggtgtagacgaagtagagcagcgcggcaaacacggggaccttcatgtcgtcgacgcggatggtcctcgcggcgtgctccttcatggaggagccgaggagctccgccctgaacaccggcgacgccgctccgcgaggacgcaccggtgcgccgggaacgtctcgccgcggaccctgaacctcacgtcggccgtctcgtcgtcgaacaggaggcgctcggcgaggtggcagcccaggacgggcggcgggagctgcacggcgacgagccccctcacgcggaggtcctgcacgttgaaggtgaggtcgcaccggatggcgaagcggttgccgacgacatggccggacttctccagctcatccctcttgatgaagctattgcaaacccatcgatcggtcttcttggagatggaacacttgtcgccggattggctgtaccgtgccacccgctcgccggcgagatcgagcagctgatcttgacactcgcgttgacatggacgctggcgcagggtttgaaatttcgccccccaccggcatgctcaaatttcgtccgaaattttcagttttttacagttttttgtgaatttggtcaaattttgttcaaaattcaaaattattcaaattcagtcaaattttcaaataattttggcttgaaattttcgaaatttcggtaacccccggcataatatacaatttcgaaattgaaaaccctgcgccggtgacgaggatgcagtcggaggctcggagcgcgtaccagagatgcgatgtgtagccgccgacttggaactcgtcggagtcaaggtgtttgccggtggcaatcatcaccgtcgtcctcgtgtaaccatcgattttgaggacgtggtagctagccaacggtgacggcacgacggcggcgtcgccgggtttcttcttggcggtgtgagggtgagaaccaatcgtacacatgattaaggtgaccgaggatgcaatagatcgatggatgtagttttgcgtggcgatgtacgtttattttctcctttatatgaaagtggttataactgccacacaaatagtcaagtaccaggtatcctctatagttcatcttcagataaaattttggtagaacaccaacatttgctttctctaggatcatagtaggatttgaaattttgctaaggtagctttaccaatccataattcatccaaggaatcgctatatagttgtcgacagaattttgcggaaaaatcattctatttctgggctgccggattgtgatgagattcattcgagggggagggaaacaaaaccacgtcgtgtgaggaaagatcgaaccgatgaccttatgcgcacaggcgcgcatagccaattgtcccacatgggtttttgaataattatgtactactccattaaaaaaaaaccctagctaggattgggttttttttttacgaagggttacaaaatacatataagttacagtgtggtcacaatctagttaaaaaaatataatatagtaacatttgaaagttttttactttaagaaaaactagtggtctactttagatttacaatatatagtttcacaatattattttttagtacaaaattaggtacctcgaaaccttttcttaagaccggaaaatttctcctgacgaactcacgatcatgaagcattctaaacaggagtataacataagctactaaattaatggcaaaaaataccgatcagaaaaacatgctccaaacttcacgaatttccccaaaaaccgtgcacgtcgctgcctacgctgtggatcatcaccggtcgtcgtcgaatcagtcatcgtcgtcggcgtcgacatcggcgtcggcgtcatgctagtgtcgtcggcgacgacacgcctgcttaatttgtcctcgcagaccagcttcagcctctccactttgtacttgtcagccgccgcgatcagctgccgcgccatggccggcacgtccgccgacgccatctccggcagcgtgtcggtgtacacgaagtgcagcagcgccccgaacgctccggcgtccatgtcgtcgacgtcgatgacgcgtgttccgggccttccggcggcggcgggccttaggaatccgccacggctatatagctcggccttgaacaccggcgaccgggcggcgagcacgcacctgtgcgcggtgaacgcctcgccgccggccaccctgaacgtgacgtcggcgccgtccccggcggagagaaggcggccgaggtggcggtgcatgtccggctccggcacggcgagggacgacgccggctcgacgcggagctcgatgccgcccatgacggtgacgtcgcaccggacggcgaagccgtcgtcggcgaggtgccccgacttctcgaggtcgccgtgggtgatgaatcggaggaatccccaattcttgaatccgtcggaggaagggaagctgtgcacgctgctgcggtaggtgcgcgacggcaccggctcgccgtccttgttgagcagcctgaacacgaacttcgccttgacggcggcggcggcggcggcgccattattgcggccggcggcggcgtcctgcagctcgagcatgacggatatggcgtcaggattctggttgctgcggtcggtgccattggggtagtacctgatgcgccacgcgtgatcgccggcgtggaagcgggaggagtcgatgctgtcgccggcggcgaccatggccttagtccgagagtagccgtcgatcttgaggatgtggtggccggtgggcttcgtcgtcgcgacgatcgtcgacgttgagccattagcttcggctgcgacggcgcagctggttgaagccgccgcagacgacgacgccgccatggtcgcagagatcgtctttgctgttctctatcgatcggtgagacgacgactagttggttatgtgattaactagaacatggaggagactccgatcttatctctgtaagcaacagatgttgcgatttaaattacatgacaaagatttccagaatataaactctctcagatcgaaccctgaaacgtgcaaaggaaaggattcctattagagtcagggttcactctatcggttcaggggtttctatcaggggtcaccgaaatcccgaaatttcagaaatttcggaaatttcggtccgaaatttccgaaattttgaacaaaatttagttgaatttgaacaaatattatccaaattcatgaaaaaattgaaaaattcaaaaatttcgactgaattaatatcgtatcgggggtcaccgaaatttcggtccaaaatttccaaccctgattagagtacgtcttgatcggtaataattttcctcccgcatgcatgggtcccactggtaatatatttttttttgagaactatacagtaaaacgctgacactcataatgcacgagcactcaccaataacataataaactatcaatttttacgtgccatatttgtcatagaagttattttgtaacgcaaaagcatatgtatttatcctctgtagataacatagaggctattcagattatagccaaaataaaccttaacaaattttgccaaatgccaaaaatttgttcaagttggtaaaattaccaaaatcggacgttgtttcactcaatagatcgaaaatgtttcatttaatagataaataattttcaatcttttaaaaagctgaaacacaaccaaatcacctcatgaaatattttgctacaacgtatgaaacaacggtttccaaaaaaaatctgacgatgtttcaacctatataaaaataatgttttagcaaatagcgaaagaatgtttcagttcttaaaaaaagtgaaacacgatcagatcactagatgaaacaatttagttcaacgtatgcaacaaacgatttaaactcattgcaacacttaaaccccgtgtacatcaacaaaccacgtatccatcaagatgaaattattaaacagtatcaaaagtccactgcaatatttaatctacacatagagaaatatcacgagtgcactagctgaaacattgttaatgaaacaaaaaaatgaaacggatccacctgataaggcgtttccgtgatatgccggcggtttgtagcaatgggcacgtgcgtgggaggatggaatcggcacgcattgggtgcccgatcgccagcatttccgagatagataagttttatcataaaaaatctaactagtagttaggctcacttcgccgattacaaagcatgattttatattaaaattttacaatggcacagatcttagtaaagcatctaatgcctaataatactctaccgttccaaaaatcctctatgcgctagctaggaactcaatgtgcagcaaacattgcaagaatctccgtggctatggaggggaagcttgtcaccaggtgctcatacccatcgctcgccatgaccgccttcaacctcgccggcgacgccatgaacctcaggatggccttcttgagctcagggcaatcgtgctgctcggccaacgccagcgacgtcgccgccgtgccgacgtcgaggtgcctgaccatcctgtcctcgcacaccttcttcagcctctccatgtcgtacctgtccgccgccaccagcaggtgctgcgccatcgccgccgcgctgccgccgtccagctccggcagctcgtcggtgtagacgaagcgcagcagagcggcgaacacggaggcgtccatgtcgtcgacgcggatggtcgtcgcggcgtgctccctcatggggccgaggagctccgccctgaacaccggcgaccgcgccgcgaggacgcaccggtgcgccgggaacgtctcgccgccgaccttgaacctcacgtcggacgtcctggcgtcgccgaggagctcgccgatgtggcggcgcaggaggggcggcggcacggcgacgagctccctcaccaggcggtcctgcacgttgaaggtgaggtcgcaccggacggcgaggcggtcgccgacgacatggccggacttctccagctcatccctctcgatgaagctcttgcaaacccatggatcgcttgccttggaggtggaacacttgtcgacgggttggctgtaccgtgccaccggctcgccggcgaggtcgagcaagctgatcttggctctcgcatggagacggacattgtcgccggcgccggcggtccggacgagagcgaaggatatcgagctcgagaactcctggtcgtagccgttggggtagtaccggagatgccaggcgtagccgccgacgtggaactcgccggagtcgaggtgttcgccggtggcgaccatcatcgtcgtcctcgtgtaaccatcgatcttgaggacgtggtggccgctcgcctcggtgacgacgatggtcgagcacgacgacggcgatggctggacgtcggcggcgccggatttcttggtagacatggcgatcgagatgtgaacgtgcaattaatcaatcgatttgttttgtgattgggtatgtgtatggccatgtaattaactttgttgttcctaaaagtggtttgagtccaactccaactccgatataaggcggggctgcttctgacaatacacatacgcattagtttttgacgtggaacctaagcaatttgattaatccaaacttaatatacacagaaactcaaaagactttctgattgtggcctaaaattttcaacgctgtttagtaaaaccttcagttaatattctgaaattcacaaaactttcgttttgattgcaaaactttcaattcaattagcataattttgagttatcataataaaaaaaaaatattcaactccatttgcaaaactatcaattcaagatcaaaaagttagaactcaattttcccaactttcaattcataatctgaaagattcaactctaaaaactttcaacaagaaactaaaatatttttatgcacaaatctctgaaaagtttcaattcataattaacctcagcttccaaattttctaaaaatctcaaatttccaactgagggcagctcatctgtttcctgtccggtggctatcgcacaacgctgatatctcgccagccggtaggagaaagatggtgaattgaagctccctaataaggaagagaaaaaggaataggcaagacagattttgggagatggaagaatggaatgccatcgaatcaacatctaggtagtggtggctcaccaacagccactactagaaaaacgatttttcatggcgtttggaaaatatttttcatagcggctaagtgaaaaaaccgccagcgcagaaattcgcgggggtcgggggtcacgggccgctagcggaaactcatcttcactagcggtcgccttaaaccggccgccagcggagatatggtattttcgctgtcggccctcttaacttggcagattttcgctggcggtaggttaagaagaccgccagaaaaaatagccctatttttgctggcggacttgttaccattttcactggcggataatggagagtgcagcctaaaaaatcacgccatcaaaaaatcagcgcgcgcatccacctacccgtccttatcctctctcctcctccctccatatccaaccctctcctcctcccttgtccctccagatccaacacctcctccctcagatccacaggtggcagcactggcggacacgggcgatcggaggagagggtggtgatgagcttggggtggtccaatctcggggcgtgggcggcaagctcgggcgtgggtggcaacgcatgggcgcgggcgacggaggagagggcggcggtgagctcggggcggtccaagctcggggcgcgtgcagcgaggttgggcgtgggcagcggcactcgggcgcgggcgacggaggagaggacggcggcgagctcgggcgtgggtggcccgggtggcggcactcgggacggggaggcgcgaggcgacatctccacaggtctctctccaccgctcctcactactccccttcccccgccgccaccaccccctctccctttctcagatctggcgtggcgtggctttgcagcgctggtggcgaggcggaggtggtggaggcctacggggctctgtagtagcgtcgtcgaggcggaggcggtggaagctgcggcggggctcgacaccggcggcgtcgaagcggaggcggttgaggccgacggggctcgttagcggcggcggtgatggtggaggggacttcatggacgacgatgacaacctcgagtgcgacgacgccagcggcgatggttctctgtatttgtgatgtttgtaatatttgtgatgatatttgtgaagcactatatttggattgatgcttggtgttcaaattttttgttaatgtgttgatatttgtgatgcttcaatgcttgggtgaatggaaattttttgctgtaaattgttcatgtaaatttatgtggatttatggatggagcattgatggaggtggacggagcagtgcttttttatatatatttttgcttttcaaatttcctcttcgctggcggctagggcagctacatggtttttatttttgctggcggtcgatttaacacagccgccagtgaaaatgaatttttgctggcggtcggtggaagataactgccagcaaaaatgtatctttgctggcggctggcttaagacgaccgccagcgaaaataaattttcactgccggtcgataaccgctagcgaagatcttgatcttcactggcctttactttgtggcggctctaaattctaccagcgaaaacctaaaatgaccgccacgaaaaatggttttcgtagtagtgagccaccactactttgataaggtgttttctaattcgctcgctagtgtatgtgagagaaatagtcttccagcctaatgcatgcatatgattttaaaaataaacagaaagtaattaacaatactagagaaacgatttttttatgctaagccccaaaacacaattatcccgactagattaacaacctgtattaaagatagtttagtactggttctaaaagcccaagtcacgcccaagtcactagaaacatctttagttctgattggtatcactaaccgatactaaaaatatatcttcagtatcggttggtaacaccaattcatactaaagatatttttaagtaccggttggtgttatcaaccagtactaaagatatctccaaggttaattcaaaacgaaagcatctttatacaagttagatgtgtattgtagggggatggtcacacgcgtaagggctcaggtgagagatatttcgttcgaatcacacatatttttttaacttagtatgcatctttagtaccggttctcggttgctactgccggtactaaatgggggtttttaaccggtattaaggatcgtttgagatctttagtctcggtttctacaaatggtactaaggccctatttttttcagcttgggattattataatccagattattgagagtaagctgaaagaaacagacaacttattgaagtagcttattataatctggagcccagcttattataatccgataagctcatttaggtgagctttttccagattattgggtgaaaaattacccaccatgccaccccactccctctttagacttgcaaactaataatctaggctctaataatctaagaaagaaacaactaaccgattattctactacagattataacaatctagcttatagtaatctgactcaataatctagattataataatcccaaactgaaaaaaaacagggcctaaagaaggtttttaaccggtactaaagatcatttcttcggcagtgtaaggaaaaactgacaagatcgtttctgaacaaatttagttatatttattcctatagatgtaaatcgaaattatccatgtacgtttgtatatggacttatattatcacaatatgtctaaccattttgtttataggtttaaactgcatacaagaaactagtgcaattgcatgtatgggcaaaagatccttaggacacccaccagaaaaaaaaacccagctctaacacatcatggctcaaaacgaaaatatctaacagctacccaaagaatcccctagtttcaaggatacgtcaaatgaaacatctactatcacaaactacggctcaaaactaaaatatattcaatagctgtctaaagagtccctacatactacggtacgtacctctaccaaaaaaaccattttcacaaacgtggatatttttttttcaggtggataggtccctcggaactaaacggccgcctacgaaaatggcaacgggggtgagaacgtctttcgtctacgaaaatagattctttgcttacagaggtggatctttcccccacctgaaaaaaaactatttttggttgtctgaaaaaacgattttttagtagtgcattgcaatctcgcaattcgtaatgtttgacattactaacttttggacatatatttatttttttttcatatttaaaagattgcgtaattatcatttcacaagtatacaattttagcacacaaggtaggtggtgttgaccatctatcgcattgtggaactcacaatcatgaataacaaaaaactgttttgtatcggccatccttgtatcagcgctgaagtctctacagtatgatgaaactcccagatgtgcaattttcaaagaactgagccttcgcatctagggttttcaatttcgaaattgatctttctgccgggggattgaaattacagaaatttcgaatttttttggcttaaattatttgaaattttgactaattttgaatggatttaaataaaacacgaccaaattcacaaaaagttgtaaaagactgaaaattttgggcgataaacgagcttgccggtggggggcacgaaattaccgaaatttcgaaatgaaatttcaaaccctgctcgcagttcgcacctagatcatgtaattctgggggtagaaaaagagccacagccgttatttatgtgagtgaaaacaaactttaaaagaacaaacaaccagctactaacttcaaaaagatccccttaaaccacggataacgctgtggcatatcacatgtagctgctgaatcagtcggcgtcacgcttgcgtcaacacgcctgcttaatttgtcctcgcagaccagcttcagcctctccactttgtacctgtcagccgccgcgatcagctgccgcgccatgcccggcacgtccgcctacgccatctccggcagcgtgtcggtgtacacgaagtgcagcagcgccctgaacgctccggcgtccatgtcgtcgacgtcgacgacgcgtgtttcgggccttccggcggcggccggtcttaggaatccgccacggctatatagctcggccctgaacaccggcgaccgggcggcgagcacgcacctgtgcgcggcgaacgcctcgccaccggccaccctgaacgtgacgtccgcgccgtccccggtggagaggaggcggcccaggtggcggtgcaagtccggctccggcacggcgaggagggacgccggctcgacgcggagctcgatgccgcccatgacggtgacgtcgcaccggacggcgaagccgtcgtcgacgaggtgctccgacttgtcgaggtcgccgtgggtgatgaatcggaggaatccccaattcttgaatccgtcggaggaagggaagctgtgcacgctgctgcggtaggtgcgcctcctcgtcgagcaggctgaacacgaactgcgccttgacggcggcgccgttgcggccggcggcggcggtggcgtcctgcagctcgagcatgacggatatggcgtcgggattctggttgctgcggtcggtgccattggggtagtacctgatgcgccacgcgtggtcgccgacgtggaagcggcaggagtcgatgctgtcgccggcggcgaccatggccttagtccgggagtagccgtcgatcttgaggatgtgatggccggtgggcttcgccgccgcgacgatggtcgacgtcgagccattagcttcggcgacgcagcttcttgaacccatggtggcagactggcagatcgtctttgctgttctatctcggcgaccagtttaattatgtgattataattagaacatgtatgtaataaatgttgcgatctaacacgacagatatttccgtaaacataaactgtatctgaactctgaatcgtatgagagttattagtccaagaaaaaggatttgtataagagtacgtttaattagattttttattttttccttgggaacacaatacaagcgcaatagcccatatactcgcgcacacacccatagttacgggcgcgcatacaccccgtactatagtttgccatatggaccacccggcacagcaagtcccggccctggtcatgcccgggccaagatttgttgggccggcatggcccgatctacacgccgggtcatgccgtgccagcccacgtgcttcacctgtggcccaggcacagcacaataagggtcgggccgtgccgggccagcccgaaggcacgggcagcccatcatacccgttccggcctagccacaacttgacatagaccccttcaacaactcagtttgacacaaaaatggtacataacacatcaaattcatgaaattcacatttacttcatcaaattcacaatcaattcatcaaatacatcaacatttcaatccaatctcatagtcctcaatgatgagcaaaaaaacttctcatatttcagtcaaagcagaagaactcaaagttagggcttggaaatagagaaaaaagatagataaaaaaagagttaaggtttgtgtcagggttacaggttaggtataccccttacccttcgatatgcgccacatatcgacatggcatacccgcgcatacacggacattatctgcatacactaaggaaatcttccacggtgtttgagtcctactcggacaagacagggtcgtcaatatatcgtgtagggtccgatgtctccgagttctacttggagaccacctgatctgcgatataaaagggaccccctgggaggacctaaggcatcgaatctcatagccaacacaaccactacagcctacgaagtcggagcctgcaggagctaagttgccgggagatctagtcgaaccaactcgattacgatcttgccggtttcatcgagttccatcgttccctttgtaacttgtggttttccatcatataatcccatatcaactggattagggctattacctgtcaaggggcctgaaccagtataatcctcgtcttttgtttgctcgatgtcgtattacgtagatccttgtaccaacataccccaataccctctatattcggtctacgggtatcacccgtcgacaatggcgcgccaggtaggggcacttggtactcaaggttctactactatgtcatccagctttgtcgacaacagcgtcaacaccaacctcaaccacgggtttcctgcttcaacaatgttagtgtggactcaagtcggcaaaatcgtcttcccggtctacaccatgatactgatctcagccggtccatcaatgaccggaaatgagaacgcaatggctgcaacccaagatgactccgtatcgaaggatcctcccgccgaagcgaagaacggaacatcgacaacatccaagctcgagaaggattctaatgcggccgaaccttgttgttccgacaagaaccacgagccgacgagaacaacttccgaagcgacaaggtcctggtgtcctatccacaaaaccaggaaacacactttgcaagcctgctgggtttttctcaacgtccgcgccgaaattcgcgcttgcaaagagcgtgaaattcagcgtatttgtccaactcgtgatgtttactgtcctatccacaagacaaagaatcacgacctcttaagctgtaaggtctttctcagcgccacgaagacgtcatctcctaaggaccaacagtcaggcatatcccttagagatgaagacaaggaacaacgaacgctggtctcagatcgattcgtcggcgtaatcgacatcaattcccacgaaccatcagtcctacatctactcgaagactacggctcatcaccaacgagtacgccacgcgaggtattagctatcgacgggaccagcacgtcagcacacgctaatgcggaggcggaaaatcaagtgactacaccggcccagcacatcaggacccttaacacaatactgagagagagaccttacgatcccgttctcaacgatgatctcgcgcggtggtaggaacggctacgggaatcagtaaccaacctcagccacgcgttcgaagaagccgctgctgctacgcatcaagaacaaccaccaactggcggcgtcaatggcgaaaatcctgaacagcgggagtcaccccctcgagctacctctccacctcgcggcaccggcgatctccgagaccacctcaatggctgccgagaggcacgacgcacacgagacgacgggaatcgctcccgacatcacgtctcttcccgacatcacgataataaagaacaggagggccgctcgaacgaagaccgagaccgtgctaatcgccacaatcgccacgatcatgatgatcgtgagaggcggacgcagggcgatactggtcgaggacgccgccataacgacgaggacgacagagatcggcgccgggacaacaacggagggcgacgataggattctcgagaacccagccgacgaccccgtaatcccacaccggaaccaagcgattcatcatcatcgtcatcttcttcttcatcctcatcgtcagacagacatccacgaaggacacacgatcgccgacaacccaccgcccccagcgctgggtgtagagctttcggtcgttccctgcgtgatgtccgatggcctgagagattccgacccggagcaatagagaagtacgatgggagtactgacccagaataattccttcaagtctactccacagtactctacgctgccggagcggatgacaacgcgttggcaaattatttgccaactgcattaaaaggctctgcacgctcatggctgatgcatctcccgccctactcgatttcttcatgggcagacttatggcagcagttcgtcgccaatttccaaggaacttacaagcgccacgcgattgaagatgacctacatgcgttgacacagaactcgggtgaatccctacgggaatttgttcggcgctttaacgagtgcagaaacacaatccctgagatcaccgacgcttctgtaattcacgccttcaagtctggagttcgagatcgctataccacctaggagttggcgacaagacgcatcacgactactcggagactattcgagatcgtcgagcgatgcgcccacgtagacgatgcgctgagacgcaagaacgacaagccgaagaccgggggagaaaagaagccagtcacggacgcacctgagtcaagcaagaagaaaagtcgcaagagtgggaaaaggaaagctcaagcggaagttctcgcagcagaatacgcgaacccatccaagcgcccagacccacagagtagcgacgcaaagaaagcatggtgccccatacacaagacggacagacattctttggaagattgcctcgttttcaagaagtcgctcgagaaacatatggcgttggaaaaaggcaagcgagtacgcgtggtcgaaaaagatgcggaggcggctgctcaggaatcagactcagcatatctagactccgacctccacgtctaacacattttcggaggctccacaacgtactcctccaagcgagaatacaagaaagtggaacgtgaagtctgctcgacatggcagggggctgcacccaagatgaagtggtctgaacagaagatagaattctcgcaagaagaccatccccagactgccgtcatcccaggacgctatccgatcatggtcgagcccactattcggaacatcaaggtcccgtgagttctcatcgacggtggtagctcaatcaaccttcttttcgccagcaccttggacgcgatgggaatcccacgaagcgagttgacacctaccgatcaacccttccatggaattactccccagtcctcgtccaaaccattgggcaaaattacgttgtctgtgactttcggccaagtaaacaacttccgaacggagcagattacctttgatgtcgctgaatttgacacagcgtataacgccatcatcgggagaactgcacttgtgaagtttatggccgcatctcactacgcgtatcaagtgctcaagatgccgggaccgaaaggaacaatcactattcaaaggaacgccaagctagcggtacaatgcgacaagcggagcctcgacatggtcgagcaaacgcccagcccacccgccacaactgagcctcccaagaaagtgagcaagacaaacaagatgccgaaaccagacggcgcgatcaagatcattccactctctagtcccaaccccgacaagaccgtcaagatcggagcatcactaagcgagaaataggaactcgcgctcatcaccttccttcgcgacaatgctgacgtgttcgcttggcagccgtccgacatgccggggatccctagggaggtgattgagcacaaactcatggtgcgacccgatgccaagccagtaaagcaaagactgcggcgatttgcaccagaccgaaaacaagccatccgagaagagctcgacaaacttctcaaagctggctttatcagagaggtgctccatccagagtggctagccaatccagtcatggtgcggaaggccaacggaaaatggagaatgtgcgtcgatttcaccgacctcaacaaggcgtgtcccaaggatcacttccctcttcctcgaatagatcaactggtggactcaacagccgactgtgagctgttgagcttcctcgacgcttactctggctaccaccaaatcagcatggcgaaagaggacaaagagaagacagcattcatcacgccgttcggggtattttgctatgttaagatgcctttcggactgataaccgcagggaatactttccagcgcacggtccagggcgcactcagcaaccagctcggcaacaacgtcgaggcatacgtcgacgacatcgttgtcaagaccaagacaagtgactcattgattgacgatctacgggaaacgttcgacaacctccgacgatatcgcctcatgctcaatccagagaagtgcacgttcggagtactgtcgggcaagctgctcggtttccttgtctctggcagatgaatagaagcaaatcccgagaagatcaaggcaatcgagaacatgaagtcgcccacaagactcaaggaagtacaaaagctaaccggatgcatggcagcactaagcatgttcatcgctaggatgggagaacgaggacaacccttcttcgctctgctgaagaagcaagacaaatttgtatggacacaggaagccgaagaggcatttcttgcactcaagcgctacctatcaaacccccctgtacctgttgctccccaacctaatgaagaattatttctctacattgccgtcacgccgtattccgttagcaccgtcattgtcatcgagagagagaaagtacaacgaccagtctactacgtcagcgaagctctccacgacgtaaaggtaagatatccacagatccaaaagctgctttacgcagtaatcatgacgtcaagaaagctacgccactactttcaagcccacagagtcacagttgtctcttccttccctctcggcgaagtcgtgagaaacaaagacgttgttggccgcattgcgaaatgggtagtcgagctaagccagtttgatgtccactttgtgccacgaacagccatcaagtcctaggtgctcgccgacttcgtagctgactggactatacctgataacaaatcagacaaccaaatcaataacgaaacgtggataatggcgtttgatggtgcactcaacagccaaggagcaggggcaggattcatcttaacatctccttccggagatcaattcaagcacgcaatccacctcaacttcagggcaaccaacaacacagccaagtacgaaagactactcgccgagataagagttgtagccgcacttgaagtcaaacgactgatcgtgaaaggggactccgaactagtcgcgaaccaggtgcacaaagattataaatgctctaaccctgagttatccaaaggttcgatgggatcgaggtccgacacgtataccgcaaggacaacatcgagccagacgatctagcacggcacgcgtccagacgagaaccactcgaacccggcacttttctggacgtcctgacaaagccatcagtaaaagaggtcagcggcgaagttaacctagacgcccccgacagcagctcggaggccacaaaggcagaacgcgccgttgccgatatcaaaaccacagacgattggcgcaccccactgatcaaattcatcaacagcgacgagttgcccgaggacgacgcagatgctgagaaaataacccgtaaagcaaaaatctattgcataatcggcaacaatctatacaagaaagcgccaaatggggtacttctcaaatgcgtttcgtccgacgacggcagacacttcctcctcgatatacatgaaggcatctgtgggtcacacgccgccggtcggacgttggtcgggaaagcttttcgacaagggtttttctggccaaccgccctcaaagatgcatgcagcatagtccagcggtgtgaagcctgtcaatttcacagtaaacacacaaagctacccacacaagcgctctagactatccctcttacttggccgttctcgtgctgggggctaaatatactcgggccattcccacgaggacagggcggctacaggttcctattcgtggcgatcgacaaattcacaaaatggagcgaggcgatacccacgggggaaatcaaggccgacaacgccatcaaatttatcaaagggatattttgcagatacggactaccacatcgcatcatcaccgacaacggctcccagttcatcagcgccgatttccaagattactgcatcgggctgggagtcaagatatgcttcgcttcggtctctcatcctcaaagcaacggacaagtcgagagggcaaacagcatagtgctacaagggatcaagacccgtgtctacgacaggctcatgtcacacgacaagaaatgggtcgaagaactcccatcagtactatgggccgtacgcaccacaccgacaacgtctaacaaggaaacacccttcttcctcgtgtacggctccgaggccatgctccccagcgagctacgacatcaaagtacacgagtacagaagtattccgatgaggatcaggaggaacagcgaaacgacaatgtgaatctactcgaggaacatcgcaaatgagttgccgtccgagcagccggttaccaacaggccctccgacgttatcacgagaagcgcatccgagcacgcatactttcaatcggcgactacgtcctgcgacgggttcaatgccaaacaaggcaaaacaaactctcacccaaatgggaaggaccttacacgatcacacaagtcttgcggccaggcgcattcaagatagcagatggcgatggccgcgagttggcaaattcttggaacattgaccaactacgtaaattctatgtatgagtcaatataatccatgcctgtaagacaccttacagtatcaataaagcttattttcaggcacatattaaaatcacagtgttcctgcctgatgatcccttacccagatgacacctagcgttgaaacctatcctcatgtccctttacgccgtcctgacaaggcctccgaggaacctaagggatcttcggctggggacgctcagagccgataaggccttgccggatcctgtagagacgaaagaccatgtaagacctggtcatgtaagagttcttgccgtgcgtattaaccaagccgtgtaatcggaaaattaactttccaacatcacggctgggggctaggatcagtgctttctcaaccaaggcaggtcaaaggtccaagagccttgtcccccgagaagaatcctccgacgataaggctgggggctagggagagtgtacgactcaaacgactgaccaaagtcgcgaactgaggaaacactcttacacactatatccaga

SEQ ID NO: 26900 - DNA, 8753 bp, Oryza sativa
agatggtctatctccaccggagtcctccgagaacgagcaaaaccctcacggagaaattcgaggtccaaacgccggcgatgatctcgtaggcaagccaacacgtgccccccggcgtatcggctcgatcgacgacactcttgcttcaaggcctcgtcaatacgcttaccgatgccgtcgagttgagcacaggccccgttcagccacgagatgtatccggccgccgactcctcaggttctccgcggaccactcgaagttctctgcagactctggccatggatgtgcagcaactcttcaagtacgagttaaaccacacctcacgacctcggagcgtttccacggcctgctccttttttacttccaacatggctctctcgagttccgccacttcaaatttcgttttccaatattggatacgacgatcttggccagcaaatgcgtcctcgaggtctgtccaacatggaaacgactacgtcagactgcttttctctctcgagaacacagctgatcaaatcgggggagcgaaaagcgatgaagagaccacaaacctaaggaagtcgtcgctgtccctgttctcgcgggcaaaatttcacccacgttgtccagcaacgcttgtcccacaaacgcaagatccggaaggatcgctgacaattcaggctgcccacgctactggacatcctcgacatcgacatctctacaaaggacaaaagttcccgaggtcaacatacaagagtaaactagaatgataattgcacgcacgaaggcggtcagaattcaagttttacacagcgtgtcttggaagtacaagaagtcctactcttcaaatagggggagaacagactcccccagatcactgacttctttcatcacctccttacgcgtgttgctagccaccccctgatcaaagatctcgcgcagatcgagttcaggacgcgacatctttactcatgcgaggacatgacacgccccggtgtagatcccgttcgacgtctcctccgcgatcctggccgcatgcttggaggggatctcccccatcgccgtcgccagttccgcaagggaggatgtcagcgagaattcgtcaggattcactgggatggtagacttgatgccgcactccccagcaagctggtgcaggcctgtgtaggtgacccgcaacgagccccggatttctgacaggttgttcccgagttccgacatgcggtcctcaagcccctgccgttgtcgctcgttgccggccaccaattccctcatcttcgtgaggtcttcacgagcttccgccaactcgcgcaccagccggtcagcacgctcgttcgccaacgctgcttccgacctcgcctgtgcaatctcgcggccgatgccgtgagcaccagcttcgaggaggcgccccatttcgacttggagctcctcccaggtgaggacggcagctggtggaccatgacctaccgcgggatcgctgactgggccgctagacgtcgcctcccggctcccggctatgagtacgacatccattgaggccgcggcaggcgacgcgctggaagcccctccggacttgttttgcgcaacctttgcccgcgcctccctatgggacgaccacgtatcagacaacgcttgaatggaattacggaaacctaaaaatccatctacttacttctcgccaaccgttacaagacgttgtcgtcatggagacgggggagacgcgtccgaggcctgaaagacaaccaatgcgaagtaaggcaaaatccttctggcggcacgatctggcgacaggataacttaccgagggggtcgacgtcttgcgacgatgtccgcttacagaggagaacttcctcccctttgtcagaacattgccaccactagtagtggccgcagcagcatcagacgcctccttggcgaccttctcttttagagacgccgccacctgatggtccgtgagcggcccgatgatgtcagtcagaggaagagcctacacttaatcaagtcataaggtgatctcgaaaggaaaatgcgggattcctatcgagtacacttacgttgatagcgtcatcacgttcggccgcccctttttcacaaaggggcacggggatgttacttgccgttgtcggaccactgatcatcacctgcccgacgtggcgctccacggctttgctgttcagacctgtgaatcgagaaccaaatttcgataaatcaagaggaacgcaaacataagcatgtcaggataaatgagagaaagataccccgaggagagacccgggtcgtgtcctccggtccagaatagttaaaggctggatgggcccgagcctggagcggctggatccgcctacaaacgaagtctgcaatgacttcataccccgacaagccccgtactcggagatcgtcaatgatgtcgataaacgactgaagagagggggtcaaagggggctttgcggtccaagacgaaatcttgtttggttgttctgtgggagcaatgaagacagggttcgaatttttgatctcaaaatagaaccacctattccgccatttgctgcgagaagaagggcactggaaggggatataacgcgacttcaggccatcccgaagtcagaacccgacgcaactagataccctgttgaactccatccaacgcagctcgtagtagaagcgaaagagatcaagaaaaggctctaccccaatgtaggcctcgcaaagatgagcaaagatgctaagaaaggcgatagaattgtggttcaaatgaagaagagaaagaccatagaagttcaaaaccaggaggagaaattcggaaggcggagggagaaaaccgcagagaacatagtcttcgatcgcaacaatgcaacctaagacgggctggggattagtacctcctgctgccctctccatggttccacgaccaggaagggcgccatcttcctgaagctccttcagcgacgcattggtggaagatgacttgccaaggtccatcgctaatcgaagattgctggagaaagggcctagattgatgaactggggtttttgcgggagcagagaagacgagaggcgcttggaggctggagaatttttccacaacaggcggacttcaaatgaatccccaaaactcccttaaatagacgcacttccgacggtgcgaattccaaggaaaggagagacatggccgccagaaatttctgggtccgttacgcgcggcggtttttcagacttcagtttaaattcactcgtgaccgttgggcttcacatggtgttctcaatcatgtcctgtctctatggttcccacaccgagaacgacatcagtctcgacatcagaagtcgctattggtcgcacgagttcatttaagcagaagtcgggggctactgtcaggtttacgggttaggtgtaccccttacccttcgatatgcgccacatatcgacatggcatacccgcgcatacacggacattatccgcatacactaaggaaatcttccacagtgtttgagtcctactcggacaagacagggtcgtcaatatatcgtgtagggtccgatgtctccgagttctactttgagaccacctgatctgcgatataaaagggaccccctgggaggacctaagacatcgaatctcatagccaatacaaccactacagcctacgaagtcggagcctgcaggagccaagtcgccgggagatctaatcgaaccaactcgattacgatctcgccggtttcatcgagttccatcgttccctttgtaacttgtggttttccatcatataatctcatatcaactagattagggctattacctatcaaggggcctgaaccagtataatcctcgtcttttgtttgctcgatgtcgtattacgtagatccttgtaccaacgtaccccaataccctctatatctggtctacggatatcacccgtcgacagtttgtccgtttgtacctgtgtagccggtgcaccggagttgttgttgaagacaataagctcacggatctacgagaatacaatactcaagagggatattggggccttggggtggatctgacaaagaagaacaaaagggaaagagatggcgcatgtggccctcgatccagcagttggagatgaagagctgacagattcactggtggcccgtggccctcatgcccctagcaggacgccgtcagtggccctcatcgggcaagacatctatcgaagacgaagaggaagagaggcatatcggtgagcgcctgagcggtggtcggtggaggaggaccggtgggcgggagagggacagaggcgggattggtgggtggctaggcggtggctgatggttgtggcatgtggcggctagggttagggttgaccgagagacgagagcaaccactggggggggcggggggagggggagacgctgccgcttatatatgggggcacgcgtggccttgggcttggcaggctggcaggcctggtcgaccattggatcgggccgctgttgtgcctaccattggaccatgccgtgccgggccagtccaccgtgccgacctcggtccgtgctgtgtcaggccagcccaccgtgccgaggcataggcccaagcatgacccaacagctagggcgtgccatgccttggccgggccaaaacctcgtgccttgggccgagccatcgggccctatagccaactataccccgtaccctatttttgtgagttccgaaaaactggatcaacatatatttaaattgactaaatcttatttatgtaagctaccactgaaaaataattagttgtaaatatgagcacacgtgttaagtctagagcttaaacctagatatgtgattcaacaacaaggaacctaattaattgaactacggtcttttcaccaattacaaaagaacaattttgtattaaaagtttacaacggcacaaatcttcataaagcatccaattaatgtcttagaacaatactctagcgttccaaaaatccttaatgcgctaagtactcaactgagcagcaagcatggcgagaatctccgtggctatggaggggaagctcgtgatcagatgctcgtacccgtcgctcgccatgtccgccttcaacctcgccggcgacgtgacgaacctcaagatggcgtccttgagctcggggcagtcatgctgctcggccaacgccagcgatgtcgccgccgtggccacgacgacgtgcctgaacagcacgtcctcgcacaccttcttcagcctctccatgccgtacctgtcggcggcgacgagcaggtgcttcgccatcaccgccgccgcctcctcgccatcgtcgtccatctccggcagctcgtcggtgtagacgaagtgcaggaacgccgcgaacgcgtcggcgtccatgtcgtcgacgcggacgatggccctcgcggcgcgctcccgcatggagccgaacagctccgcccggaacaccggcgaccgcgccgccaggatgcaccggtgcgccgcgaacgcctcgccgtcgacattgaacctcacgtcggccgccgcctcggaggcgaggaggtcgccgaggtggcgatgcaggagaggcggcggcacggcgggcaccgtgacggcggccgcgtcgtcgacgtcgacgcggatgtccgggacgttgaaggtgaggtcgcaccggacggcgaaggagtcgccgccaccgccgccgtcgtcgagatgcccggaatcctccagatcaaccctcctgatgaagctcttgatggcccagagatcatgtccctcgtagaacgtgcacttgttgtcgctgtggctgtaccgtgtcaccggctcgccggcgacgtcgagcaagctgatcttgacgcgtgctcggacgacgacatcgtcgtcgtcgcggccggtccgcaccagagcgaaggatatcgagctggagaactcctggtcgtacctatttggatagtaccggagacgccatgtgtagccgccgacgtggaactcgccggagttgaggtgttcgccggttgccatcatcatcttcgtcctcttgtatccctctatcctcaggacgtggtgaccactcgcctcggagacggcgacggtcgagcacgacggcgatggcgatagcgacggcgaggcgtcgccggatttctcggcggcagtgggaggctcaggtgtgaacgcgtcgacgaccatgccaccgaccatgcgtgatgcaaacttgaagaaaagctgcgtcagccatggacgctggctaagctgatcgtcggtggtagctgccgaatccgtcgtcgtcgccatggccatgctcgtgtcgacgcgcctgcgcaacatgtcctcgcataccagcttcagcctctccacttggtatttgccggccgccgcgatcaaccgccgcgccatggctggcacgtcgcgcgaggccatctccagcaacgtgtccgtgtacacgaagtgaagcagagccccgaactccccggcgcccatgtcgtcgacgtcgacgcatctaccggcggccgcgccgccacgaccacagagctcggccttgaacaccggcgaccgggcagcgagcacgcacctatgcgcggcgaacgtctcgccgccgccgaccctgaacgtgacgtccgcgccgtcgccggtggagaggaggcggcggaggtgggcgcgcaggtccggctccggcacggcgaggcacgccggctcgacgcggagctccgtggccctcatgacggtgacgtcgcagcggacggcgaagcggtcgccggtgaggtggcccgacctctcgagctcgtcgtggcggatgaacttgtggaatccccacgaggaagaacccctggggctcgggaacctgtgcacgttgccaccgtacgtgcgcgacgccaccggctcgaggtacgaggtactaggagttaccaatcacatctgtccgtccatttgcaaggggtaagattggaatgggtaaaacattgccgccgtaataagcccgcaagtagcgattgccaagtccagacgatatctttcccctgttccgccatcttatctcttggcgtcgctccaccctgaaatttctccgtcgatgtggtccgccgcctcggcatggtcacaatttgtcaatttccaagcggctgtagagcttttgggaggtcctgatggagagaaattagcagagtgtgttggagtgcttcgtcaagggggcgggaggagaaacgtgcagtgggagctcaccggagattgattgtagccgaggaatggaaaggcatgcagtgggaaactgggagctcgccggagataaaataaatgcactcaagcagcccatgctgcataggaatctaatactgcatagaaggagataatcagttcatatcggtgtttcttaggtaagaaagatcatcgatcaacgcttatgttgattagcgttggtccaaatatgatcggttaaaagctgtcaaaatttaattaaaaaaattcacagaacctcgccagtacttacgaacattcacggcaggtagtttataagcaaacagtcataaactcataatcacatccagacacaaaataacacaactaactccaagactaaacaacacgacaagtacagatcaattatgtagcctgagattacatagtttcaaattacataatgttacatactgacaggcctaagcctcagataagcatacaaaagaaaggtactggccacgtgcaaatattcttcaattctgatcatctaggatcagctgtgcgcctgtgccacaatggattgtctacatgcctttccttttctgctgaacagagagaaaataactgcacaagtcagaaataaaacttctcatgcctaaacatagctgagacatttttattgagagaacagaaactaatctagaatttgagaggccaacatgtcgtttctgacaatgccaagaaacgatgagaccaccttaccaacatcatagatatgttcatacgtagctaatgtttaattatacactaagacaatcagtaattgtgtcatgggcattccgtcgaacgccttgagtgcaaaataaacaaaagatcctacgcacgatgttcgctgacctctgcgacccgagatgtctccctcacaatcgcccaaccacacgatcgctgcatccgttgcactcatagtggtcatcgccaggcccctcgcaatctcggggaggcctcctgctgccagcctgccaccattgccaaatctagcgccccaacctcggcagcgaccggatctggctgaggggatgggcagagtggatgctctgggggaagggggagaaatattgcacagaatattgcggctgcaagtgtcggcgctcaaacgggagcggaggaatcggcggccgtcggtgtccgcgctcgagtgcgggcggaggtggcagtcggtggcaactcgcgagcgaaagtagtcgaggcggcgaccggggatgtcaacgcgcgagtgggagcagaggacgcgatggtcgacgccatcggcaagctggagggagcagtggtcgctggtcggagggagaaggaagaggatacgatggacggaggacgaagggtggcggatcggggagaaaagttgatgcgaaagtacaattctaccctcccaccacctcatcacaattggtgccgcctctcgcggggacgcggtaccgtgaggtaccgaccaattgcagccgttagatcctgctagatcgacggatagaatttggtaccgcttgccctcaaggatggtaaaaagcctcttgtttttttggttgaatttcagcggaaagaggagaagatggggtcaattattatgtcgttgtagcgtaatggtctccggatgcataggcctgtt

SEQ ID NO: 26901 - DNA, 10669 bp, Oryza sativa
tgggtggatttcactaaatccaagccgtcccaataatttcgatggcttccataagccatctcttctgggagtggattttaatctctcgaggggatgtcccctcgttctttgcatatcactcaaatagttatgaaaaaatttaaaacaatttgaaaagatacattaacatgtgatatatctactccacaaacatgtaagttgaaatttaacttctacatctcgcaacgagaaaaacaaatcgaagtacagttagttaaggtatattgccagttaattttttttagttgccagatgtagaagttgaatttgaacttgcatgtttgtgaagtgatatatcacatgttaatacattttctcaaattgtttcaaattttttcacaatcatttaaatgacatgcaaagaacaagaggacatcttctcgagagatcaaaatagtttccccatctcatcttccaccatagttatcttgtagagcctattttctttttaaaaaaatattgtacagcttataaaaaaaattatctcaaaaacattatctctcagagaacatgttatcttcgaattttctaatagcaattagagaagaacaaacaagacacgaacattgcaccgacaaaagcttaggcatgaattagtttaacgagggcctcaatgccgttaattttataacagctcggttaagaaatgtttacagataatttcctatccacgatgctcttccgacacgctatatccgaatggacagacttcgcaagataaaataaatggagaatagaattgttatttctgtcgtaaatgtgtaactaggaagaggtgacatggtcacatctagcctgtagaaacaaagtaaggggtcagatcggtccaaatccaccaagtggagttggaaggcaactccaggggatctacgtccgtcgaaaattgttgaaaactttccgcaaacatatttaggaactttccgaaaacaaatttagttttaattcttgaaatcagaaacaaattatttttcatatataaccgattagtttcagccttctttacttcaaatgtatattcagtattgagttggttaattgaatgtagatattttttctattatggtgctttagatatatttttttgtcttgttatttttttaaggaaatgacatatattttgataatatgtttgttctgcgttgaaaatattgatatattttttataaatttgatcaaaattaaaaacgttgactaagaaaaaaaatcaaagtgacttataatatgaattataaaacgaagggagtatatgctttgcttatcaatttttggaggcacctataaattgggcgctcgattattgttgtaaaaccaggcgcagttttgatactgaacaattaaaatgttgaaacacggttggatcgtggactaaaacaatttgttctgacacataaaacatcaaggttcaattattgtaacatcaacaacaagagtcaaagacaaaaattgaaacactttacataaaatgtttcagtgctgacaatggtgaaacacaatcaaatcacaccatgaaacaatttgctacaacgtatgaaacaacgttttgaatgtattaaagcatgaaacaaattcgaatacataaaaaaaacaatgaaacaccatcgaaaacccactgcaatatttcaatctaactgatgaaacatcatggtacatggactgaaacatcaaaatatttaagaggaaaacccagatctacctcttcctctactcgactggccggtttgcaaccacatctgcgtcgacgccgtgccgagctccactgcatccgcgtagctgccggcgttgacgccgcagctcggccgtgtccgcgtgtccgccatcattgacgccacgtggagctcagccctcattgtcgacgccacatggggcatggcccctcgtcatcgacgctgcatggagctcggtccgccgtttccagcgctgcacggcgcgaccgagaaccccgggcccattgcttcgccggctccgcctccgcggaggctcagcctccaccgccgagagcaacgatgccgttctcccgccgccacttaggcgtaggtgcgcagcagcaacgagaaagggggaataggtgcggagagagaagaagagggagagagagagagagacaggatgaggtaatggatatggacgtgtgggacacggacgtgggtgcccgatattctccttccctatcaggtgcccgagtcaggtcgttttcgttaaatttttttacatgatttcagtgcatgattatcttttcttatttatttaatgtgaagcaattttcatgatcggatgaagcgagtgctgacgtgataaaaaatatcctataggtagtggattttaaagggaacattctctcgtcattttcatgtcatccaaatagttataaaagaattttaaaaagtttaacaagatatagattaatgaataagtggtaaatcactccacaaatattttcagaaatatactatgttgcatcggatacacgattttcagaaatattttgagagatgaacaccgggtgatcatggcacttccgaacggctgtcacatcgacctcgcattggactgcgaaacaatcgtctcgaagatattccgatcgctccaattcctccctggcgatgaagtccttcaatccccagtcatggccatggtagaacccatgaactccggcgtcccgcgacggcgccgccttgccggcgacatcaaccaggctgaaccgtggccgtcgctgtcgctagggtggccgccggcggcggcgagctggaggaagacgccgatgtggtccctgtgcttcttgttcttgccgttggggtacagctggggacgccacgagtggccgccggcgtcgaagacgcacgagtcgacgtgctcgccgttccggagcacgccgacgaggtgcgagtagccgtcgaccctgagcacgtgggaggtcgtcgacggcctggagacgatggcggaggcggtgcgcacgatacggcccgccgccgccaatgacatggctggcagtgtggactggacggatcgagagacggcggccggcgccggagcaggagatgcggcgggacgttgttgttgatctttgttgcaactttgcaaaagatcgacacggtagcttacaaagaaagaaggtataatacgtgattgaaatccaactcttaatacaattccacttaatttcactcaaaatcaggctcgaataaacctttgaaacgtgatgttttgtgatatctttcatatattcatattattgttattgtctaaaataaatattacttacaacttttacaataataattgtttattcctaataatatacccttccaacatcaagtttccaccaaacaaaggatatgaattccctcctaattaaacactctcttatttctgtatagcaaattcaaattcccacattaattcccttcatcatctccgacggttaatttacatgccttttcccaattgttgattttacattatcttagctagactactgtgtctgaatgtctatatatgtattctattagcacatgcggtgaggtccctgagaggccggaggcagaggaagtttgtgatttgattgatttgtattgccgatttcgaggagaggagagcatagggatttccaaactgtaaagatgtgcatccataatctaaaaaataaacttttacccacaccttacactgtccatttcaaccactggcttctaattatcatggacacaatttttaaatgttgattaaatggtgtgaattttaaagatagcttcatatatgaaagttcttcaaaaattcaaacaaatcaattttttcaagtttgtaatagttaatacttattagttttacgctaattgagtgtcttctcaaataagccatgaacaaaatcgcttgatcatctcaatcgaacagaggtaaggacggtgcgtgcaggtgggttgggacacatatcaatattgctctctccgttccatataataagtcattactagtcaaacttatttatgtttgattgaatttatagaaaatgtttgattaaatgttgcagtggatatttcgatagtgttccatatttctattttcgacacacggggtttgttgatgtttcaatggttcaaaagcaatgtttccgctagtgtactcgtgatatttctttgtgtgtggatcattttttacagtggattttagatagtgtttaatatttttcatcttgatgtacaggtggcttgttttgatgtacacaaggtttaagtgtttcaatggcttaaatcattttgtagtatatgttgaaccaaattgtttcatctagcgatctcaccgtgtttcacattttttttataaactgaaatattcattcgctaagtggtaaaacattgttttcataaaaggtgaaacaacgcccgagtttttggggaaaaatcgggcgaaaagggtgaaacaacgcccaagtttttgggaaaaatcgggcgcccgatttgtaggcgcttccctattagaggcatgttatgaggactttcgaccgagactgccaaaaccgctatagcgaagcgccgatcgacgagcaagatgcacacctgggatgaaaccataaggcgaagcctaggagattcgccaccaagccgggaggccttcacctaaaagggcatgttcgctaagtatggcctaggttaaggcccattaaggagttctaggcaaaatagatccttttttgccctcataaatgcccctatcataaaggtatccttgtaaattcctcttacctattaaccctagtatgcatgagcttgtactaagactataaataatcccctaattaaggcatgtaacgggggatccaaaaaaattccatcattaatacatattgttttacttttccactataagagtgaaccacgttcttcgacgaacgcagttgtcattcaacaacaaaatggatttcttttattatatcacgtttatttttttttcatgatttgattgtatgatttcccttttgtcatttaatgtgaagcaattttcatgatcggataaaccgagtgctgacgtgatagctagcacgtgaggtaacatcaatccataataatatccaaataatactatataagtgcaccatgttatatacataatcctaagtagctaatttcattacgacgcagtgaccatatagtatctatctactctttataaaatggtgtagagtggtggcggatccatcaccattccaactgtcaactcccaactttttgttgaagaaaaaaaaagacatatgagactaaagcacccacatatcaactactcccagtaattctatttttttatgaaaatatattaatatgagtccgaaaagttccacaaatgattaataacaaatatgcacatgcttaagttgctaacaacatattaatgatatttttttaataaagattccattgcaatgcatggataaaatgctatatagttacagcaaaagcattagatatactatgttgtatcggatacacgattttcagaaatattttgggagataaacaccgggtgatcatggcacttccgaacggttgtgacatcgacgtcgcattggattgcaaaacaatcatctcgaagatactccgatcgctccaattcctccctggcgatgaagtccttgaatccccagtaatgaccatggtagaagccatgaactccggcgtcccgcgacggcgctggcttgccggcgacatcaaccaggctgaaccgtggccgggcacgcacgcggccgtcgccgtcgctagggtggccgccggcggcggcgagctggaggaagacgccgatgtggctcctgtgtgtttggtcgttgctgccattggggtagagctggagacgccaggagtggccgccggcgtcgaagacgcacgagtcgacgtgctcgccgggctggagcacgccgacgaggtgcgagtagccgtcgaccctgagcacgtgggaggtcgtcgacggcctggagacgatggcggaggcggtgcgcacgatgcgacccgccgccgctgccaacgacatggctggcagtgtggactggacggatcgagatacggcggccggcgccggagcaggagatgcggcggggcgttgatctttgttgcaactatgcaaaagataggagatacggtagcttacaaacagagaaagtattatgcgtgatgaaatccaactcttaatacaattccacttaatttgactcaaaatcatgctcgaattaataaacctttgaaacgtgctgttttgtgatatctttcatatattcatattattattattgtctaaaataattattacttaccacttttacaataattgtttattcctaataatatacccttccaacatcaaattcccacgcaccaaacaaaggatatgaactccctcctaattaaacactctcttatttctgtatagcaaaatgaaattcccacattaattccctccatcatctccgacggttaatttccatgccttttcccaattgttgattatattttagattatcttagctagactactgtgtctgtatgtctatatatgtatcctagtagcacatgcggtgaggtccctgagaggccggaggcagaggaagtttgtgatttgatttgtattgccgatttcgaggagaggagagcatagggatttccaaactgtaaagatgtgcatccataatctaaaaaatataacttttacccttctcacaccttccactgtgcgtttcaaccactggcttctaattatcatggacacaatttttaaatgttgattaaatggtctgaattttaaagatagcttcatatatgaaagttcttcaaaaattcaaacaaattatttttttcaagtttgtaatagttaatacttattagttttacgctaattgagtgccttctcaaataagtcatgaacaaaatcgtttgatctcaatcgaacagaggtaaggacagtgcgtgcaggtgggttgggacacatattaacattgctctctccgttccatataataagtcattactagttgtttgattaaatttatagaaaatgtttgattaaatgttgcagtggatatttcgatagtgttccatatttctattttcgacacacggggtttgttgatgtttcaatggttcaaaggtggcttgtttcgatgtacacgaggtttaagtgtttctatagcttaaatcgtcttcgtagcatacgttgaaccaaattgtttcatctagcgatgtcaccatgtttcacttttttttcacaaactgaaaaaaaagtgaaacatcaacctaggcaaaatagaaccttttttgccctcataaatgctccaatcataagggtatccatgtaaatttctcttacctgttaaccgtagcgtgcatgagcttgtactaagactataaatagtcccctaattaaggcatgtaataggggataaaaaattccatcattaatacatattgttttacatttccactataagagtgaaccacgttttttcgacgaacacagttgtcattcaacaacaaaagatgggtttcctttattatatcaagtttattttttcttcatgatttcattgtatgattcccttttgtcatttaatgtgaagcaattttcatgatcggatgaatcgagtgctgacgtgatagctagcacgtgaggtaacatcaattcataatatccaaataatacaagtgcaccatattatatatataatcctaagtagttaatttcattatgacgcagtgactgtatagtatctatctactctttataaaatggagtagagtggtgacggatctgccaccaccccaactgtcaactcccaactttttgttaaacaaaaaaaaagacatatgagactaaaggacccacatatcaactactcccactaactctatttttttatgaaaatatattaatatcagtccaaaaagttccacaaatgattaataacaaatatgcacatgccaacaacatattaatgatatttttttaattaaaattccattgcaatgcatggataaaacgctgctacctccatatttcaatgtatgacgccgttgactttttgtccaacgtttgaccattcgtcttatttaaaaaatttatgtaattatcatttattttatcgtgaaatgctcttttaagcatgacataaatatttttatatatatttgtaaaaaaaataaataaaacgaatggtcaaacattcgtaaaaaagtgaacagcgtcaaacattaaaatacggagaggagtatatagttacagcaaaagcattatactactatgttgcatcggatacacgattttcagaaaaattttgggagataaacaccgggtgatcatggcacttccgaacggttgtgacatcgacgtcgcattggattgcaaaacaatcatctcggagatattccgatcgctccaattcttccctgctgatgatgctctgaaagccccagccgtcgccatggccgaagctgtgaaatccagcgtcgtgagatggtggcgccgccgccggcttgtcgccggcgctgtcaaccaggctgaaccttggccgggcacgcacgcggccgtcgccgtcgctagggtggccggcggcggcggcgagctggaggaagacgccgatgtggctcctgtgtgtttggtcgttgctgccattggggtagagctggagacgccaggagtggccgccggcgtcgaagacgcacgagtcgacgtgctcgccgggctggagcacgccgacgaggtgcgagtagccgtcgaccctgagcacgtgggaggtcgtcgacggcctggagacaatggcggaggcggtgcgcacgatgcgacccgctgccgccgccaacgacatggctggcagtgtgcactagacgggtcgggagacggcggccggccggcgccggagcaggagatgcggcggggcgttgttgatcttcgttgcaactttgcaaaagatcgacacggtaaattacaaacacagaaagcatgcattattcgtgatgaaatccaactcttaatacaattccacttaatttgactcaaaatcaggctcgaattaataaccctttgaaacgtgctgttttgtgatatttttcatatatccataatgtaattacttacaacttttacaataatcgtttattcctaataatatatcttctctgtttatccttgtttgacaccgttgacttttggagctagatcgaacctagggatgcacgtgggccgggtaaacccatgtacccaacgacctagcccacgaaacatggggtcacaacctcattggcttacccatgaaatttcatgggccatcatgggtcgacccaatggagcattatgggctgaccctagctaggttacacacacaccgtcgcacgcataggcaccagctgtgccgccgccgcctcctgactgcgaaacaagctttgcagggagacatgagatggcaacggggctgcacccgccgggtttcaccaccccgtcccgcacccgcattgaagggaatcgcccgtcaccctccccatccccgcacttgggtgcaggttctcccccgtccccgtccccactgcgggtacggggcacccgcgggtcctcacacccgacaacatcaccggaatacaaattgcagcagcaacaatccccaattaaccccaactcaggaaacaagcgagcaacacaatagcagtgagaccatcatcaaatcggctgatgaaacacaaaattgacccaaagaataggaacaacaaacagatttcaacttcagtgcctgaaaacaacgtcaagcttccgtgctgttaaagaacagcaagttgtttcagttcatttcaaacagaaaggcaggaacgtcatgtaggtaactaactcactcattcacaggtacaaatcatctagctggttggttggtgatgcgtcggcactcggcacttggatttcgtcctggacatggagccaagatgttagatgtctcgtcttctcggccgtatggaagtttcacagtggaaccttgcctcgaacatgcggacctggttcccttgactcctggaagcatgcggcgacgactgcggcctggatcccttgtcgtggtctcgtggaggcgtcggccgtcgatctggtgtcgccgtgtcggccattcggcttggactttaggcggcgaggtagggcatggatgtggatgggagcgaagcggcgaggattcttctccgtgcgcttgggacctagggttttggcgtgtatatatgtgaacgagtgatgggcctatagcagctgggcttttattttctatgggccatgaggtagtaggaatgtaggatgtgctatacagggcccccgtggggattcgggtacggggagcttgggaacgcccccgaacccagctcacctgatgggggaatatttttcccgttaagacccccatgggtagagatgttagcctattaagaaaccctaatggatgttttacccatcgggtattggggttcggggccccattgccatcccatgaggatcaggacgagtctggttctatggctatcaacggctgcccattagctgctactacatccgtttcacaatgtaagtcattctagcatttcctatattcatattgatgctaatgaatctagagacattagattcattagcatca

SEQ ID NO: 26902 - DNA, 10143 bp, Oryza sativa
tttatatatcgtatcaaacgtccagaaacacaaagacaccaaacatgggcacattttcaagctccaattattgctcagttacagaacaaagaaactaaaagcctaggcagcacacaacgaaacgtacaagaagtttgcatcccccagcactatagtagccacccaaggaaccagccggccaattgatacatcacaaaccaattaaaggaacaaatatatatgtgcttctgccaacaaggaaccggaagtatacataactaataataagataacatatgatcagatgagcctcagggaaaccattgattgttatcaaatactatactagttacgtaccttgaatagatgaaattgcagatgaactatgtggcaggggttattgtgtgctcggtatggggattagtgatctcttcttgttgctcaatcgagtggcccccttcctcccatccttcctcccgcgatatgtcgatatcctccaatccttcctcccgcgatatgcggatatgttgtatgtagcagttgggaagtaggcttgcttcgttcttgatggcggccacaactgcctccacctccttagctgtcgcgccttggcagtcaatatagacattgagtgccttaagggttgagaggtggtggatgcccagatttcgattggcacatgcatactttgtggaatgtgccttgattgtaaagttgatgtctacaagcgttggcatggctccagcgtggaacatcatatcactagccgaacaatccaagtttagagactctagacatctgaacttatttctgtatatgctaaacctttttgtgttgtcaaatgcggacactaacaaaagagaaagcaaggcaggtaagtctcctaggatctcaagggtttcttgcgtcacttgttggattctaatgtccagataggtcaggttggccagtgacgccggcctctcaggaatcccatggagaaggagaggacggatgtgtaattcttgcaggagataagacggcgaggatgaaaaatccaaattgatataagcagaacccaactgccagtaactatcaaaatacaaatatctaagattgtaactaaggagtttgttgagcgatgaagttaacgtatccaagtgttttgatttatgattgttctcgtcagtaatggacaaacttaggtgaagtatcctaagtttggtcagcgttcccaactgttccaaggagtttattgagctcaaattgtcctcttttgttgatactgctagttcctctagagcttgcatattcccgactccatccggcagtcttgcatcatgaacgtgtaaaaatttcaaccgccgcagtttaactatgcctttgggcagctcctctgtaccaataccacgaggtagatccaatatctccaaaaacagcagttctcctatttcttcagtaagatgtgtaactagatcaatccgtaagtaccgcaactgaagtagcttcccaattccacaaatctccatcatcttattaccactctctatatgaagcactctgaaaacattcaagtcagaaataggaagcatctgttccctgtatccaaatatgctcactgatctaacattacaagttaccatggaacacattggcatcacattttcttggccacggtagtcaagtaaaagtcgaccaacttttccttgggacactaacgaatttggatcactgaaaactgtaacaaagttttcttcaattgccttggatacaatgagatcaagaataatatcatgcacacgacaagtccttatacgatcgtcaaataacattttttctggttggatcaaacttctgttgataagttcatttaaatagaattccccttcctccattatgtttctcccacaatttaccttgatgaacccttctgctctccacctccttaacaactgctgcacatcgatctcacaatcttctgggtacatactgaaatatttgtaagcgaaaactcaaaatcccttatatcgtgggacggagggagtgggaaagggcagggcccaggctccactaagcctgagagaatattgtgctttattcacatttcacgcgcctggtgtgaactaacagcgaggctttctgcgatgctgccggccaatagtgaccctgcttgactaatggcataaaaagcttggtagggaattgatactgaattaccagtcactggataagaaagacatcgttataggcctgtacaagcatttgtctcaagagagcattataaagatcaaatgatgagataaggtagagaagtgagggctgatgagagagtggatgaacaatatctatataaactcaaaaacagtacaaaaacaagcactagattagtagtaagcaaatgaagtaaaaaatattatggtttattagggcaagtgtgctagaggtaatttgttgtgtatgttattaataaagattaggcgagaataaataccggatgttattatgtttagaaaaaatcactggtgttgtgggtggaaacaaatagatttttgggatcacctatacatttgtcgataaattttcttttaaaaatttgacagatataattatagtataatataatttgtctgtgattgtatgtaacatgcaaaaaaatctctctgtaacatgttatttcgatgaaacggaggtcgtgaaaacgaattctcacatatgtgcacatagtgacttttttccttctttacttgaacaaatcttgaaacggtttaaaattatatgcaagttacattgtagttacatacaagttacaatgtaaatgatgatgaagattagcccgtaatcgcatcacttgtacagatggttttgctgtattgggccttgtttagtcaccgtcatttttgcgggcgggccatcttctaattgggcccgtaggctgttcacgacactttcgacgtcgcaccggacggtgacgcattccccgcgctcgccggcgccgctcccgaacacggccgtcctcggcggtggctcgtactactcgcgcgcgcggcgcggccgtcttggtcgaccaggctaattttgcacttcagttggtcctgctgttctgttcttgccgaagagccatctagctccagcaatagatatatatatacatgggtgtcttcaatcttaatcttcaatgtcaacacttcattgcaattttaattatactttgagtactgttcatttatgtcatgttatattattcaacatggctcatttatttttctcgatcacacagctgttgaaacagcgagctacttctggtgaaaataatttccatcaccaaattcaatactcaactgcgtgacccaggttatttgttacaccaatttccctgacaactcaaaaattgtcacaaggtattccttccatttcaagttataaaatatattgattttggtcaaaatcaaactgttttaagtttgattaagtttgtagacaaatatagtaatttttataatactaaattagtgccatcaaattaataattaaatatattttcataataaatttcttgggttgaaaatattactacttttttctataaacttggttaaacataaaacagtttgactttgaccaaagtcaaaacgtcttataatctgaaacggagggagtagtaactgtgatgaaaattactatatagttacagtgatgatttttatcatcactgaaaagccaatcctgcgaaaagcacctagtcacttagaagcttcttaagtattccctcattccctaaatatttgacaccgttgacttttttaaacatatttgaccgttcgtcttattcaaaaacttttatgaaatgtgtaaaactatatgtatatatgaaagtatatttaacaataaatcaaattatacgaaaagaattaataattacttaaattttttaaataagacgaacggtcaaatatttttaaaaaagtcaacggcgtcaaaaaaaaaaaaagaacaagactagtggtaaagctctcagaatgacgccatccattatccatgagtgcatcgatcagagcacaacaaagtctcatttgtccaaaaaaaaaaaaactcaaaagctacaaagcctaccgctataccatggcataacctcccacaatgatggatcggtcggcaaaggccacattcagacgaagtaccgtcaccgatactgacggtaataattagccgtgtagtgtacaagagctacgaatgacagcggctttgacgactgcactaatcaaactcttacagggaaatttcggaaattttagttctatcggaacccccactactacggtaccaattctcccgtgcgggctaaacgatttttgcgtgcagttgacagcccacacgcacccagtcgtctgggaaaatcgcgattttcacgtgcgggtggcgcacccgcatgcaaaaatcagatttaagcgcccgcacggaaaaacaaaaaatagaaaaaaaataaaaaaaaccctaaccctaagccgccgctgcctagacgaggcccgccgccatcgcccccgcggtcgtcggctacggatccgctgcccgctcctgtcaccggcaccggatccgtagtcgcacatcgacacacaatagatctcacatcaattccaagaacacatcccacataagcaacgaatgaactccaagaatgcttctcacaaatcacaaacagtcacaaataacaaagagagaaggagggggagagttagatccgccggtcgtcgacgccgtcgcacctcctaccggcggccccacctccacgccggccgcttacgccgccgcacctccaaccggcgccgcacctccagatccggtgcgggccacctccatcccaccgctgagggaagcgggcctcctccctcacgccgccgttccgctggatatgcaaggggggaggggaggggccaccgtggtggcccgccgctgctgcctcccgctcccgtcgcccgccgccgctattgcccacctgcagtcgagggagagggaaggaggcgccgcgcgcgcctgctgtcaccgccgaccgaatgacgataggagaatgggagagtgggaggagaggagtcgagtgggagagagggaggtgggaggagaggagcgggcggaggggaaggtgagggaacgacaggcgcgtgatgaattaaaagggatgggctattttcgcatgcggctgaaaaaatgcttattttcgtgtgcggttggcttaagccgcccgcacaggataacgcgttttcccgtgcgggcgacggcccggcgccggtcctcctatttttccgtgcagttccacttacggaccgtatggaaaagggagcggcgtccaggaaaatagatcatgtagtagtgccccccacccccctacggacgatacgatataatttcagccaaaatttttatttttttcattttttttatgaattcggtaatattttgttcaaatttggtcaaattttattcaaaaattcataatatttcgaccacccccaatacaaatcagcaaaccgaaacatttaaccctgatcacatcttcagctcgatctccagcagtcttgacatcttcttccattcctctctacgttcagctgcatcttctactccagccgatcagcttgtaccgttctttcgcatttccccaatcgcagataccgaactggtgcacatagtgcacctgcaacgctggccaatcaagtgacatctccccaaaacgccttaagcagcagtcactcctacactctgcacaaacatctgaaaattgtcatggttgatgcacttcatgttgaaaatgcgatgagtcgtgagaactgtgtaccccggcaccatccatccgttgttgcgtgtcggatccactcccgatgcttcccaagcctacatgcatttcacccttttcccgtgtgcaattttctaacaatcgtagcagttcatgcagaagcttattatctcatctaagggcctagttttgcacttcagttggtcatgctgttttgttcatgccaaagagcaatgtagctccagcaatatatattcatgggtgtcttcagcctcaatcttcagtgtcaacactttattgcgattttgtactatgagtacgtacagttcatttatgtgatgttctattattcgaacatgccactggtggagaaaccatctttggtcggtcgacccaaatccacatataatcccggttccattaaaaaccgggactaaaaacgatttttagttccggtttataagcgtaacaggactagatgatctttattcccggttagggttaccaaccgagactaaagatcaagttgtctctatgtcagatcgtgtcaggcggctaggatcttaactgggactaaagatctaactttattcccgagtggtgttactaaccgggaataaaaatcaacacgtactaataatccctattacttatcctcttttcccgtccacacaacgaactctttctctatctcttttttcctctctaactccctatccttatcctttcttcttccttcttccttagttcttcttcttccttagcccgcttggatcggagcgagagaggccagccgcttggagagagagcgggctgggcagcagccggcgcatcggcgcggatggacaggcggcggtggccggccggcgcggaggggaaaccggcgcgacggcgggcagcagcgcggagggccgcggcggcggcgcgggggctggccggcgctgaggggaggcggcgcggcggcgggcagcgggcggcggcggcgcggcgtcgggcagcgccgcaggggtcggccggcgcggaggggaggcggcacggcagcgggcgggcgggcggcgcggcggggccgcgtggcggtggccggccggccagcgtggaggctaggcgacagcggtcggccggctcctctgttattgttttttcttttttttaagaatttgtgatttattgcaggatcatgtgatgaatttgatttgtgtgtgatgtgaacttgtgatgaattttgtagaaacttgtgatgtaatttgatttgtgtgtaattttttttaggatttgtgatataattttttagaactttaagatttgtgatgtggacttgagatcttacttcgatttgggatatgcataccacccatattcaggagaaaataaaaaagatatgcataccacccagattcgggagaaaataaaaaaggaaaaaaaaacctagtcccgttgttgttaccaaccgggactaaagatcatttcaaccaggactaaagatgggcatctttagtcccgaattgctactcccggttggaaacccgggactaagggggttcccaaccaggagtaaaaagatttctctaccagtgtgcatggctcatatatttttcttacagctgttgaaacagcgaattgaactacttctggtgaaaataatctccatcacctagttcaatactcaaccatgacccaggtagtttgacatgaagtttgtgtacatatacaggtcacgttcttattcgcataatgttaatcagatatcaaccagtcagcagtcttacacattaactatgtaaaaattcactaggttggaattttaattttaaaacatggaatactgatttgttcagcatatgttcctagctattaaaataatgtagactgatctcactactggagaaaccatatttgattggtcacctaaaattcacaatagtcctggttcgaataggaaccggaactaaagattattttttatcccggttaaaaactttttgatctttagtcccggttaataacactaaccgggactaaagatcatttttagtctcgattcatgaagttgtcgggtcaagtcaggccccaattatttttagtcccggatgatataaacaaccgggactaaaaatatatctttagtcccggttgcatataccaacctggaccaaatttcaccccgacccgtgcgcctcatctcagtcagttggtcgttcttatcccttccaccttcctctctcctcccctctcattaaattaacagcctcatctcagcctccacctcccctctcccctccctggccttcctcccccttcccctctcctcccctccccgcctcctcctctccaggcggccgagcccgggcggggacggcggccaagcccaggcggcgacagatggcacggcgggccgcgcggagggcacgtcaggcggcggctggcggcaggcggatggtagggcaacgacagctggcggctggcagcgccctcccctctgccggagggtaggcgggaggcggcagcggtagcattttgtcttttttttgtttttagaatttgtgatacattggatctgagaatttttagaagttgtgattcattggatctgagaatttttagaagttgtgattcattggatctgtgatgtaaaatatatgatgtatgtgatttgtgatgcatttcttttagaatttaagattttttgttgagaatttgtgatgtgaatatatgattcattgatttgtgatgatactttgattttgatttggggatatgattggcgatatgtagggagcaacttgatttgggaaggagcaactcgatttggaaaggaacaatgaaaaaaaaaagaaaaaaatagtgaccaaccaggactggcgctgccatgtttagtcccagttggtaacaccaatcaggactaaagatgaatttttagttctggttattttattcgggactaaagatatctatctttataaaatggggagtatagagggttacaaaccaagagcaaaaacgctttctccagtagtgactgtatgtcaaatattgctacgtacgtactgatcaatatgtatacatgatgaggtcactaatagatactaactaatcagatcaacatgacctgtccgttatatatatgtcactaaggaagcatcacagagtcatcatgctctgcacataaaaaattgtcagggtagaacataacctacggtcgtttagaattgaacatcatgcagcagggagatctcaatctcacgggaaatgagagcgctactaaaatatgaaacaaattgtaactcttcaatttcttatggtaactctttcaaataacgggatcgtcaaaaagttccaaaatcacatatattctaacacgtctaatgctacgtcatccaaagtggaataaatggtctttggctatcgatttcaagagtatagcaccactgcgcatggtatgcgcatggtatcctgttttcctgtaaaagcatcaatgaccaaaagtagagcgaactggaacacatgaaaatagcctccattatattagacatctttttggtgttaaaaattatatcattttggtaacaccagagcacgcaacaataaggcactaaccccgaacaaaataagttctttagtagatttcgacactcccgttagccaattaacaaaaatatttttggcaatacagggaggagggatgttaaagcaaaatggttgcatagccaagtaaaacgtgcaatatcacctccaatggcaggcatattctctttaactctctatgcaacatctgaaattttccagggttgatgcacgtatccatcctgatgctaccaactagaatgcaagatcgtcccttgagtctgtccgttcatatcaaaaatgcgactagaacggtgccactgcaagattgatgccgagctcttgtgtcgcatatgctccagatgcttcccaagcctaccatatgatcgattttgctgtgatcttatgcaatttcgctagtgctatataactcgtggcagatgttgaagaacccttctggatacaagaccttttacacttgtagtactgctggtcatggggttttatatatatcttgccaaaggaaagcaagctcctgcaacaacatgcatgcaggagcttcaatatcaatcttctatgtcaaacactagtcaattgtaattttgtactgtcagtatacgatcatttatgagaaatcttgtgcagaccattacacgagctggctcatgtgaactctttattttgtcacagctgtttaaatagcttcagctttgcatggtactctattcaccagcaggacaaggggtaaagcaaagcagttctaggaatgacaccatatcccatcatcggtgagtggatgtatatagcttctttaaagcaaactaggaaggtagcccgcg

SEQ ID NO: 26903 - DNA, 8817 bp, Oryza sativa
ccttttggctcgtggaacacagatataaatacgggcgcttaatctcatgcaactatatagtatttgctttaatgttcctatcaatctcttgcatctgattcttaatttgtaccgagagtacagttcaattaggaggaactaatacaaacagcacatggctcatctactccctattccaagcaagcagctcaatctgcttttgctatgaattcatcagcaatttctccattagttctgccaggatatataatccagtgcatacgtgaagcatcattcgaagaactggaatcacgcggtgttgagggaagacaggcgacttaattagatggggatatcgatcactaagcatgatcgtatgccactgtgaccagaaaagtgtcttaactgctgtgcatgctatcgatgcttcccaagcctacatatttcgccaaatggttcatattcagtctaattaattatatagctcgtgccatgtctagatgggaatctctaggaagagtttagaccttctgagtttgaagcatgatctcagagtgtctaagaactgaatttctgcatacacacacttgattgtgaatttgtagttttgtactgcgagtatatatggggcgtttacgataaactatatggcacacatcacctgcactcttatctcacatctgattaaacagctcgagctgctttttggtaattagttcatcagcaagatctccaaactgccatgataatcaaaacaacatgcctgaagcactgatcaatcttgcattatttttcttaggggtaaaaacaggagctctgacaatttcatattaggagaagagagaaaaaaccagatcgagttttcacaaactaggttacagaacgatcccacggaatctcctgcgatatatcgacgaccttctgaatcttgcattatttcaacatagaaacacgcaccatatatatcgacgacgaatgccacgcgactttggcctatcatatgcagtgcccaacaaaaataaggtgtccatatgggagttatatgagccgctcattttctcgatgcttcccaatcctacatctacatggctacatatatgctaattaactggattcattcagtctacctagctagctcgtgccatgtctcaaaatctctatgaaagttaaaccttctgaatttgaagcatggtgtttcatctataattgcatgagtagaactgaatgtctgcatatgcacttgtgcaccctctctaccttatctccacctcactatatatttacatgggtgcagctacttccattgattcatgttgtacggtttgatcctcatattaagttatttcgtcaattcaataataatcctagaatataagatacaactaccactaattaatgcaaggacaatgcatgcaccgataggattagaggttttaaaggtgatggatttaaaaaatgattttagggaagggagaggtactaaataattgcatgcatgtatgcgtgttttaaattatgaaacatgaaaagagtaggcattttttatatatatattaggatggatgaagtacttggaagtactaaaatatcgatcatataaattttgagaaggcaacaggacattaactttggaagcagagatggagtacaaaagaaaagaaaattaactggccaaaccgtatctaaagttgtaaaatatctatgcgtacgcttacatagttaattaattaggtgtatttatgagcaaaaagctagagatattttcatgctttttaaaaagtatagaaatattcttttgacacaaaaaagtatggtaatattgagacgtagggtaaatggatttctaactaaagttttacgaattataagttaatttaatgcagaatataaaatacaaaccaatataaaagttgcaatgcataaaaacaaaagttacgcttttttatattctgaaagttttaggctagttaattatcacattcaagtttaggtaaatgattgataaaaaggaatcaggcatagatacaagggagcacttgtagcttctgcaactatcttaacagctcgagctggttttttctatgaatgcatatcagcaagttatccatcctgccatgatatattcaagtgtgcagaggtgaagcatctatcaaataggtaatttcaaactggaaattcactcagtgttgaggaaaagcatgcgacttgggccttccaggtaggataagcaagtgagctcaaaagattttcccgcttgctagagaaaaaaatgagctagaagtagaataaccgggcaaaaaaatcctgcttgctcgcccgccgctcacatttactttcaggcagctaggaaagaatcctaaatgcagcacacatgttctcgatgcttcccaattctacatttataatcgttcattccactactttattccctccgttccaaaagaacccaatcctgaaaaccaatctctaggattaggttttttttaaaggacgaagggagtagattgaaaggctcctgtgtaccaggagcatgaaaaaataaataagtgaccttttacagtgtttgcattcctaaaatggcatagatctaacagctcacgatgaaaggtaccttatgaaaggtatcagaggtagaaaggtactaaggattaaaaggtaattgataacagggcaattatgtctaacaacgtatggacgtaccgaaaggtacggtgtaagtggatttaaaggtaccacaaggtactgcgtaagtagtttttaaaggtaacgtaaaatatgatttatgtggtggggacaaaaattacattctcttctattcggtttccaatcttcggtcgttctgtttgcgtcggtttctaaactttggtccgatttacgtggtacatatcatattcgcatgatcttgataattatttccagttagtcgttaattttcatagcaatttggtgatccatcgtttgatgaatgtaatcaaagatcgaaaggacaacaaattgagaagatttacgcacctaacaagaacaaaacaagttcaatgaggaagatttgcgaaaaaaactaaaccaatcgtctaatagatcgagaccgtgcggccgcttctagctccggcgaacataggcagtcctggaccacttcctccgggtcctcttcctccgccgcccctccctccaaccaccgcctccggccacacgtccaccgccagccctcaattctccacctttcaacttatcgaagaacacgtaaaccttacgtacgaacagaacgtatctaagaacaatgcaacgcaacaggctacaagctaattccttcgataccttctcataccttttcatatgtgtaaaagacacatttggcattctaataacatcatatttacattaatgccacctattacaatattttctttccataccttgcccctcgcagatcaacggctcacgtcgccccacctccttgtacctcacaaatatcgtaaaatccctcaacaaataaacacacggtaacaatattgttgtcgagtgccagcgcatggtaatagagacacacggtggcttcattgatttacgatgcacactttctcgatcggtctacccagctcatgctgtctctcgatcggaatatctaaaaatcaaaccttctgaattgaggcatatgtgtatatgtgcagtcaagcaccttcccaccttgtctccggtgtatggctgtgtttagttcacactaaaattgaaagtttggtttaaattgaaacgatgtgacgaaaaagttgaaagtttatgtatgtaggaaagttttgatgtgatggaaaagttggaagtttgaagaattattttggaactaagaccctgtttagttggggaaaaggaaattttttggtgtcatatcggacgtttgaccggatgttggaaggggttttcggacacgaatgaaaaaactaatttcagaactcgccgggaaaccgcgagacgaatcttttgagactaattaagccatcattagtacatgtggattactgtagcacttatggctaatcacggactaattaggcttaaaagattcgtctcacgatttcccccataactgtgtaattagtttttctttttatctatatttaatactccatacatgtgtccaaagatttgatatgatgtttttaggaaaaactttttgggatctaaacgggccctaaacacggcgtatatatattgacctgaattgaaacatcttgtcacattgattaattgctgtgtcagtacacactacaggttgatcctctgatcaagttatttcctgagttcctctaaaaaaaaagttatttcccgagtttaattatacgtggctatattagtttaatttggtttcctctcccatttagctaaagcaaattaatgtaaggagagttgttttataatgcttttcaccggtagtaaatctatctagaccacttttttttccaacttaatggattatacctacttatattaccacatcaatcgctaccactacaaaattgatatttaatttctggacaagaccctccttagattttagacggttcataagtgctctcatctgcgaaaatagtttccgtacgctttcgtagttattaattaggtgtatttatgagaaaaggctagagatatttttacgctttttaatacagaaatattcttttgacacaaaaaagtatagtaatgttgagacttagagtagatggatttctaactagttaatttaatgcagaatataaaatgcaaaccaatctaaaagttgcaacgtataaaaacaaaagttacacttttttatattctgaaagtattagattagtcattacgttcaagtgcaggcatgaagcgtctatcaaatactccctccgtttcaaaatatttgacaccgttaactttttagcacatatttgaccgttcgtcttattcaaaaaactttgtgaaatatgtaaaactatatgtgcacatgaaagtatatttaacaatgaatcaaatgatatgaaaataataaataattacttaattttttttgaataagacgaatgatcaaacacgtactaaaaactggaataaaaaatggaaggagtagtaggtaatttcaaactggaatcacgcagtactaaaagacatgcgacttgggactctaaggcagctagctagtactccctccgttctgacgccgttgactttttaccacatgtttgaccgttcgtcttattcaaaaaatttaagtaattattaattcttttcctatcatttaattcattgttaaatatatttttatgtaggcatataattttacatatttcacgaaagtttttgaataagacgaacggtcaaatatatgctaaaaagtcaacgtgtcaaacatttcgaaacggagggagtagaaaagaatcttaactgcagcacatgttctcgatgcttcccaagcctacatttgctctatctctcgatcgatcggaatctctgaaaattaatccttttgaattgaagcatggatcgattcatctataccagtacttgcatgagttgaactgaatgtccgtgtatatatatatatgcagttgtgcacctttccagtctaatattgatctcaattgagccaccttgttacaatattgattgccgtgttaattagtagtacagtttgatcctctaatcaagtaatttccttatttaataagtgattatttggttaatttggtatcaagtgattatttggttaacttggtattgattgccgtcttagtacagtttgatcctctgatcaagttattttcttatttaatacgtggcttctattgacaatagtattagtagagactaaagaagaaccctggcttagggaccctagaaaaaggcaaacggttcagattatgtgaaattcactcggtggagttgagtccaactccaagtctaactatagaaactgtgtttctactttctagctatctactacttatgcatttagtacttgactaaactcgaccaaacaaaaatatcaattagaaaacttttgacgacctgggaaagaatttaatttggattgacagagattacatatgagaaagaaaactcggccatgcattttctataataaacacaatgactcggtgagattactttgacactaacactaatgaccaattttgcagaaactagtttgacttaatacccactaattaaaaatctagctaaactaattgtttcatgacgagttcagtcaaaactgaaggacatgttgccttcagatgctcgaagccatcggtagccatggccgccttgaggttgcccggagaagacaagaactcgacgcaagcctccttgagcgcgcggcaatggtgctgctccgccagcgccagcgtcacggcgacgttgcccatggcgacgcggcggcgcagcctgtcctcgcagatcagcctcagcctctccatcccgtacgcgtccgccgcggcgagcagccgccgcgccatggcgtcgtcatcgtcgtcgtcgtcgggcagcgtgtcggtgtagatgaagtggagcagcgccctgaacgcgtcggcgtccatggcggcgagccgcagcgtcgccggcgacgacggcgaggcggagagcttggccttgagtacgggtgacctcgccgcgagcacccaccggtgcgcgtggaacgtcgtcgtctcgccgtcgccgccgtctagctcgatgacgacgtcggcgccttccttgctccagaggagctcagcgaggtgccggtgcaggtcggacggcggcacgacgacgccagcgtcggcgccggcggcgagagcctagtgatgatccagatcgacggtgagcaggtgttcgtccatgacggtgaggtcgcagcggacggcgaagcggtcgtccctgaggatgtccggcgacctctcgagctcgtccctcgtgatgaggctcctctggccggagaagtgcgtcctgaaatccaccacctccgacgaggcgtcgtcggtgcggcgcgccggcgagccggcgtggtcgagcacgctgaaccgggcatggccggcgatgccgctccggccgcagccgccgccgccggcgacgtcgacgaagagggagatggagtcggcgcagccgtcgtcgaggccgttggggtagtatcgcatgacgaagctgtggccgccgacggcgaacctcctcgacgtggcggactcgccggtggcgaggatgctcttcgtgttggtgtacccgtcgatcctgaggatgtgggacccggtcgccggccgcgacacgatggcggaggcggacggcggcgaggcacggcagccggcgacgccgcggcggatggcggcggagagcagcgaagcacacgacatgagacgagagtttggaacgtactacagatcgatcagccaatgatgatatgatatgttggcagcaaattgtagagatttttacggttcagataattttttggtggttatggagattctgactcaaagattacaactaaaaaaataaagattatgatcgtatcttggatttcaagtttatgacttcggtttccaactaatttactgatatgatattatccaacaaaaacttatcttaacctctatgtttatctgtagaaatgaatccttgaatcttcaggtcctactcgaacattttctcctgcatgtgtgcttcatctttcaccatcttctcttcattttctctgaagaaatgtggtgtcggatggttgggaagataatctttcaccatattttcttcattttctctgaagaaatgtggtgtcggatggttgggaagtagagcggttgcatctgcaatggcagcttccaacaccttcacctcttgaaccctagctccctcgcaattaatccatacattgagatccataagagaggtgaggttgcgaatgccaagatcaggatgatcagcgaatgcagattttgccttgtgtgctctaacaacaaccgagatttctctgaccttctgcatggatccatcctcgaagatcaggccgacgaacgatccatacagacggaagatcttcaggcatcggaatatgcatttgctgataatgagaatttccatgggatcatctgattctgaacgcagctccaggtctagcaatgcaggcaagtctccaaggatctggaggatttgctttgtcacttgcttagacctgatgcatagcctgtagagattattcattgaagccatccaatctgggatcctttggaaacagcatttcggaatgtataattcctgcaggagatgaggagatgatgaccaagaccaagaatcaaaggggatgtaaccagaaaaaggtccattgataatgctcaatgattcaaggctggaactgacaagtttgccaagtgatgaagccaagctatcagtataatgtgttctatccttgcgcgattcgcgaatgtaccaagttagcttgagagttctcaggctgttcaaatttcccagctccagcaaagaatttgttgagcattcgtcgtacacggttatacctgacagttcctgtagagattgcatttttccgactccgtcaggtaactgtgcaccattagcagaaaaacagctcaaccgtcgcaatttgacaatgcctgctggcaattttcttatccatgtacgacgcaggtccaatgttttgagaaactgaagctccccaatttgttctggaagatgtgtgattctactggctgcaatccgtaagtaccttaactgaaatagatccaccacgttgttaagatcagagttttgcaatttcacactgctctctagatccaacactcttaaagctttgaattctcaaataggaggcatttgttcagagtatccaaatatgct

SEQ ID NO: 26904 - DNA, 1651 bp, Oryza sativa
gttttttttctcgagtcctgaaccaattgaattccgaatgcgaacccattcttctcttctatctgatttatcagccaataggctagccatagtaataattgccaatggcagaccaccacacttttttataatttcagttgaaacatctttaaggttaactgggcatagatcttctgagccgaaaattcttctgaagaatagacacatggagtcagcttcacttagtggccttaattcataaactgtaccatgatcaggggagcaacatgacttggcaacagtaaaaattcttgttgtcactagtatcctgctaccacaagtattctcaaacaaggcaaatttaatggtcatccattcttgcgtgctccatatatcatcaattacgatcaaatacctagcaaatgagagatacaacgatttaatatggaacaaatcactgacataagtatggcctactgtacatacttattctctaatctatttatgtgcacaacatgtacatcaatcactgacataatgttgcaatgaaattacaattttgcctactggtagaatgacatgtaaattcaaacagagttaatgctaaatggcacgtaatttgaaacagagagcttacctcttgtccttcaggaaaaccctcagtatgtttatgagccactccacatcaccagattctgtgctactgtaatcttgcttcttgatttgagaaattacagctttatctggatttgtgctagcatggtatggttccatgatttgacaaattatgctccgtaaaatcttctttacatcaggcttctgggagaccgacacaaaagcctgacaatcaaatcgcccaccagtttttttgtaaacttcatttgcaagggtagttttgcctaagcctccaactcctacaattgaaatcaccttgaatgactgatcaccatcatctaccaggttaatcagctgatcccttggaatatcaataccaactagattcgatgcctcaacatagagtgcaggtaatcgaggatcaatgggcaccacatttgtggtttcagagtacaattcaggatcaatcttgtacctcttccttctgtggcttgcctcaacaatgtcatccttgagaacttttatctgctgagcgacctcgcgtcgagctagcagctccttcaccttgtgaacatagtcatggaagaatcccacaattccagtaggtctctgtggctcgtagtgtagctggtagatgtacctgtcgatgcaatcctcgatgtcgtaggccatctccctcacttggttcctccactcctccatctgggggtcaagcacctccatgccggccagtttctccagcagagcattcatgcagctcagctcaccattcaacaaggcgatgtcgcgctgtacccccttgtgcagcctgaattcctgacccagcagcgtggtgagcttgtcgattagggagttcatcgcccccgtggcgacgctcaccatgaacccatccatcgcctctgctggtcttctgcactcttggacgagtttgcacctgaggtcaatcctgttcagaaacaatgaagttgaaagcaattatcagttggcataacactatcttgtttatgccaaaaatgctgaaagtgcagatctctgaatattacaaacatctaaccat

SEQ ID NO: 26905 - DNA, 2177 bp, Oryza sativa
aatttgcttataccaatacagttgagaagatccagtattaccaaaaactgcagctcacctatttgatctgggagagaaatattacttgctctaatccgtaggtacctcaactgaaataacttcccaatatcctcaagataactgctttccaaattgttatttccatctagatccagcattctcaaggctgggaaattagaaagaggaggcatttgttcactgtatctaaatatattcaaggatcgaacatgagtagtaaccatggaatataatgtcacatcttcttgaccatagttgtaaaatgagagtcggtgaactttgtcttttgagaccaacatttgttttctgtcagtaacgatagtaacaaaattttcttcagttgcttttgatataatgagatcaagtatcatatcatgcaccttacatgaataaactctaccatcgtactgggtatgtactggttggatcatgcttctgtttataagttcattaaaatagcattcaccttcttcctcaaaagttcttccaccattagccttgatgaatccttctgctacccaccttcttaccagatagtccctgttgatcacataatcctctggaaacatacttagatacaataaacaagtccttaaatgatgaggaagatcataataactcagagataatatcatgttcatctcctccacatcagaatttttctcaattcctgaaccaattgaatcccgcaccttgaaccactctgctcttacatatgatttagtagtcaacaaactagccatagaaattattgccaatggtaaaccaccacatttcctcacaatttcaactgcaatatctttcaattgatgagggcatttatcttcagaaccaaaaattcttctgaaaaataaccttttagagtcatcttcgctcagcactcttagttcatatacaagattaaggcaaggggaggaacatgactttgcaacagtacctattcttgttgtcactaatattctactgccacaattattctcaagcaacgaatatctaatggtcttccatgcttgggcactccatatgtcatctatcacaataaaatacctaagaaacaaaataaagttataattcaatggtgaggtttttgcaagaaagcctatagattaatatatgcatagtattatatgaaatgtgtgacaaattttgtttagaaatgcaaaattctttttttttgttttaatttgtttcctatcaagatagaagttctcaattacaggaaagtctttgtgattggtacatgggtggataccgcttttcatgttgtaaattataacagatagtctattagctggtggtgtcaaatacagataatgataaaagttactagtgtatttgaagctagagcggataaatttatcatattggaatacctcttgttcttcaggaaagccctcagttcattgatgacctgctccttatcccctgatctgattgtaccaacctcatcattgacttggtagagtatggtttcaaagatcattcccatgacaggatgctgcgaaagtgacacaaaagctttgcaatcaaattggttcccgattttttggtacacctgattagcaagagtgctcttgcctaatcctcctgaacccacaattgaaactaccttcatcctctgctccccatcatccaatgacttaatgatctcatccctcggaccgtcaataccaacgagagcatccaactccgcatacagcgcaggcaaccgacgatcaattggcacaacatgattacttttacagttaactgctgaatcaagcttgtaccgctttcgccgctgtcctgcctcgacaatccgagccttgagctcctgaatctgctcggcaatctcatgccgaccgacaaggtccttcaccttctgcacatagccactgaagaaccccatgatgccattgccaccgggcctctgcggccgcccatggcggagctggcgcgtgtactcgtcgatgcagtcctcgatgtcatagctcatctccctcacctggctcctccactccttcgtctgcggatcgagcgtcgcctccgtgtcggccagcccctcgaggagcgcgttcatgctgctcaactcatctttcaggaaggcgatctcgcgcttcatccccttgtgcatctggtagtcctcctccaccaacgcg

SEQ ID NO: 26906 - DNA, 620 bp, Oryza sativa
cacggttgcatcatgtggtatagcagccttacttcttcatggggggagaacagctcactcaagattccacatcccactaattgttacagaagagtcaacatgtgacatcaaacaaggatcgcacctggcggaactacttaaaaaaacatcactcatactgtgggacgaggctccaatggcaaacagaattgcttcgaggcgctagacagaagtctaagggacatactaaggtccaagggtgaagataacagcacaaagccattcggcggtatgactgtggttctaggaggagacttccgccagattcttcctgttgtgcgaaagggaagacgcacgcaaatagtaaatgcatcaataaaacggtcctacctatggcagcacttccacatcttcaaacttacaaggaacatgcgcctgagctgcatctcaagagatgaagacgagcaaaaaaggactgcagatttcgcacaatggattgtgaacattggtgatggcaaaacaacatcagcggatggagaggaatggatagaaatacctgatgacctgatactgaagaaaggaggtgatccaaaggaagaaattgtgaagagcatatatccaaacttggtacagaattataa

SEQ ID NO: 26907 - DNA, 955 bp, Oryza sativa
agctgcagtcccacctgggaaaaaaaagaaaaaaaaacataaggatatttttgcaaagagaaatgcagtacacaaattggacttgatttgttgaatgttgaaagaaaagaaaatatactcataacgggtggtatccatgctcatcacaagttgaaataagcctcacaggatgcctcaacaacaccaacagccttcatggctctgctacagcttcttgcctgccaaaattacacaaagcatcaagcaacaaaagaatgtagccaaatattcaaactacctgttcatacctataattatgaacaacttacaaggtaatcaacatcttggagttcctcaaaaatgcggaggcctgaagccatatttaaattaacaacacattaaattatcaaatgagaatcccaattacataagagaaacagggtaaatgacataatataagtacttgccattttggcatctgacaaggcgcaatgtcttctagagaaaacatgatcaggacttccctgatttgatattcccaaatcattttcacgggtccaatcatataacgattctggaggacctacaaatgacaacaatagaacaatttcccagtttgaactttgaactagaaaaaaaaatgatgcaaggaagaagacaagtcatgcacaacaccatctcacagaccatttccaatcgtcgttcttcgcattaatgatcgttgattgtcctcttcttcttcctcctcttcatggctgtacctgacagaacataataaggggacatgtcagtttgataaaaaaataataatcacaacaggctatacttgaacaaatgaaacaaagttacacataagcatcagtcgatgtgactaatatgtataacaaacctgaaaacttcaaatatattttttataatggagctacaaaaagctcaaatgtttgatgtctagcaaaacaattaaggcagtttatat

SEQ ID NO: 26908 - DNA, 16733 bp, Oryza sativa
  unsure (1)..(16733): unsure at all n locations
cctgcagcccagattatcgatacatatgttctcagcagaaatagataccaatacatgctttgttgttggtgaagcgctcaacagtcaacatggaagtttaacagcagaaagtagaaaagataatgtaggggtacaatagaagaaactaagataagaaaaaaagactagaagagtactgataagatatgcatgtaataggcaaaagaaacatgttagtcatccacttacagactttcatgatcagagaaagaagatttccttccattttctaagctcactttttgttgcgatgagctgtgggctagattaccatcagacgccaccactccttgttgctgcattaattcaaaagaatcaatgtgtggtaaagagtatctaattaagaaatagtagtgaaaggatgtgggaaaaagttcttcatcgatccaaaatcagcattacacactagtctgaaaataggtgtctaagtgccaaaagtaagtgtgttgtgtgtttgtttgcatgtgcttggtgcttccatgaaggagcaacgatgaagtcaattaactaaaacagagatgtaggtaagaatcaaagtacgccgggtgaacctgatcaatgaccatctcaattttttccttccaaattaaagcctcctggatattgaatgcagccatctggtacaagttatgcaagactgaatgaggaacattagattatttagaaagtaagatgcaaggccctctctccatgccaaaaaaggggaatacctggccaaaacaaaatggtacttaataaagaaaagtggattatattgttggtatactaaacacactaaaaaaggcaaagcatgtcttctgtttgtttgtgctggaaaaagaaacattagattttccacctcttttatttttcttttccaacgtaaaggaaattcctccctatgtgaatatcatatgagagagacagaccaaatagaagttactatatgacatatgtgcaaatgcagtggaagtaaaaaaacaaaaactatgattattatgcttggtgcaatgagtaagggatgaatgagggaaatattaaccgtgatgcgctggtgcttctcccttttgttgtaaacgcacaaaacataaagcatctgcaagacgaaaaatgaaagcaaagaaaatcaatggaatggaatgcaaaggctacagtgaggattaggaatcaagagcacggaagagaagagatgtacatggccatggtgcatcttgaggccccggtcctcaaccctgcagttgccgtcgatgtgaagggacttaatggggagcttgggcatcttgtgctggggcttgcgtttgtagtaggacagcagccgggtctccagcacgaagtagcgcatgtggatgaatgaccgcccaattttgcggcgaccatacctgaccatccacccctcatatactacggatgacgaagacgacgacatccctcacccccgcttccaatacaacaatgctgcaatcgcaatgaagcaattgcataggtcaattatgcaatcagtgtaccgaaaaactaacctgaacaactgaattcgatccaactagtccttgttaagcacaacatttacttcacagcatcatagcatcctcttccagattaccaaagtgtcaggacacataccaactactaacgtttaacacccatctaccccgcagcatcacacaagtaaattaatacgaggagattgcccaaactagcacaaccgaaaccagcatcccgaacaacccctcaagcacatgataacgatccaccaaacaccttagagagcaaaagaaatcaatccacacctttcagaccagcagcgaacggagggaggggggcggtcgccgccgcctttcgttggggccgacgacgagtcaccgtggcgcgggcctacctaccaggacagcagcgcggcaggtccccgagacgggcggcggctcggctgcgacgcctcagagcgtccagatctggggcccccgctgcgtcggtggcggcggcggcggcggtggcggccacgtcgaggccgcgcggcgcagcgacgaggtgggttgggggggtggagagagagtgggcaagtccaacccggaaagaggcggagaggagacgagacgagacgaggacgaggagaagcacgtgccacctgcctctctctctgctgtgctccggcttccggcggaagccgcggccgaaaaggtggagacgttgcggggtcacggacatgtggggcccacgacgacagtgggctgtgtgcgcgaggcagcggaggagaccggcaactgccatatgcgcaccggcaacgacacggcgccaggtggccagtgttgctgggctggtaagatgggctccgcggataagtccacttgacattcctcaactttacgtcaagtttgtataacgtccctaacccctatacaagatatctttacccatcgaatgttcagaaccatacaaaataggtctcatgacagtcagaaagaagagaattaaaaaaaaacatgtgaaggccacatgtaagtggcacatccacaggaagatttcgttgcctcacgccggcgctcctcctactcacccacgcagaggcgccctctagccgcccgcggcacccccatttctcccacctcatcgtccgcaccgaccactacacctcgttccacgccagccactccccgttcaagcagcccatcactgagaacctccactacggtgtcatcaacctcaacaaagctgtctatccccttgtcgcacgaggtcgtcgcttggatcaagcgcctcctccttgtcgagaagaccaaccacagcgggacccttgacccccaaggtcactggcaacctcatcatcttgtgtcgaccgcgccactcgcctcgtcaagtgcagagatggtgactgcagattttgactttttgagttagtcaaatcttgaagtttcttcagaatttaatcgatgatgccttcaaagcaaaggatgatcccttgagagcacgatcagatgcagctacattaggaaaatcattgctgatgaacaacccgtacatacccatcccaaaatcagcatgactattctagcgagctactccttcatcccataaaaaccaatataatactagatgtgacacatcctatgaatacgaatcatccagttctagccttttaggttttttataagtacacatttgccctcaaagcagcagttttagttggccgtttcaaagcagcgagatacatatctgccatcaaatccggaattttttttgaaataatacgattttaatggaaaattgcaaaaatataggtcagtcaggtgaaatcacaaatttagcaccatggtttgacaggggtacctgttcaataggccactgccgagcattgcgcaaccctgttcatgtacttttttatttttttaagtggtcctgtcaaactgcggttgttcgacaggtacccacggttgttcaatagaatgctaaacttacgatttcgtctcaccgacctatatttttacgattttccattaaaatcacattatttctaaaaacaattcctcaaatcaacagcaaggagtacgtctgtgtggcgcgcttccacgcgaccacattgcccgtggcaatgccagacaccgcccacgtcgcacgcgcattcgaggcgccaggcctgctagagtccgtcgtggattttaggaaaaagtacaccgaaggtccctcaatttgtcatcgaattacaaaatcgtccctcaaccacaaaaccagatatatgacattccttaacttacaaaaccgttcactttaggtccttcggtggttttgaccccagtttgatccgatgtggctgctgaatcagcgtgggacccttgtgggccccacatatcagggtgaccacgtcaccactctccctctctttcccctgttctctctcttcctctctcatgtgttccagtttcccctggcgtggatggcggcagaatcttcaacgcagcggggaggagggccagcgactggcagggcgcaggggaggagcgcggcggcggcgggcgagcgccgggaggtcgccggttgcagaggggggagcaacggcgggtgagcgcggcagtgggctgtggcgagcggctggagcaggaaggcggcggcagagagcggagccggccgagcggagcgggggcggctgcgggcgagctctcacacgaggatactgaggtcgacatcgtccttggccggccgcagcggcgccgccaccggccacgccatgtttattcccatcagcatcctcctatccgagcacatgactggttgtcttgctggccgatggcgccgtataactcggcagcgaaaccattgatggcttcgattggcacatctggactcaaatcccatgaatcttgcctcattgcataatattgttaagtctctgatattcttctcaagggaaattaaagcactcaaatttctgtagtgattagtatcctggcgccacaatgtgctttcctattgaatgaatgcagtgacgcagtctaattttcttcattggtttagtaactaaatgcagctctgccatgatctgtgtgtttcgatctatttcccagagatgcagcaccatgtgatgagctttgatggtgttctaaaggattcaaggtggcaggcgccggttcagtaatgaagatagtaaacaccgagtgaaactgctcgggccacgtagtcggcacctgacgagggccgctgccgccgacgaatgccaccgccgcggcctcggattcgtcagcgggcggcggcggcggcggcggcagcggcatcagcgattcctccggcttaggctgattttattggagtgggccgcaagaggctgtcccgggttcatgggcggcacggcggtcgtgatcatgctgcagcagctcaagggattcctcggcaggacgtacttcaccaccaggaagtctccgcgttcgtcgtcggggccgtcgcgctcatcaccgcgccgttcgccgtccctcccgcgtcgttcgcccatgacatcgggcgcgccgttgccaagcgcgcggagcatgacggcggccatggacgaggggaggcggaggcagccgggggagaagtgggaccccgcggcggcggcgaggacgtggaggtgaaggaggagcacgggcaccgggagggaggcgcggcgcggcgcggcgcagcggggggagaggagaaaagtgtgtgtgagagagaggaggggaaagagagtgtgatgacgtggccacgctgactcagccgccacgtaggacaatactgggtcaaaaccaccgaaaaatctaaagtgaacgggttttgtaaattgagggatgcattgtatctgattttgcggttagcggacgattttgtaactcgatgacaagttgagggatcttcggtgtactttttcctggattttatggactttctcggataggccgaaatcttggcccgtacatgggtgtgggctaggtttttttagttcgaaatttgggcccatgtaacgcggatgggacgggattgaagcccatctaagtaagggcagaatatgggctatcctctccttttgcggcctttggcacaatgaagcgatggccctatctactagcccagtgttcaattcttcccccacacccattttttttttttgagaactcccacacccattgatatattcctacttaattaaccagcttgtcctcgcaaactacaattagtgttgtttttctcataacgggatgattagtagtagggattttttagagacttctcatatattcacaatcatgtgtcttcacactggtaaaaaaaaactgcctatttgatcgtgtcttagagagtgcatttttccgtcttcgttgatgttgcgtgtctgctgtgtaatcgtttttcgataatccagtatgtactgtagtaccagtattattaggggtaaagtaataatttactaatacaatgattaggagttactttactctctccgggctgataatacgacgataaggatgaggtcaaactttagaatatttgattgtgaattatttttaaaatatttgtctttcaaatatagtgactacatgtatagattggtctttaaaagtactttaataaaatcatatatttgttaacacttttatacgtattataatggaaaataatggtcaaaattgtttttttggagaccgtgtccttatccaaaatgacaagtattatcaatccggagagagtatcatttatgttattttcccggctaaatcgatctatgatcatctattgcgctagcatcactcgtatttcatcgaaaaaaccaaaaaaataggtaaataaaatttagtcacagctaaataacgattacacttctccacacctattattttttacaataatattattttatgtttctacaaccgttaacttaggtggtagtataaatatatcaaaaccctttaatcaaatgagatcaacgattaagattattttagtgagtaccgaagtagtgaggctcaaaaaaaatctgcacgacctccgcatgcaaagtaacttaactagtatatttatggcgccatatttttcaccaaaaaatagtcggcatgtatttacattgtaagtccctaaattacatatgtaattttagtatatctacaatgtaaattctagaattatatatgtaagtcctaaaattacatatgtaaatattaaaattacatactaattacatatgtaagtggtatgtaagtgcggtgtaactactgtgtaaatttgtataagagaacgtatcagtgcaatgttaaatgctaatcaaccgagaagattagggcttgctgcaatgccgccgtgtgtgaaaacatccaacgaccagcgaatactcgcggagcaatcgtacggccagcggcaccgactaaaatcaggcaaaaaaaaaaaaaaaaaacctgtcgacatatttttagcaattccgcttaactattagagcacagaaggcgagttcggcgcggtcgtcgccgccgccgccgccgccgcagccgtttacttcgctcgcctcgcgcgcgcttgctactactcactagaaaattagtcatggcagcatcgatcgagttcgatcgagttagatcgatgcgagctagctgagacgatccagatcagtgtgcaactggggcaagttgctgatgcttgcaagatctcacttcgcggtcaaactaatgcaatggatatacatatatccacctggaacagtgaagcacgcagatcgatcgatcgatcgcccggcattagtactactacatgctgtggatcggagtacagggtttagctagcttcgatctcaaagcaaagcaagagcagtacgtacggcgaagtacatcaggactgaactgaagttcctgacagttgaccctagctctcacatgcatgattaagttatacattatactgatgtactctacgtgctaatcaattgctatacttatgatcagcttaattaagcaagttgatcgagctagctatagcttgctttggatgcatgttcccgagatttgacaatgcaaatgttgctagctgggcgggtggatggatcgatcgcattgcttgtgctcagtgtatatagctgtactgtcaggaaagctcagaatgcaatatatacgtatacgcccaactcttccatcacatcataacttttctacacacgtagataaacttttaacttttctgtcacatcgttccaatttcaaccaaacttctaatcttgatgtgaactaaacacagccatactagcattagaagttagtgctgatcaggaaggcgatcgatttgaatgaccagtattactcgaattcttatatatcaaacagctaataaggcctcgtcgtttgctccacccaaaatttgaatttttaaactcaatttgaaagtcaattttaggatattttcaacgtatagtatattttttagcgttggcttctaagttactcttatctatgacaaaattttaaccacaaaatattctttatcactaggctaaccgatgggaaatcgagaggagagatatataaagctcttggcatgtcacatcatggatcgatcaatatggacgaattattctaaactctcgagggaatacgttgtttatatgaaactcaaatggttttaaaaaagtttttaaaaaatcaacaagatagattaatatgtgatagatcactccataaacatgtgcaacatcaaatttaacttatgcatattgcaaaaaataaaaattgactacgcatatacgttaactaattgtaatttaatttactttcttttgcaacatatacaagttaaattctaatttggatgtttgtggagtgatatattacatgttaatacatcttcttaatttttttttgaaatttgtttataattatttaagtggcatgcaaacaacgaggggacgtcccctcgagagtttaaaatccactcttaatcaatatatcattttgtaattgtgttaattaatttattagctatctgcaaacgcgtttcttaatttagctaaagtaaattaagcagccaatcagtaaattcagtttcttttcgttgacaagctgatcgcaagcgaccaagcagctccgatttcctttggctgacatcaggcacacaatcaccaccaacccctgcaggttacggagctggatcttctacatgactaaattattcagtctactgtcaacgttagtattgcaattgtattaaaatgatcgtgtgtcagcgcatctcactcatcccaatctccgcatacatcctgttcttgttgctagcttgtattccgtgtggcccccagtttgaattcgtcaaagtcagctgccatggatcgaaagttacgaggtcgatcgccctctgcatgcaatgtcaattcttccagatacaacactatttatcattagagatgcttgtgctgatttgcataattaagtgaagtcaaagtattagtccccgttcaaactagattaagataaatacagattatacctcggttttcattaacacgttttttcaaactgccaaaggatgtattttgtgtgaaactttttatatagaaattgctttaaaaatatcatataaatccattttttaagtttatagtaattaaaatccaaatcaatcatagagttaatgacttttttatttttcgtgtcctgacttcatgttcatactattcagaaatgaacaccatcgatctaagagctaactaattctctctctctctctctttttcgttaactaattccgctaggtatggtagtggtttaatttgtttaatttaccgtggtagttcctttttttttttagaaacacagtacaaacgcatgcgcttacaacgtgcgcacactcacccctatgaacgcacacacgcacaccatacccatatgagcacctccggaagactgggccggcatatcttgagattgacgaagtcaccacaggcgcctcgctgtcgacgggtacatcgcctatcactgaaagaataattagccgtaaatgcgagtacccgtgtcaaatctaggagttgaacccgggtgggctggttccaccactgtggtagttcctgaagctgtgttcaattaaattaaagatatttcacgcacgatctcgatcttgatatgcacccatggctagaactgatgtttgaattctcaccaaaaacattttggagaaataacattttggagcggtcctggagaaatataaagtggcaataaatatttgtatgaggagaaaattgcactttaaagtgtacgctgtttcattttacgctgggtttaacccatgcttacactttacattacaatatatcaaaataagttttactttagtttgcacgaggtgcgtcgtataattgaaagaaaaatcttgcaaattatgagtaaaacacacgaaacttgttttatttagaccatatttcacaaaatttataaatttcatgaaatttatataggtttgatatactaatacaaaaaatggtatatgtgctggatttcccagccgtcacctcccaagcggcattgatgaggaggactgaaatgtgccagtttaggaaccggcacctttaagttccacaaattaaaaaaaaatgacttgatgcattgaatcgctcctcatcaccccagaccaccatcgatccatccgacaacatcccccaaatcacacaactcaagtcaccatcgatcaatcctataacaacatctcccgcacgaatcacaaaaatttcaacaggatatccataaacaatttcatattatagaactaagcattcatgaaaaaccaaatcacaaaaaccgcagaggagatccaattacaaaggagtactctgctttgctaccatcactcactgggatgtcgaggatgtcgaggttgccgctgccgctgttgcctccatgcgcgagagccatcgccgctgccggatccacccatgagagtaggggtggaaacggagtggattcggatggataatagtcataccatatcctaaaccaaatattttaagcggattcggagcgggtgcggatagtgtatggatgcggatgcggagcggattgttttggatgtcggaaatggtgcggagttggtgcggaatcggttcgggaacggattaaatttatcggatgttacgtgtgtatgcaatcaatacaacattaagttagcaatgcaaggaacaataatacaataatcaataaacgacccatcgtaagaattatgtacttaagtgttaaacaacatgaatacatgatgttcatgatataaaaatacagctacgcaagtgtgacatgagacggcgaaaggctcatactaaaaaaatctaggttaattgatgaattaggctattggatgaaccaacttatgttatatgcaatagattgagtggttacatgtgttgataattttggattatccggtaaatggcctatcggataatcttacagaaatatcggataatccgcatccgccggattttaagataccatatcctcatcagcatccgtatctgcatccatatccgccggatttcaaaaagcccataccatatccttatttaggacggatttggctcggttttcacccctacatgagagccaccgatgctgccggatccgcccatgggagccgtcatcagcaccgacggatccgttcgggagctgccattaagttgttgcacgtagtgaatctgagcgctgcaacccgtggatccgccatcatcaccgcccatgggagctgccgtcgtgggagagaactccatgaagttgtagtggcagcgaggggaggaggggctgcagtggcggtggtgcgagaggaggatgagaggacggagagagaggacatggtggtgagtgggagagaggcgtcgacgataatgacgaagggagaaaggagatcgaagtaaaataagcgtggatggagaagcgattttttttcttccactccgcttggctaggcactatcttctctacatgtcggtttaataaaagaatggcaccgatgacaatttatgggtggcggttaaattaaaaaataggcaccaaaactatatgtgctagttttttctaataaaccagcacatataagaagttggtgtcggtttttaattttgggctcctctgagggggtaagaggaaggggaaatgctcatatgtgctggttttagattgaccggcacctatgaggcatcccctactacatttttagcatttatgacatattccggtgttaagtgaaacttattttaagacaatttggtgtatagtggaagtatatgttaaacctgctgcaaagtgaaacacggtgcattttatcgatgtaaaatgtaatttaatcttctaggaatttagaagtgttatattttggatttttttgagtaattttacggtccttgagaagttaaggagagttgtaatgtagcattgtcaatgttaatgttgaatttgttgtacctagtatcataacactagagtaaaaaaatagggacatctataagacatcttgagttaacctgcgcaaattccatatattgctaaattgaaatatatatatatatatatatatatatttgaaagtataaatgtatttgatatatataactatttcttaaattctataaaaacaaatatattaattttgcatgtatgtataacaatcaacatgcaccatcataattaggcccaccatgacgatttttctattgacctggttacttctaactttctaagccttcacaacaaatataatggatatttttagccttgtactctaaataatataatttaataaattaatataatgtaagtagtatatattggatacaacaagaaggatgatgttgtgatagaaggaagcaatagtaatgtaacgtccggcctctctcaggctaggcccacttatatctgacagcttttataggtcatagaatgccctcacagaccaacacaagtcttttctacacactttgtccttcccaatcggtcacccatcccgagattgctccaacagaccaacacaagtcttttacactttgtctttcccgatcggtcacccatcccaaaattgctccaagccaagcacgcttaacctaagagttctttggagatcggcttccgaaaaagaagttgcaacttgttgagtattctattaatcctattaagccctgggctgggatgtcacaagtaatctagtttcactactagaaaaatgattttttatggtggtatcctatttttttttccactggcggttatatgagaaatctgcttgtgaaattctatcgaggggtggagggtttaggacagccggcgaaaatctgtttttgctgacggttgcttgagaagtccgcttgtaaaaataagcttatttttactagcgtagattttcgctggcggttccttaaaaagtccgcttgtaaaaaataactctatttttactggcgggcctcttaactaaccgccaacgaaaatccattttcgctggcgggtactaagagcaccgcccttaaaagaaattcacgcacactaaaaaattcaccgcgcgcccaccaattacaaataatcgccgcccatcggccactccttatccactccactccagattaaaaatctcctccagatccaccaaccagcatcctctcctcctcccttcccatgcaaagggaggcggcggtggcggtggctcagtggtgacggtggctcacgcaggtggtggcgacggctctggcggcggccatggcccaccacccatccgccctagatctggcggctgcagcagcatggaaggggcggcggccggctgcggcaaagagtagagaaggtgaagaggagaggtggtggcaggccgagccgggcgacgacgacgacgagggagagcgtggtcactgggaaggggtcagcagcagtggcacgggagaggggggcggtgaggagcggatccggccccagcgagtctcgggaggttgatccgccgccgccgggcctcgggagcatcgcgtctggcggtggacggagcgtaaggtggtggtgtccgcgtcgtctgcgagaagccctgccggcaccacgcagaagttcctcggcctcctctagaggaactcaaattgaaaatctgtgagcaaatctatgatggaatttatagaatttgtgctgtgatgtgaatgtggaatttttgtgctatatgatcatgatcaaaccattttgtgaattatttgtgttcgttgtggatttggaattcggggatatggatttgggaatgcagggcagcagcatgcggcatattcattttcgcttttcatctttttttcatctttgctagcgggtagaggacagctgcatggcgtattttcaattttttttgcccccaaaacgattatcgctggcgggtggcttaaaaccactatcagcgaaaacgaataatcgctggcggtccacgtaacacaactgccagcgaaaacaattatcgcaagcggacctcttaagggtccacttaagaggtccgcctgcaaaaatcgagcggattgcaaccgccagcgaaaatcttagatttttactggcctttgctttgtggcggcaccaaatgccgccagcgaagattcaaaatggccaccatgaaagatggttttcgtagtagtgtttctaaacataataaataataataatacgatattgtgattctctgcatgcgtaacattatttcctcaagtaaaccatctatttgttgtagctatgtaacaccaacttgacatatatataatttcctacggaggttttgccaaatcaaaaggcaaagtggatcttttaagataagtaactagtgctgcaaatggtctcatcaagtactataaatactaaccatgcaatccatcacccagcaattctcatctctgttgatatattattcagagtaatctcacaatggcaggcattaaacttgcagctcttgggtttgttgtcctcctaagcattggactagctagtgctgcaagagtagaaagatactctagttccgaaggttcaggcacaggaaatggagaggggggaggatatgtgaacggtgggggagttgggtctggaagcggtgccgggtctggtagcagtggtggtaactatggtgcccatgcaagcggtggaggagggggcgaaggtggtggttacagccaatacggtgggtcagggtcaggtagtggatctggttcgggctcaggctctagtgaatatactcaaaatggaggttatggttatgccggttcatccagcgctggtggtagtggtgccggtgctggtgccggacaagctggtggttattggccatccagtagccatggatctggtagtggtatgggctctggttctagtagcgctgctacttactggaaaggaccatatgcaagtgcatatggcaatggcaatggtggcggtaacggccagggccaatacggtggcagtggcgttggtgcaggttctgggtctgggtttggcgatgctagcccttaatttccttcaaataggaaatttggaaattaatggagcccaacctggggtcatatttatgaagtaggatttgtttttcatttacttgtacttgttttatgcattatgcaaaaagaaataaagggctcaattgtttcagtaaaatttggtattgtgtaactaatgatgagagatgtggctattaagaccgtcatgtgtgaattgatagatagctctgcttcgacatcactcggatatctatacatgggccggtacatcattccaatgtgctaactataatcacttaggagaacattacgtggtgttatccacagttatgatttcagcttccgtgatagaagaaacaactttttttttccaattatatatggctcaatggagatgttctgtcctacttgtgcaagcaatgcattactccatccgtccaataaaaaacaaatctaagataggatgtgacattttctaatataatgaatctggacacacatctcatactagattgatattttataggacagagggagagggagtatgtgtgtatattgctctatggcgtaaaaaacatatggtgactgcaaaacgatatactaagcaagcaaagcacgcagaacgtatggtgactgcaaaacgatatatatctcttaagcaaaacgatatggttttgcaagcaaagcatggagaacgtacggcaaattaagtacctcgggcttgtttcttgactgatctcacatgcacgatcaattaactatacactatactaagtatgtgttaagagcaattttatggtacttgagaagttaccatgaaataccattttttctattgtaaatttggtatctcttggtacctaggtactatgagataccaaattttacactaattttttggtacctcatggtaccttcttaaggacagtagaattgcccatgtgctaatgaattacattgctaattagtacttgtgatcagcataagcaagttgatcgaactagcttgctttggatcgatgcaacttctgagatttgacaaatgttgctggtgatctgctgctcatcggtactgtctgtactgtcagaaagttcagaatggaacaccagtatttaggtggtgtttggatctagtgacttaactctagtccctgtatttaaacactaatttagagtattaaatataggctacttataaaactaattacagaaatgaaagctaattcacgagacaaattttttaagcctaattaatctataattagataatgtttactgtagcatcacataggctaattatggattaattaggctcaatagattcgtctcgcgaattagtccaagattatggatgggtttttattaatagtctatgtttaatatttataattagtgtccaaacatccgatgtgatagggacttaaaagttttagtcccatctaaacagggtcttaatatttaggtctggtttagtttccaattttttcctcaaaaacatcacatcgaatctttgtacacatgcattaagcattaaatatagataaaaaatactaattgcacagtttgcatggaaatcccgagacgaatcttttgagccagattagtccatgttagagatatgtgctnngtaacctacatgtgctaatgatggattaattaggctcaaaagattcgtctcgcggtttccaggcgagttatgaaattagttttttcattcttgtccgaaaacttcttccgacatccggtcaaatatccgatgtgacacccaaaatgttctt

SEQ ID NO: 26909 - DNA, 626 bp, Oryza sativa
cagaaacatcaatctgatctgaatcctcctcatccagcactacagttaatgaagactatatcatatgcaaactagactcctatcatgtctaaaagtctcgaggaaaatggaatcacaatgtacctggcagtttaacaggtgcatcatggccatgagttgatgtctgcacagtatacataatcttacttagaatttaaggtgtgagtaaattggaaacactatgagtaattcatcaacctcttgctcagattcaggtatttgatcttcatcttcatcagattcctcatcaagcattgtagattgtctactttggtccatttgaaggccggtttgcatagtattatcttgtgttgttctccctttcttagaagaaacaggcggagccatattggccataacaggaatcctaggaagtattagattttcatcactttgtgaaaaccattccctgagccctgtcagtaggaaaaagaaggtgcatcgcaactttgtaagtaatagagggactgtaatttttgtaagtaatagagcacagcacaaccaccaactcatgtaatatcaaccttagtcaacttaaaggaaaattctacgatttgacactgacaagcgctcgattcaacaaaatg

SEQ ID NO: 26910 - DNA, 3441 bp, Oryza sativa
ttgtttatgactcatccatcatataaaactagcctactcgcagttagaaataaccagcaagaaaccgaaattttcgacactttttcatgtatcacgaattatagcaatcaaggaacatatacgatttgtgtatgctctgcatcggatttattggaaatgcctccatacctcactacggatgaaaatcatcaacaagaagggggcaagaatatattgattcattttttgggggaaaaagcatagcatttgtttcaagttgctaccttcaccagaaactggaaatatcttcaaattcaaaacctcttagtgctatcgatgaaaggaaactaaatactcgtgttgatgcagaaaatgtatatcaagtgttacgaggccaaaattatgggggctggtatctttcttaggcatacctttagtgcgagttcttcaaaacacttctcaacattatctcgtgttttcgcgctactctcaagaaataggcatccagattcttctgcaaaggcaagcccttcttctcttgtgacagttctttcatcctcctgaaagatagaaccatcaaaatcaactatgctcccatgagatgttcaacagtattttatgaaatcgatggaacttaagggctgaaaagggcatactataatgaacttgaatcaatgaaataaaagctaaaactcaggaacagccaggatcactttttttttcaaagaaataactactttggccaaatagtaccttgtcaattttgtttccaacaagcatttttatgcactctttgtttgatgagtgtgactctatttccttactccatacttcagccagatttgtgaagctttctctcttcgtgacgtcatatactaggagtaaacaaaatcacgtcagttgttcatctagtgtgaagcatgaaaacgggagcacacatgacctgatagcccggttctcaggttaattatcataaaacaatttctgcatagtcaacctaggcacaaactattcaaagcaccattaataaaaaaataaataccgcggtgaattatacatgtaatgtataactttcggtggttcaaagagtcgcacagatggtcaaggtagaagaaatagttggtgcatcataaagacgtctcaagatgaaacagacattgatatgtcacaacacttggaagtttaagtgaggatcacactattaggctggacaagtctgcaagatatgatcttaagaattacagcagtgcagaacaacatgtttataatttgagcaatcgatcctacctaacaaaattgttatttacctagaataatgccttgagcacctctgtagtaagaactagtaattgtcctaaacctctcctggccagctgcaacacaacataatagtgctgtcagaatatttgagatattggaaatactgtaaagtaatccattttccattcaacaatagcatggttcattttgtttatagacaactcataaatttccagcaacaatgcagttgtaaggaaggactgggtaagatggttaatactgagacatctagagcaagtaacgtaatgggctacaaatctggaatattggaatctctgatggtagatggtagggagggaagggggtaccagggaggatgaaccaaaatattttaggcacaaaccggacaggtggggctataaatctgtgaatcaggagtcagaacctccaatagcaatgatgtaagcacagggcaggtgcaacatggagggacaacaccaaatatattaggtgcaaagcaatcacaaaaacaagttctaattctaatgacagcagaaaaggatggaaagtcaaaattagtggaaagcaaagtatgttactgcaaagaagtgaactgaggcttaaaaactgagtataggttgctcaatcattctaggcatgttcctcacttattgatgttcttggattgtctttagttggtgtttgcaatagcttgtactagtagatctcaagatgcccaatcatcatcagatctgtacaggaaattcaactacttcctctgaatcaaataactattgcgtgcataaccagttactgaggccctcttttattgctagaagaaagaccgtgtgctaaagtttctaaacatggagaacaacatctagtaggatatacggaataagtgcccgtaaaccatatcatgaactctgtttcactcataaccttaatatactccaagcaaacatttgctagcccctcaaaataatcatgtactaagagcaattccatcattccacatgtgacagatcatcaactatacttagtattgcatgataattgtttgcactttacactactaaagcgcagaaaggctttccaaacattgtatattcacatctgaagctaaatatcatcgaaaagcaggccatttctatacaacccaagttatgaactcaccagtatcccatattgtcagcttcaatttctttccaccaatcgtaaggaacttgatcttaaaatccactcctgccaaccagtgtggaacaaaaatcatgaaacaagtgaaacgacaaccatgaccatacactagaagaagtgaactagaaattctgcattggtcaaatttattaaccacacataagaccgatcatgaagggctatggggtaaggctacactgaccgaaatttcccaaccaacaagaagaaagctggggccttgttcagtataggagcaaaggaagaaaacagctaggacaagaaaaaaggacaaggttcgtccaccaaatcccaatgtccttaaccctctacctaccactgatccattatcctcgtccaactgaaccagaaaatgaaaagggagaacatcccacatttaggatcgcccacattcagtttggtcgctgtattgattgagctacacaataactactagtagtagtagctagcactagtactaaaacgaccaaagtaccctacctgattggagtacaaaatctgaagttctgaaccaacatttgagctgcatttcaggcgtatttccaaggaaagaactaatcaagatcgtagccaagctgggatttatatttatttatttatttttgggcggcgcaccgacagatgggtagaatcgtcgcggaattatactaggatgaacagctagtgtacgttgtggtggtaagctacgacggcgatcggtgggctgcatctgtccgggagtgatgtgggggggcacgtacgtacgtaccgatggtgggagcgatgtcgtcgtcgaggtgggcggcggcggcggcgacgacgaagctgacgaggaggctgctcttgccgacgccggagtccccgatgagcaggatcttgaagctgcactcatgcccacctccaccgccgccgctgctccccgcccccggcgaccccatagccaccacctcagattcgctccctccctcccgcccctcgtcaagagggggacccaacctggaccggcgg

SEQ ID NO: 26911 - DNA, 15133 bp, Oryza sativa
ccgtcacacacgccggtggcgtggcggtttttgggtgggatatgattcgcgggcggggtggaacacgggagagggtgggggtgggggcgtggagccgtgggtgttgcgttccgcgggtgagaggggtgggggaaagggatcgtgtgatcgtgtcgtggttggcagcagatcaagcggaaggaagcgtacgtgcgagctagctagcttgctgatggggacgggcgacgccacgacgatccctttgggggaatatatttagggctgccactatatacctatacctatttagggaatatgagtactccctccgtttcagtttacaagatgttttgactttattaaaattaaactattttaagttcaccaaatttgtagaaaaaaaagtagtagcatttttaacccaagacaaatttattatgaaaatatattcaattattgatttgatgaaactaatttagtattataaatattactaaatttgtctacaaagtcaatcaaacttgaaacagtttaactttgaccaaaatcaaaacgtcttgtaacctaaaacgagggagtagaaaggaattacacttacccatactatttgggggaggacataagtagaaaggaattacgcattttaattttgggtaggggaggataatgctcattattacccacctttctcatttccatgtatgtgtgtaaaactcggacacaaaatttaaaactcgttttcacattataaaacttatcaaatttgactgaatttcataggaatgaattattatatagagaagcaactttatataatttttgagccatttctatatgtgaggcccacgtataaattatccatatggataatctaattatgaaatgggtaaggatatggttacccataccctccccagttgcatgcctaaatataagcctatatgtggtagaattctctagctcaacctcttataaggatgtgtttggtacgataagttctcaacttctatttctttgtttttcacgtacacacttttcgaaaaattttatataataaagttgcttaaaaaagtcacatttagtcttttttttttagtttcttaagttaatactgtactaatgagccatcccgtttccgtttagaatttagaaattcatgactttctagtttgaacacaatctaatattgttagaagagaagtaaagcgggctgtcgggctaaaataatattagaaaaataaactagaaaggggtggagtaaggttcggattactccacacgccctatatcagactttattccggagttatttttaagagttgatcaattaacttcattaagaaaaagagacttgatcagttagagctctataataaacatattctagtagtatgagcgactctaggtgttcgttacgcgtggtatcatcggtatttgtgtgtaaaccggccggtgttatctggagcgttgagatacgtacggtgacgcgacaccgcgacagtatagtgatgctagtttttggccgtgtgtgcactacgtctacgtacacgcgaaggcaattcgccagtgacctgaatttgctcgatctcttgtgatcttaatttacggcgtttcgtccacgcggaggagttcgtaatactgatccttgggacgtacgggccgccgtgctcatcagcctcagccagcacgacgtgcgcgagtttctcagtttcttttgtttgctgcttctgctgctgctgctagagacacgtcgtgtgtgacagcataatatttggggcttattcgttttaaaaaagaagaatttctaaggattaatttctattaatatctgtttgtaggaatgagatataggaaaaccaaattaaggaaattttattttcctacaagttatagggagagaacgcaaaaaaaagtaattaaattatccatttaaaccttaaagaaaaattcctatggattgatatgtgcatttctttctatttctttaattttttatttttatgggttgaaattcctccaaacccaataaacaatcgacgtttgggacagcaaaatactgctacgtgtaagtcatttttgatgtttcaagcatcaaataattctgtctaagagataataatactactagtcgtaatagctaactgatataacaaaagagacaaatatgtataacaatatactactgatatctacataatggatgtatatatatagtcaaacgtactgtggagataggagatattatgtcatgcatgcatacacctgttgatagggacatgatggcgctgtaaaaacacgtagcataaggtcgcggttgcgctacacatcaggcaatgcgtgtctccacaaacccgccagctacgttgcttaattaagggaaaaacggcgagtgagtcttcgagtatgcgctgccgcatagaatttttttccgtgtgggtgtcccggactccaggtgatgtttgctgtttttgtcattagtgtagtattatatatttatatgtgcgcaaagtacacttgcaattgcatgattgcatctgttaattgttatcttcagtactggtaagattgcgtttgactactctgaggtcgtgttttattacgtacgggttgccgcctctcagattttcaatttggagcagtaggggcgttctttctgaagaatgaaactattccatttatcaacattgtgattctttttcaaaaaaatgcatacatattatttttatagaactgttttaaatcaaggtgaactaaactccatgatactccctttatgtcaaaatacaactatatttttttttataaaatagctatattttgaattgagcgagtagttttaaaaagagtgaagtatatagggagtctctaaacttgtgtaaatatgtcatccagatccctgaactatcaaaatatattctggatctatgaacttatcttgggtatcatacaagtctaaacggtttcaacctgctccgtgtgttgacatagtataccacggtagcacataaatattaaaaacatttttttctcctcttaggtagagaggagtacttttcaattttaaaggaaggcaggttaataagacgtgtttaatttttaatttttttatgtgactgacacataggtcctagctactaacatacatgcactatcatggcatgctatgtcaatgcatgaagcaggttatagcccgtttgtcgtgacttatatgtaagaaaaaattgcatctattaaaaagaatatggcaaccgaagagaaaggacacaatttaattaattatatacaagcttgactatgaataagttgcgctctggattttttttcaggaaaaaaaaacacttaatgcggtcttataggagaggtggtaatgggctcaaacttttgacatacaaaatatgagggttggataaaaaggttgagctaaactttagtagatttttttaaaaaaaaatatttaagatgagaggattgtgaaagggtccatgggtcctgacccattgtccggattctattcatgatcttagtttagtttcgcttggccggccaattgttgatgaaactgtacacttttcatttttgtttcgaaaatgacgagatctaggtgtcaaagggaaataaaatagcccagctttttttgttcatagaaagggaggaagagcatgatatcatagcacgatatgcatcacaggacagatgatttgtaaagagaggatggcaccgagaatttgttgagcgatctttatcagccaatcaagtgagatggttcactggaaagaatagaaaaaaaaatgtcagatggttaaggtgtgtaggcagaaggccccacccaccacattgaccagtttggccgtggacagcaatattgtaccgaagtggctgacaggttcattgacgaaaaccaagaaattttttgtgaaattaatctttagggcccatttgaaatagagaattgctataagaattttagaggatttaatttcctaagaaattacttaaacactttgattcgtaggaaaggattgaaaattttccatacgattgtatttctatggcttaatttcatacgaaataagtagaatgttgaaccttttagaagctttcatttgctttgtttgtttcatagaaacatgccgcttcaattactgtgttttttctatacatgtgttttttctatccttgtatgttttttatatgttttaaaggtgcttttagatgttgagagtctaaaagtctatttatatgagagtcagcttaaattataaaacttaattttaggagcaattctacggtccttgaagagctaccatgaggtaccaaaattttagtgcctcatagtacttaggtaccatgaagtaccaaatttataatagaaaaaatggtacttcatggtgcctccgcaaggaccataaaattgctctaattttagagttggagtaggtttttttagaaaaaaaaaagtacgaattacccactaaactatcgtgtggttgacccaattaccccctgaaccataaaaccggacaatttaaaccggacgaataacccccctggctcaatccggagcggttttagtcctatgtgaccgcacatgtggcactggccccacatgtcagcctccaccacatccttcctctattatgaagctagtgggcccccacatgtaagctgctctttcctcttcctttgtctacaaccatagagacgcccacgtcgccgtcaccctcatctcgaaccctgcctcctttagctagtcgttgtcgccattgcccccatccaaccgctggagagaggaaagagaggggagaggaaaaaagatatgacaagcggcagtggcggcgccctccagggcaaccgggaaagcgaccgactcctccactccgatcaaggattgccgctgcccgagtttcaccggtgtggccctatctccaccaccgtcgatgctggcatccagactccgctcccgccttgcttcgccgttgtcggaggatggatactgctccaccgcctcgatctactatgcatcgatttcctccgccgaccccgtcgtcaggaggccaccactgaccgtcgtccccttgtcgtgggctcccctgacggccggccccagcctctggctggcgtccgcagtcgaggccgtcggcatcgctccaggggaacccatctttgtggccgaatttcacggctccagtcggtgccttctcctgcgaccgcgccggtgccggtctccatcgccgctagggggagggctaccacttcaccataaccgccaccgctctgcctggctgccgtcgggctctcctctcccttgtgccacatctctgcctttctctctctgcgccacatcaccattgccgctctcgtcgtcgcctggagagcactcccagccatgcctcctagagcgccctcccatccgcgcccatcgtcgctcaccaccgaacggttcctcctcccagccgcgcccaccaccgctcccccagccgcgcccgtagccgctcacctccaatgctaacatcacacacacagacagaaggtattaatatgacatgtgggccctatattattttattctattttctgttgatgggatttccacgtcagtgcccatgtttatgacatgcaggaccaaaaccgctccggattgagctaagggggttattcgtgcggtataaattgttcagggtttaaaatatctggttttgtggttcagggggtaattcggtcaaccacgatagtttagaggagtattttttttctttttttatatcgtagtctattgtttatcattggcttttaaaccctaatagctttattaattatttttcatggctaatctttttgctgaaacgatcatagctataacaatattatagtccaaatggaaaaaaaaaagagattgggaaaaaacagctattactaaatttatgcaccacaatataaaatgtaacggaataattgaataatttcgtaaacgtgcatgcttggctagttaattggctgtttgcgtcaaggcaacgagactttcatatatcggtcttcaagttccagactcccagtaggtggcgggcctgtttagttgggggaaaaattttttggggttattttgggcgtttgaccagatgtcggaagggcttttcggacatgaacgagaaaactaatttcataactcgcctggaaaccgcgagacgattttgagcctaattaatctatcattagcgcatgtgggttattgtagcacttatggctaatcatggactaattaggctcaaaagattcgtctcgcgatttcctccctaactgcacaattggtttttgtttttatctatatttgatgctccatatatgtatctaaaaatttgatctatccaaaaattcgatgtgatgtttttaggaaaaaaaaattgtgaactaaactgggccgtagtactccagttgtgtgtcatttgctgtacggatttcatgacatctggatagtgcactagcaataaatgggctaccaatatccagtgcatggctttgaccaaccgagcccacaacttattcctgtaattaagtaccaataatatgtgaaactgaaaatgacaggggttgggagaaaaaatgtggaaatgcggcttcttttatgttagagaagattttcatccttgcaaactctcttggaccagaggaaattgttgggcttttatatagtcttttgggccgtaaagcaacaatctgagacggcctagcaaagatgttgagcagtgagatgcactcgtagagtaatggcaggggtgctggcatgcaccctatccgctcggattcgattctcttcgagcacgttcatctgaaatatttgcttcttgctccctctgaaaatatttgactccctctgtttctaaatatttgacgttgttaatttttttaaatatgtttgaccgttcgttttattcaaaaaatttaagtaactattaattattttcctatcattgattcattgttaaatatatttatatgtatacatatagttttacatatttcatcaaagttgttgaataagatgaatggtcaaatatgtactaaaaagttaacggtgttaaatatttagaaaaatatttagaaacggagagagttcttaaaatcatcaacaccaaatctttccttggtgtccaactttttaaagatgttgatcagtagcatcgcttcactttgaccagaaatgtatatcagcatggcactgtgtctatcatttcttttcttttcttttcttgagaagatgtctctcttttattaggagtatcatttagtaataataatagttggagtttcaaaacataacatatatcctcacaaaaaagagagagagagaaaacacaacatatatgggctattcaactcgctgcatactgcgccaaaatcaccatactcctcttggcgcaaagtgtgtctaccaaactcgacgccgatcgattttgcagcttttgctcgacggctaagttcagaggaagccgtctctgcatcttgtttgtcgctctcgatttcatccttagtttgtgagatggatgccaactcgtctctgctgctgctgctcctgctgctgaaatcaaaccgtggagcgcgcggctgcagggcggccgcagcctctggtctcccgggtgttgtaggagctgcatccggggcacttctgcgccaggacgtggaagttcacgttcgacgtcgcgccgcagtcgttgcagaggatccatatctgaatgaggaggaagaagaagaatcatcaaaggattgttcagagtcccagccatgttcactcaagaattggtagccaaagaacttttattccagtctggatggcgtagtacctacagaattttgtgatagaatctacatgattttagaaacattattttagtagatcatattattggtagaagttgagggtttgtcccatctcgtctttttttaagctcttttctattcacttctggactttttagttgtgtgcctacgagcagaggccggagatgtaatccatttccattatctaaaaaaatgttcactgaagaatggcacacgagattttggagaaatgtttggtgttttactgaccatcttcttctggtagaactccggcatcggcgtcgcggccacctcctcgtcgagcttcttccacgcgtccgacatgtcgcaggccgaccgtgagcacaccgggcaagcgaagctgggggatatcagaatcattgcattggtttggttaggagaaagttttatcaggtgaagttttttgtctgaagaacactcactgatgatgcgctctcatcacgttcaggcattccagatggatcgtgtgcccgcagtgcaagacgctgatgtccttcgtcgagtcaaataggtactgtgatttggaaaaggagagcaaatttttttatgtcagatctcaagaactggaaacaaattgagaatgttgtttttttttctctacctttctgaataccaaatgcatttgtggaaagcaaggctcacctcgaagcagacaggacagttgtgatgcattgctccttctacacagtgatgagaatccctcaagacattactgtagcaacaccctgtttagtgaggaatagcaaatgttagaccaatcttgtttatcagcgacatgtggcgagaatgtcaaaaaattttggggaatacgcatcactggctcattgcattaagatcatgcagaacataccgcatttgtcgcagtgaaagaacttatccacaccaccagttctggaaaaaaaatgggcatatccaaaattgatcaaactgaataaaatagtaaatgcagaaaataattcatagagatagatttaggacttgcctgcatatgccgcatccatcgcagtgatactggttctttgagacctggaacaaaccaaacaaatatgttagtcaggttgttaagcatcatcatacatttatgaaccatacttgccacattagaaacttagatgtaacgtagaatcatcatttgtaatccaaacatgcttacatcatcatcaaagaagttgcatttttcgcagaagtatttccccatgcatgccccacaaccagaacagtactgttgtacctgtcgatcaaagtgaacaattttcatgtgatcagtacagaaaaaaaaaagttagcacaatccagaaattctactgttgtacactcgagaaattctattgcacctttctataaactacttacatcctgttctttgtcgcagagagagcagataacctgtgatacaccataaagtaaaacagtttcagtaactccacaatctggttaagaaagttagtgataatgacaaaagcgtaacagccattgaaattcttatccactagattcccccaggaaattagtgctgtgataattgcacaatcagtttgactatttgaggcactgttagctatggacacctgttgggccacataaacgaatcaatcatgtgctgctactcaattattcaggaatcaatcagctgaccgcactcaagttaatcttggctgatggtgagacatgcctttgtcatttccctttcctcctctgccgtcatccttctagtgacattgtcacatggagataagcaagcaagcaagcaatcaatcatgtggaccagacaatggtcactagtagcagaaactaacctagtgtgcaagttgagttgtggaatggaaaatatcaagaagaatctgtccccatggagcactaagacaattagacaaccttatctgaagaagggggggagaaggaaaggaaaggaaaaaaaaaattcttgggatgggggcattcttggccacttcatggcaggggtcccaaacatcattgtccagggctccagaggcatgcatcagcatcagactgaaatggcaattactaatcggattttgaattttggactgaagaaattgataggtttgtgaaaactgaggtatgatctctccggcgacacgccatcaaatattgaccgcagatttttttcttttcttttttgtctatcaggcgttgtgtgtccaagcaaaattcagataaatttgacacggattatatcggatgaaattgggtatgacaagcatcaaagcttacacgaattgaaaacaaaagggaaagctgatgctaaaatcaaacagaagagtgagaacaaacaaacaccttcttgatttcgtggcgggggatctcgtgacggtcattgagatggatctcgagcgaattctgcagcaaataatcaaaagccaatatcagtaccgtttgaacgattttcctctcctcaataggagccaacaaaaaaagaaaaacagaatcaaaattcaaaagcgaaatggattggaagaagagagaagaatccatccaaccttggcctcgttgtggcaatgcctgcagccgaacacctcgccgcagcacggcgccctgatcctgcatcccctcgtgtaatgctcgcagcttcacccgccagaaaaaaaaaacaaaaaaaaaacaaaaaagcccaagcaaacaaacacaggtgagatgagatttccagaaccaaagctctcgaatcagagggtaataaaaatctcgcagccaaccacatgatcgattccctctttcttgcttacccgtgctgctccgactccaattccatcctctctctctctctctctccctctccgagctcaacaaccaacgcgctgtttggctctctaggtctcaccgacgacgagacggccgccggcggcgagggcgaggggggaggggaagggggtggttggcaacggcgggagggaaggagggaggggagcttgcgcgcgtgcggccgcgttttatagtggggaaacacgtttttttttctctctctagttttttttttcctccttcaaatatggcggtaacggctgtgtttcctctcctatcttttgtttgtgcttgtccccccaagatggcgtgaacgacatctctttggcacatgattcaaatgccgactgtctcaaacaaaataaataaattttatagatgaatttagataaatattgatccaaattcatccgtagaattggattcattttagatagagaaagtagtatagaacaattaatctcaacaatgtaacataagaattgtttcttggaatcatactttcaagaaaaagcttagagcaaatatgtggccaaaagcgtaatttgctctaaaaatactacctacatcccaaattagatgtcgttttgacttattacttataacgtttgacagttcatcttatttaaaagttagtgcaaatatagaaaatgataaaatcatatttaaagtacttctgataataaagtgtcatacataaaacaaataataattttataattttctaaaatgaagaaggatcaaacaaaaactcaaaacaactagtgttttgggatggaggtaattaacatttttatgatggaatagctaacttggttgaacgcacttgccgtgagctggaaaatatctgcctgcatagttcaatgcaatcatggaccagaccattcacagctaaatggaacctgtctttcatcgatctcgcctcataagaaacaacagaacaaagataaacaactactactagaatccactaacagtcagcggctggttgcccatagggtggcgcgagagcaaacggttttcgtatgagtcggcaatgcgagtgggccccacagagcacgaaaaggcacaccgggaggtggggccccggccgttactgggtgagggcgaggatgaggattacggtgtcaggcgtcaggtacacgttggatggggatagggatgtgtaggggttatacagtaagtcgcctggattacgtcgccaacgagacggtgacatacggatatgctatgccagatttccaatgagtgttgtcttgggcattgcccagtgattaggggctagtttaattccaatgtttttcttcaaacttttaatttttttatcatatcaaaacttttctacacacaaactttcaatttttccgtcacatcgttccaatttcaaccaaacttataattttagcgtgaactaagcacaagtgttatctcgacttgtcacatggaactacacgtgacaatttattagcacaaaatatacaagacgccacagtttagaaaagaatacttcctccgttttttaatagatgacaccgttgactttttctcatatgtttaaccattcgtcttattaattataatttattttgttatgagttgttttatcactcatagtacttcaagtataatttatatcatatacatttgcataaaatttttgaataagacgaatggtcaaacatgtgagaaaaaatcaacggcgtcatctattaaaaaacggagataatacttgggatggtaaagattttaagtgcctgacgtgacggcaggtaccaaataacgacagtactcttctcaaagttttgctgcaatcatcgcacaaaaagagggcagtgaccagtgggaatgaagaggaaatttctttccagacgctcatgagtcatgagtagtagctacaaaattgcttgcatttctcaaatgcagtttacaacgaaatgtggtatattttgtacacagctcaggccttggaacagttgttaacccaaagtgtgtaagcagctagaagcctaggggactcaaaattttggtagtattctatacacaaattacagtgatgggcgcgagggcattcttcctccggttactttgatgagcatccaaaagatcattcattagcgctctgcatgagctcaaaccactgcaacagagagaagacaagtccacatgtcagacagagagggaccagagaacagaaatgagtaaaccatccattagttcgtaaatagcaggagctaaggcagaggataatctgtacctgtctaagcaagtcagccaatgtacgaggaagtgcttcaatattcttcagcatgacatagtaagggaatggaaaggagtccatatatttccccatggttagtttggtaccttgataggatacttcctgcacgtcaatgccaaaaggattccaaactcagttaattagctaatcgtgaaaagtgataaccatgtcactgagatttgaggggtacgcaccagtgaatccatgatagattcctcgtgaccatctaggagcacatatgcgatcatcctctttctgttaaggacattcctgacgcaacgcttcaaattttcctaatgacgcgatgcgaacatcagaaccaaaaggtaggcactgtgagatatacaaaattatgtgatggaaaaactggtaccttttcgtggaacttcccgtcagatattattagtacgagttgctgaagtggattttgccctgacggtgtacgtgaccgtgccacggcagtatcaagcattgtgttcagatgcatcaagagatcagcaactggttcatcctcaagtttgttgtcttgctcaaaggacaaactagaaatcatctgtcatcagagaagaaagtgagcaacagctcgtgagtttcatttattggaaagcaaaagagcatgcaatcaatttcatgaaacctacattcgttcctgcttctccattgaagacctgatcgaaatcatgtagcactttgacatttccctttttccgaaacttgcaactgcaaactgtccaacctcaagttgtgacatggcccggcagactgtaactaatgcttcaatagccacttttccacacttgccctcggacatactccgtgagtcgtccacagcaataaccacttggtaattacgtttattaggtttagttcggcgcaaccatatcttatccctgcggaaatgacttgcaatatatggaataacctgaaaaaatagcaatgcaccatcatatgagtgaacaccttgaaaatggaaaaggctgttcttttagcattaaaacaagatcgtgagaaacagaagtacctttttcatgtttattctctttccagttctgtaatctccttgaagcttacttgcaagagttggttccatgacaaggcgcaattgctcagcaagttcttgggacaacttcatagttgtgagctcaacacttttccagtcaacaataggacctttcatatctacatcagtgatgttcatttccatcggagtagacaactccctctcattggctaaatcatcccgcataactgttttttcatctgctggaggttgtttgaacgaaacaaaatctccaaaagtctcgtctgtttcaccttgaactgaatcctgaacatatgtatcagtttgaatctctctatgctcaaggttgttggcattttcagatttgttggtacgtgattgtgaagcttgcagatgtggcacttcaagattatgatcatctccaggtgccctgtaagtattgtgttcctctttttgcacacggttttcatcctccatggaagactgtttgacttgcaggtcatcgttgatttgatcagctgttgcattacccagtgcctgagaggtgctctgctcactgtccggcacataacgaaattcggtagcactttcatcatcaatatggtgttcagcttctggttgatgatcctgcgtatcagctgagactttggcccgttctttccagtccgccattgcatctccaatgctcctaaaaggatttgtctgtttgatctgcgatggtggagtatcagtctgcaactctggcttagagttagacaataacctagagccatccccagagttgggcatagatatttccagactagggacttcattgcttgaaaaattaacagaaggagcagcagcactgttcatatcagtgctgttagccaagtttgattcagattctctgttatagtccatttcggcattatttggttgtatgccttgtgaaggatgctcaagtgactcaatattatgaagttctttctccatgttatttgtctccatctgtccatcttcagcatgctcctgctcaccatcaatctcattgtcaccatgttgagctgcatctacatcctccacatcgtctgaagcatctaaacacccatctgctgctagcttttcctcttctggactgagttcttcaccatcagcatccatttcatcaatatgttctgtcccatccatatccacatcctcagaatcatcctttggttcagggagttcaggtgctgttcgatcatcatgggctgcaggaa

SEQ ID NO: 26912 - DNA, 7051 bp, Oryza sativa
tgtaacaggataacttaaagccataaaactacaagaaatggcaaaaccgtgtgtggtaggaaagatatgcttacgcggcacctatgttgacctgaagtatcaatccagacgactcgaacaaagagcacatcttgttcagataatggtatgccgttgtcagctattgctgttatctgaccgactgacccgttggcaacattcaacttgtatagatacaatgcatttcgtctaaatatgtcctcaactgcttcaatagcttcttgaatgctaaggtcaccatcttcacatgcagctgagagtacacgataaacaacatcacgtgccctccttgcacctgtaaatcaaactccatagttttgcacatttttttaagagctttactatataatgacttttcacttaacttatggaacaattatggctaaggaatgtacctaggtaatatgtctctggaaaagcataaccatctgtgctgaacatgacctagaaatgataaaattagaaatgtaaagcatggcatatcttcaaaatgggcaaaaactagttgcagatatataagtgaaaatattacactcgtccaggttcttgcaaaatagatcagaatgaaattcttttacaaggcaccttgagtgaatactacaatgagaactaacataatgaaaattagatgcacttcaagcatgtaggagggaaagaaattcccagacctctactgcaaaatattgcagtaatcctacaaagcaacaattgttaatgggattctgtatttatcagttctattattcattatcaataatttacatggtatggaaaacagggggggcaatatgatattgagttgccagaaaataaaacacagttcagctttccataaatcagtggaacatacaggtaaaatgtggactgtttcaataacctcaaaaaaaaaaaggaagcaattatccagaagacagagattttaccttctttatgggagctagctcaaggacctctttaattgatgatgtcattccttgaacactaagttttggaattgccaagccaaaatcaaggtatacctgtttgttttaaacaattaaaacataaagtccatcaaaggcaatgcataagtcatcaatcatataaggatcccacctgggagtacactgatgctagatatgatgcttcctttgaaaatggataagaggcatgtaaaagaacaatttggcacttagagaatcttgtgtcctcaagaacagcacgcagatggagagggttgcactttcgcaagtccaggtccttatctccaaatctgaaaaagggtggaaattaattgaaatattgaaagtttaaaacagaataatcatattttaggattaaaatgttgtcatcaccctgtgtgaatctgcattggcaggtgatatgatacagcaatttcaagactgcaagtaaatagatagtcaatcaggttcttatttgtaatccgaagaggcctctgacctgaaaaggataaaatagtccaggtgtataaaatattgatggatccaacaatgtgttctcactctctcctctctctctccgcaaaaaaatacattacctgataactccttacgtagtccatcctctgcatctgtcttgctaatatttggatcaatctctaagccacttctatatgcagctatacttttcaatccaacaattttgttggcaactgtgataaattagttaaggaaatcaatacattctaaaacagtatacaacaagaactatccactgcgcctgaaaacaaatactggggaggatatgatttcagcttagtgacaaaaatttcagtaaaagagtcaagtgtccagcttgatgcgctgaatgattcctgaaaaaagtttattactcatagatgctaacagaattatgaaagctgacaaactttgtaaaatggagaaaaggtacaactttggagaaaatagacaggtcagaacgataaaaaaaatgcactcacatcattaataattgtttctgccagcttttcaatcctcagaattctgccaactgtaggagcaaacgccttgtgtgcctccagttcaagcatcttgtcaaagtctatgccatcatctataagaattgcagataagttggcagccttgaagcactttgagcttatagacgacaacccttcagcccttctgaactcctccaccttctcaagtgaagcttcacagttgtacaatgcagcgatgtccctcaggcttctctgcatttcacgacgttccaaacgatctaatgagcttctaaaaaccatactcttagttgcaacgaaacaactacgaatacagcattacgaaagcaagaatgtactagcaacatttgcaggttggaacaaacagagagctacgactcatatacagcatcctaacactgcacagagtacagacaaaagtggtccacatgaccacatcacatgcatgcatgccggcatggacacctgctgaaacgcacataatttctcagacagaagtagaacagtgaagcagtgaaccatgccgaaatggcccagtaactcctctcatgtgtcatggaccctagcaacgtttccattccattgctcgcatcgcacgcctcggtgcccacatccaccaccactgagctctccttgacagggcaaagagacgagacaaaaaaaaggcgtgtactactcaacagtgctgctactatgggaaattggcaaagccgacataaagcctgtggcctctgccatgccaccagttaaaagagaaggacggattccgcatattccactataaaccacatcgccaatctcggtaataaaatggatcatggagacgataaagttcgcattccgttttcatttctgccctgaaactactctccgaaatccaccagtggtggcggtggtggtggactggtggttgcagttctgaacctgagttgaacacaaatttctctcggaaaaaattcattggattaagacagaattactgttgactcggctttcggagtaaccaaatccagtgaaatacagtgattcatttttttttcagatgacaacagtaaattttcactgcaaaaattatctgcatcactcaacagtgtatatattttttattttgcaaatgaaaactctgcagccgactcaatctagcacacactgttacgcgaactagtctgacgaacagagtaggggaagcgcacaagtcgtagccgtcgcgatctcgagcagcacacggaagtaagcggcgtaggcgacccaacggggccgtgcggataaacggagctgagaactgcatgtgtaccttgaaggagagggtgtggggagcgagggcgagggcgtcggcggcgtcggcctcggagaagcagcggaggaaggggaacgcggagccgtcggcgacgaggttgtgcgcgtgcgcgtccaccgccgccgcctcctccgccgcgcgccgcagcgccgcgtacttggactccatctccatctccgccgggctccggctccggcggtcgtcgtcggtggccgcctcgccgccgctcgctcactcgctcggtgtctcgaggatttttttttttttgttttgtttttaagaaatttttttttctctcgcttcgtttgaccgcgcggaatttgcaacgcggccacacggggcgtggggtttttataagcggggcggcacgagagtggaggaggggcgctgcctgcggggcacgtgcaccgcaactgtccgcttcggctagtgggttagtggtgaccggtcaccggtgagcgtcgcagtttgattggctggctgcctggcatgtgggtccggtttgtcagttgtcactcgggggttgcgtggggttataatctaaagtaatgaaaaaactaaaggtgttcatcacctagatgtgccacgtcatgggaaaattagaaccgttggatgcagccagatattgaacaacagccgtttattctcaaaataaccaaaagaaaaagcatggtcaagggacttcggaagtcaactggaagactcgtgaatccaccacggcaatatccgaaggtccgccaatattaaaagcccatgtgtccagcgcgatatatagggcatcacggatatagcccaaaataaaagaaaaagtcgaatttcatggatatctcttttaatgaacgaaaaatgtttattccttccatcattgagccacgtatacttatatagcatgaacctttgaatttggtgtgaacggttggattaataatgaagatcgttggaagagtcaggagacttccatcggagagatgaaacagaaaagacaaaagtaataaaaatccattcatggggtaccgttaagtaagagaaataaagaaacaccacagttaaacttaattaaaataaaagctactaaataatagtaaaaagagcactataataactcaaaataaatcatcgtattctttgcccacctaacaacatttaaatatcttccactaacaacatggtactctaactcctaatattatcacagcgtatatctttagtatataatacctgtaaatctcactctttggcaaaacttaaatatagtagttccaatagctgtaattacctaattaaattctaacatatataattattacaaacgatatgcatttaaaaatgcaagtcatagtcccaattattatagatctaattacctaattaaattttaacatatataaatgatcggatttgttagaaaacttccacaaattttttgcccctaaaactttcagatttgtcaccatcggatcgcctcgagatttgtgtatgaagaaaaaaaattgttacaactaatttttcacacatgtcacgtctaaccaaatcatagttgaatacaagttttatataagttatatcgtagttactaatacaattacagtgtagttacaatgtaattatacttcaattatactatagttacatatcaaagtttttgactcaaaaaatttacgataattttttaggtattcccatgaatgatacttaccgttaccgttacatataaaagtgcaagtcatagtcgtatgaatgtacgacttaattggctagtatgaagaatgtacgacttaattggctagtatgaaacggaggaaatatatgagagtaaataggtagatcgttcttaaacaactttcgaagataggagcaactataaccgaagatttaaaggcttgagatttgcccgcaactatcactatcacttgtggtagcaacagtgatgatgaatctctacgattagtgacagactgactgagcactgcggtttgttgtggcggttgggttggtctgctgttatgtactccctccgtccaaaaaaaccaacctcgtactaacatgtgacatgttatggggttcttttcttctaaagatgaaatgtggatgaagattaatttttttacataaaacgaggtggtattaacgtatgattgattgaattttaattattacaaacttgaaaagtagattaatataatattttagagcaactttcatatagaaaattttcacatgaaacacaccgtttaacagtttgaaaagcgtgccacggaaattattcttggagaaaagaacggtaacgaggttagcttcttttatgagggagggagtaggtccaagatagcatttgggattgagtggatgaagagaaccattgccatgagatagatagtttgcatgaattattctgttttcttttttacaagtttatagttagtcactgtagcttttaattactcaatcgaaatcacaccccaagtaaaaaaaaacagctgacgtgacattatgacgacgtgagagttatgcattactatggaaagaagagggttcaggctaaattatgccacatcatatttctgaccaaatggaacagggccaggttaggtacgtactccctccgtcccataatatatgaaattttaagtttttacttacaacatttgaccactcgtcttatttaaatttttttgaaattattatttattttatttgtgacttactttattatctacagtattttaagcacaactttttatttttaatattttttaaaaaattgaataacacgaatggtcaaacgttacaaacaaaaacttaaaatccctaatactgtgggacggagggagtaaatgcaaaatgcattatccccaggccgttggctaacgaaaccgacgcgtatggttcttgtcggtgataataaggttgattgcagcatgtacctgcttttgatcgagttactgatttggaactaacgatcgatcaagctcagatattttgggactggacggcactccaaacccatttaaggaagcttgtttgcgcgtcacactccatagctgccaagatgtctgcactcggagtctggactctggacgtactacaccatccgctctttaaaaaaaatagatgtgatccctcgtaatataacgaatctacgaatctggatattgtctaaattcattgtattagaagagatcacaatcctatttagattaagtttttttagggagagagtaagtctcaaatctcaacaggggaataggttagcccaatcatttcgcttataccgatctttttgatagttcaaaggcaacgaacaattttatattataattgatgatcacagtgttgaaaaaaaaacacaattcagatatgtataatgtactttaggcttttaacacctaaacttttgtgtgtagatcattatgacaaattaaagaaaaacagactaatttgattttgacctttaatccagcctcagcgatggtgattgcctgattggtggtgagagtgtataaatgaactggtgaaatattagcttttgtactaattctgttgcgccagatctcagagataagtgcaatgcatcatgcactttgcaagttattagtattttctccgttttatattataagattttctagcattatcacattcatatatatgtaaataaatctagacacacacacacacacacatatatatatatatatatatatatatatatatatatatatatatatatatatatatatatatatatatatatatat

SEQ ID NO: 26913 - DNA, 4239 bp, Oryza sativa
ctgttttaaaatatgaaacggacgaatttagtagttagttccactgttaattcacttactccctctgtctcataacatagcaacctatgaccggatgtgatatttcatagtacaacgaatctggacatgtatctgtccagattcgttgtcctataaaatatctcgtccgattcttgattgctatattatgagacggagggagtaacatgcatcttactatcttagggcatgttcactttgataccattttcaaccatactaataaatcctggtaaaattttggcaatattgacatgttgccaaaattttggtattgccaggtttattttggctacagtctgaatatgcccttgattatgcaataatgctgtacacgtacgctagttagtactttagtagtgctggaaccagcacgtacgtgcgctcccgtggcccgtcgacgtccctcccagcaaagcatgggaaaacgatcgagctagcatagatcaatgcatcaactatcgatcagcaagtatacatgaacacatgacattatgttgcaagttgcaaccacctaaatagaccaaattaaatggaaaatttaatttccttgtgctctttaattacagttgcattgcgcagcatcaacgatcgatcgatgcctagacggattggctgttgtattttttttagataatggaatataacatctcggtctttactcaagagagttacagccaattattatagagaagcacctaaacaagaatgtagttcaacaaatcattgaaaacacccaatgaacaaaataagtaacgaatctaaaataaggagaacacattattgaagtctatttgtgaatctccaaccataattgataaaaagttgcataattatcgtctcaagtttgcaacatgcaacttgtttatacccaaatttggcacctatggacgaaataggggaaaattgccaaagtttagaaagtgacgggtttccttcacagggccgatcagaccacaggtgtgtgggcggtctgaccggccagtagggccggtctgaccgcaggtatgtgggcggtcagaccgtcagggtccgagtccgagtatgttttcgtcgggtctcgggtttccttgctcggaaaggcatgtttcgagtttcctttaatttctatcccgagttggacgtggagaagggcctgtagagggcaagaccaacccctatttaagggacaaggccggttcattgtaaaacccccgaatataatctatttgaatcgttcttttactatgttttctattttaccctagtttagtccatctttgtcggtttgcgccgtaaaccatccgccgctgctgcgagagtgcgacacctctttgtaggtttgtcttggaaaccttccgttttgcccacgagatgggtagttatcctcatatcgatttaaatcggcctaggggctgattttgatctctaaatcggctccgctagccggtttagctgtttttctccaaaacccatcttaatttggccctttagctagatcgaggtggttggcgactctaggatcaccgcaaggcgtttaggtgctacgatcgtgcttgtcgacttgtcacaaaaagttgccaacataacttttataaactctcggttttcttcaaacttttgtggttgccccggtatcggagatggattggctattgtatacgtactatgtgtacttataccaaaagccgaattgccaatcgagctgcatgccacgcactgtgtgtgtgttggcaacacctgaccgaccgatccatgttccgtgatcgatcggtgtgcgtgcagtgtgcagtgcagtccagggcagccggtggggcaaaaagggcgtgaaataatagggatgagatcgtgcgtttgcacgcacgcacggtaggaggagtacgtactgttggtgaatccgcatcgcactaacagttcgcgcgcgcggcggaggagattcctacgcactacgcagccttttttatatcgtaaaggttgagcatcaccaacagaacgtgaataattcaccttcaaaattttgttattgggttttctaaattaaaaataagaagtgaaaatatatctctctccaagagaaagtctcaatttaatttcaaaaactaaaagtaagcactactgttgaactaccaaccgaaataactatttttccattgacccggcgcggaaaaagatcgttcctccacccagcccacgcgcgggaagaaaaagaagctaatgggtatgagagattagaattgggagatgtggcgtcgttcctcctcaaacgaagagagtgatggatgtggtgatgaggtttccaaaatatcataataggatttgttggaggtattatttttcactaaaatccaaaaaatcaggattggggatggaataaaagcactgttggtgatgctaagggcgttgccatgcaccgaccattaccagggaggcgcgcgcgttgtgttgcggcagttgcacacgccccgctgtacgtgcgtgcgagagagatcgactgaaatcacgagtgtttcgctaactcgtaccgtcgtgcggcgtcgcgtggagagatcactctcttatatccaaaatgatttaaaggaggagatatgacttatagggtatgtcacattttatacgaagatgaattattttgagacggagagagtagacagccgagactggattgtaatttgctgagacgacaaccggcatggcggcagcaaattacagagtcttacctatgtgcggcgcgcatgcacgttcattgtacggtgggccgtggaggtgcacgtacgggcttctaaagtcgtgcgatgatataattgactttgtatgatctttttccaaagtcgttggttttaaggatttttttccctgcgagttgtataaccgtccgtgcaatcataatccatttccaggtaattgcaatcgtaatccatttccaaaaaaaaccaattttggaggagtggggatattacatctcctatatagaacaaaaggttcagtcttttttaaatggagtgagtatgtactgtgctactttacaaaaagaattcagtatattcatttggcaaaattcagtgttatcttcatttcggtcaattaagcaggccaatactgggccatatgatggctgaaaaatatatacttactccatttcatattataagttatttgatcttttcttagtcaaagtttttttaagatttaatcaaatttatgaaaaaagataacatctacaacactaaataagttttactaaatttaacattgaatatattttgataatatgtttcttttatttatattgaaaatgttactctatgtttctacaaatttagttaaatttaaagaagtttaactaaaaaagtcaaatgacttataatatgataaaacggagggagtacatgttttgcttcgacaataacaatccttgatgccctgcaaacatgttaacaccaaaacatttcccttcccatggcacacaagtcacaagtctccgttttcgtttcaaaaagatcttacttcctccgtttcacattgtaagtcattttagcattttccacattcatattcatttaatgaatctagataaatatataagtctagattcattaacatcaatatgaatgtaggaaatactagaatgacttacattgtgaaacagagggagtagataagtatccagaaacaagatctggtccactaaccggacgcggtctgggccattatattatgggcccattataggcctatataatggcatatattaggaataagttcacttagactcccttaattagcgaccgaatctaatttacatctcgacctccaactattaaaacttccttgatggttttggaggacggtttcgctgatgtggcacccacgtggcaatgttggccttgtctgtggtgtgcacgtggcactcaggtgacattagaattaaaaactttcaactcattctaaaacttttaatttaaaatttaagaaattttaactcaaaattcaaaaactttcacctcaaagtttaaaacctccaacccaaattttaaaactttgagtttgatttttttaatttcaactcaaatttaaaactttcaatttaactttttaaaacttttaactcaattgtttatatatcattttattataaaaatgctaaacatggattagtaatgttattaatacctagaaggaattagcggcgggaggtgaggcgtgccgcgcgctaggatcgtg

SEQ ID NO: 26914 - DNA, 17323 bp, Oryza sativa
aaaaattacttccaacagatttccataactaaaattttttgggatataattttagaatgctcttgatgattctctaataaacgggaacatatctcccttaactgcatgacgtcaaagcgccaaaaagtagtataaagaacatgcagcctgatagatggataacataaggacataacatgcaatgcaatgaaccagacagaaccctgaatatgtcgaaatggagagccaccggtggaatattagtactatgacgtaggctagtagcaaatcaaccatactggacatggtgggcatgcaaatcgaactctagctaaccgatgaacaaaatggctaatcgtggaaaatcaagggtggccttgggcagcttgaaaaggaacaaaatgcagatccagcaggtaactggccaaaagaaagaaagaaatagcaactgagtctttcggcggttggccccaaccatgaagctgtggctgtgtttagtttcacatcaaaaatagaagtttgaagaaattggaacgatgtgacggaaaagttggaagtttgtgtgtgtataaaagttcaatgtgacggaaaagttaaaagtttgaagaaaaaaattggaatctaaacagggcctgaataatcaacaatttaatacaactatagaaatagcccaaaaatagtgaattttcctattgcttgcttcattgtcatcctcctaaggattgaaagggagatgaatagagtgcttggtaggacatgataatttaaagcacaaaactcccaaatggaataagatgcattcgatccattatcttcacaaagatcaagagtagttcatttcaacgttccagatttgacatcacaaacatttgtgttattatgttttcagctcacacaagaaaggtatacatgcactttctctccacagaacagaaggcaaaatgatgtgtgcactaactcagcatatatagcaagccttcagtaactggtaacctgatattaatcgtaagttcttcaatttcctaaaagaaaaaaaaaaccttcagttttcaaacactgatggttggtttcaatttctcaggccaggtgtactgaccttcatgctaaactaaactgattttacatcaaagtacaataagtactaaaatcagtagatgatgaatacctcagaatagaggcttaacatggtaacattgagcaaatttcttgtttaagcaattagtacaaactacaaagtgccgatgcatgaattcaacaaactaatgtgttctgggtgataaaatacaacaacagtgtcctgcagaaacactcatatgaactagctagctacaacaaagccatatgtgcttaagatacacggtagttcaaaaatattatatcaagcacaacatttgagactcagcgcacataattcacgagatgttcatgaggaagcagggcatgtattgacaccattcttgcaatcacgagtaagatcactgaatgtctccaatttcctcttcccccgaaggaacacctcagtgtcaactgcaaccctcatgtatccatcgaattcaacagcattaccattgctcagctcctttgtttcagtgtaccactcgctgttctcatcccataaatccttgaagtcatccaggaagtgtgttcgatacttacccttcattgggtcaaagaatgatttatcgggttcattggttgcaatgtacaaatgccggccagcaccgaccttatcattaagtgtcgtaaggagactatctggagaagtatctctatcaagatttggccacaactgtttgttctgggctttctcccccctcacaacatggactgaatcaaagtcccaatccatccgggaggaaatggcagacacgatctccatcaatcgacgcgatttccacaataaataccatgggcgcttgatcactgcctccgtctcaccctcacatacacgagaccagaagttatcaggctcaacattcccaaacttcctcatgatcagtgtgtccttgacgtcacgaagttgcatcggggtcaccttgatgtcttcagtgtagtgattcttcagtctatccttcttgtgccacttcccccaatctgtccagaactggctctggtcaatgaccgatgctgattgcttcaagtgctcaaaatcaaagtagagcctaaaatctctctcttcatccttgccacttgaagtataccgtgaattgaggcacacattaaggtccataacaagtgtccggttcaagtactgtgcctcaccaagtgcacacaagaatccccaaacgtagtggttcatgctcttgcatctctcaccaccgcccatgtagatgagatactttccgcggctgaattcagactcagattcgaccaccggtaaattgtcattgacagcttcaccgacaactagctccggctcggaggcggccgtggtgtctgcattggcagcgttctcatcgagcctcatctgcgtcttggccggcacaaagtcggtgaccggtgcctcgcgcttgcccttcttccccttcttgcccttgcggcggccgctgcgcttggcgccggtgccggagtggtactcgcccacattgccgacgacgaggttgcaggtgttgacgtcgcgggtgagcgtgaagcggcggtagtccttgtagtaggtggtgcggccgttggtgtcctcggcggggcggaagcgccatgcgaggtcgcactccatggggctccccggcacggcgacggggcggccgaagcggtagaagtggaggtcggagaacttctcgatcgccgtgcgcatgagcaggttgaagagatccttgtcccccgtgcagtccaccggcgcctccgtgtcgcaggagaccgcctcgacgatggggttctcctccgccgcggcgcccgcgtccgagctggcgtcggtgtcaacggtgacggcccgctccgcccccgacgactcctccttggtcgcgacgtcctcgagcttgatgaacgggacggcctcggcgacgacggtggcctccgcggcggcggcggcatcggaggagttggcgccgatggcggcggcgaagtcctcgccggtgcggaggacggagtcgtcggcgaggaaggtggagttggaggtggcggaggtgaggaacgcggtgagctggtgcgatgaggggtggaggagcgggtcgtcggggctgtggaccgcggcgaggagggtgaaggcgaggacggccgccacgaagagcgcgaagaggaggttgcccccggagcgcagcgcggcgcgcaggtcgatcccgatcccggtcccggtcccggcgccgccgcgccaccgcgccgcggacagcgcccccgcccggcccagcattccgccgcccggatctggccgccgcggcgaggggggaagagtgggggagtgagagcgaggtggggatctgggagtgggaggagtcgccgacaaggcgagggtgcgtgcggcttactccagtgttggtgtttttttactggggaatgtggccgcggttgcttgcggtggtcgccggcgatgggcggtgtcggatggcccgttgactggggtggcccgggaattgcggtctgttgttgtgggctttcatgggccggaatttcgcttcttttttttgaataagttcacatgacgtccctcaactttacgtcgagtctagctgatatccccagtccacaatatcagaaatctatacccctcaactatcacaaaccgtgcaaaaaaaaaaaaaaaggtcctgagacattattgactcagtttttcctaggttgcgctgacgtggcattacgtggaccccacaatttagcgtcctctattctcttctcttctttttcttcttcttcttcttcttcttcttctcttttctctcctcttttctttcatctcctctcttctctacttcaccaagactgagaggccagcgggcaaagcaggcagggggcggcgcggctatgactatgagtacaaaagaaacaacagtaaatttaataatcctcaggtttctaaacgataattagattcacatttaagccgcagttgtgctgctcttctctcttgcgtgaatttcatcaagcatgtttctggctagcggcgagatcctagcctccaactcctagaagtccacctatacctccgccgcctctgtcttgaagcccagcttttcatcccccttacatgtactcgtccacctcgtagcctcctatccttaccaccgcctcatacaccctccacgtcgcatgcgccctccccttcaccaccaacgcgtcagcttgtacaagtcctcctccccctccacgaacctgccgccttgctcattctcctccaggaacgcctccacgagcgcatccacaggggcggcggcgccgtcctcgattatcggcgaggaggacacgaacgtggcatagatggccaggtcggcgtggtaccaaggttcggcacgatggaccagtagccatgacgctggagctcggccatgtggcgaggaggtcgctcttgaggaggcggccgaggagcggtcagaggaggtgaggcgcttgagggattgcacggcgaggatggccttcgtgtagtgggagcggccgcactggattgcgccatggttgtcgcacgggccacaggtgatgcgccccgcccccttcttgctttgctcactgcgccgctcgccgctgcactcgcccgctgcccctgcctgcttcgccttctgcctgcccccgccctgccaatctcgctgaagaagagaagagaggagacaaaaggaaagagtagagaaaagagaagaagaaaagagaaaaaaaagaagagaagagaagtgaagtgaagatatgacactgacatatggtgcccactatatgccacgtctgtgaaaccgaggaaaaattgagtcaatattatctcgggaccttttttttttcacacggcttgtaatagtataggagtagagatttatggtattgcggattccaaatttgatcaccgtcatagccatcatagtcgatccaacggaaacataaacatcgaggacacttcaccaatatgaaacatccagtgtgagccaccaagtaaatcgtgactcatcttaccaatcaacgactcatcttaccaatcaaataaaaagttaacttatcttgtacatacaactatttttctttataaacgacctcgtgctaaaaacatactacctcctttcttaatatacgacgctaacgctgttgactttttacatactactcatactattaaaaaaattaagtaaatatttttttcttgatttatcactaaagtaactttgagcattacttataatttttaagatttatataaattttttaataaaacaaatgatcaaagattgtgaaaaaaatcagcagtatcttgctccctccgtcccataaaaaataaatctatgaccggatgtgatatatatgtattgctagatttatagtattaggttggtattttatgggacggagggagtaaatgactatatcggaccttccaattggattttacccaaccgagagagttactgtgaaatttaccccggcgagaaactgtggaggctgaaggggcaatcagccaaacaagtaggcagttggcagagtggacgggagacgggagggaggccaccatggagagctcgccgccgccgccgccgccgaccatcaccgtccaggtcaagttcggcggccgcacgatcccggtggaggtcccggccgccgccaccgccgccgacctgaagcgcctcctccagccgctcaccaacgtcctcccccgcggccagaggctcatctgcaaaggcacccgattccccctcccccacccaaacccttgacctcctcctgaccgccaatctgcttccgattataggttttggatacttatcgttctcttgatgtggttgcagggaaagttctggcggatgccgccagcctgagctcgatgcaggtggtgaacggatccaaggtcatgctcatggcctcgcaggggctccatcagggggtaaattaaattaaccgcctcatctttagtgtttttagcaattagctccttttggaatgtggtgaggtacagtttgatttgagggagccttttgtggttgccgaagttgaatgacgatcagaattcgttttgtaggtgcctccatatgttaattagcttgattttttactccgattcgacaccatttcctcttaatattgagattcgtgaactgtgatgtttggggtaaatggctgaatagtttgtagtactgtcatatccttgacccaaccgcacctcaaggcaggattgcctatatgctttgcccgtttgccgcttgcgctaatgttctgtgggacgtctgcaacagccacttttcgcaacaaaaatatttgccatttcacaattgctacaagaaatcaaggacaagctcagtctgtggaaacatcgcatcaaatgcagacatcgcagccatatcaccagctggttactcgagctcagctgatctatgctgcattgctgccccaaatgggagtttgctgcaacaacatcaagatgaattatgctgtaaaatttgcttttatctttctttttcctgttatatttctttctgcattttcttctctttcctttctccctttctctactccttattgtacttggtttttccttttttctcttctttcttctttcttctttttctttttttttctcttttcttgtaccctcccctctatttctctgtactcttgacctaccattaatacaatggttataaggtagagtctctctacctttttgcttaaaaaaaaaccttattgcagtgccaaagcagcgtgagaaatcaatttcttgtccaattcattgtattgagcttacatgtgttccactctccaacaggacggtcccatcactaagaatagtagtgttccagcaccaagcacgagaagagcctcaaatgtgaaggaagctcaaatacaaaagtcggatacaaatgtcagtaaaatccgacctgaacgttggaaagcaactggtattattgcattgtctgattccagcttgaaggtaactgattccaactttcttacattacttttaaactaagcaacttagcgtagttatgctttgaagttcatgaaactttccatgtctgcctttctatcaaaagcaaattgaagtgcctgtgtcaaaactgccaatcgttggtaaggaaaaacatgcacatcgctagagtattatttgtatacttttgtagtcaccacagcctgtagaaaatactataatagtcttgaacatactttctttaatgcatctgtttgcaaaatgctattcatgaatcatgattggaagactgatttatatggcacaggcgcacagccatttgactgccgctatcaactgaatcaggattttcagtgcatacaaggcatctattattcatcaccacgtgataaagcaggccttttagttgttcagcattcaagaacttcattgatattccttactatccattatctttacccttttgaattaagagtcttattagctgtttctcacacttttgtttgttcaacacttagggtgtgtttggttgcctgtatgaagggtggctcgcatctcctcagcaaaattcgctgtgtttggttgcctgcatgggcatgggagccaggctcagctgatgcaaaaaggaccgttgggccaggctgaggggaaacgcaggaatcgaccgtagctcctcagccaggctaggctcatgcacacgcggggatgagcgggtgcagccgcgggatgagggggtgcaggcaacgggcaggggtcgagccatctcgcaatcccctcccctcatttgtttcctcagcaatcggtcgccgtcgtctccatcagtttccctcctcttcaacggcttgagcccgggcagatccaggaggaagaaggctcgacgagggtatccagccgtctggtgagctcgagctcggccatatccaaggaagaagagggccagatccaggaggaagaagagggcaagaggaaggagggctcaacgaggatacccggatctggtcgcttggagggcaacgtcgccaccgccggcatcatcttcctcctcttctcctcgttctcgccggcgctgtcttcttcgttggctcccaactccctccttcaggacctgcgatgttccggatccagtgggcagggcgtccggaagcaacagatccggagccacaaactccgacgacagcgacagacggggcgcaagggggaggagcgacgagcggcggtcatgggctctcagcgtcagcggtctctgtcgaccagcgatggggacgaaggcttcgagggctttctcttttcttttttttttccttcttttcttctttttctcgccgattaagcccgtgattaggaacgtttacttgttttctttttcttgccgattaagcacgtgattaaggaacgtgtactgctactgcgtaatttaccgtttcgatcttttattttgtgaaaattaataatacagtcctgtcatgttacaatttattgagtttctatttgttctacctaattaaatttgatactacattttgttcaaatttgaaagattatagattagataatatttatgtatggttggctaatatcaccatccaaataaagagacaattgagttcaaagtacatgcatccaaccaaacacaatcttttgcatacaagtttttatatccaaccaaccaaacaatatctcatacgagccgggctcatctaatacatacaaccaaacaactcctattgcatcattctaaccaggctaaacccagcctggatgaggcatacgagccaggctgagtgcattcgagcaaccaaacacacccttaatttcacttttggttgaatttttgggcttatactgtggttgtcttttcgagtaggcagtgcctgaagaagtatggggctgtggttcttctattagagtactggatgtcagtaacaactgtattgaagcaattccacaagaaattgctgctctgagatctttacaggtaattgttcttccccaatatgttggttgagacatcttcttcattcacaaggaaatataattgaatgtatcatcctttcatcttgtagaaattgatcctgactgctaatgatatagctgatgggaacatttcctgggaaggcctaacatgtgttcaaacattaacagttttatctctaagccaaaatcggtaggtctgatttttcaacatcctgtttcatcatgctatgaatatttgttttgttgccagtggatataaacaaccctttgtaatttccttaaataatcttctctttgtgctctcaataatgaaaaccgctaagctataatttttttttctccagactcttatatatgttcttagattcacccacctaatatttcaaactccacttaaacagttaggctcatacattgaaaagaaaaatgtagcaatgcataatatcttaagctggttcttttttgggttaattagatacatgccattaaaaattcaccggttttgaaatataccattactatttgcgtatttggaacgatgccattgatatttgtttgtaatttcagtggtgccactaagacacgtattttgcatgtattggacgaaaatgccctcatcttctacctctctccctcttctctcatcttcaagctctctctccccgctgcttcaactccggcgccgtcaccgccgctgctgctgccgctgccgcgccgttgctgctcgatgccgctgctgctcgccgctcgcgctgctgctcgccgccgctccgcatgctgctgccgccgcaccgccgctgccgctcaccgctgccgttgctccgccgccgctgccgctcgccgctcgcgccgctgctgccgttgttactcgccgccgctccgcacgctgccgccgccgctccgccgctgccgctcgccgctcgcgccattgctgccgttgctggtcgccgcctctccgcacgctgccggctccgccgctgccgctcgctccgccactgccgctcgctccaccgctgttgctcgccgctcgctgctgccgccgctccgccgccgctgccgctgctgccgttgctgccgccgctgctccgccgctgccgctcgccgctcgctccgacgctgccgctgctgccgctcgctccgccgccgcttgctccgccgccgcctgttctctgagctgtggaagaaggagaggggagaaaaagaagcaaagaagggtaatttggtccaaattttttcgtaaatggtaggtagtggcatatcttgaatatgtgtaaaattgtaatggcatggttccaaatacgcgaatactgatggtatatttcaaaactgataaatttttaatggtatgtatctaattaacccttgttttttcttgaataactggaaaggccttgaggtgctcagtttatctcagtggtttatgtggtgcaaattgttcttgtatcccttaattttcctgtcttgtgccagcacccgtgtcatgctgggccagcaatatcaaaggtgccagggcaacctgtccacggtagcagattatgggcatgctggcaaggcacagtagaccttaggtctttatccattaggaagtttcatgtccgccattattgtttagaattgaagatgacgagatgatatgttctaaatttataatttttcatgcaggctggtcactttaccttcaagtttgggctcaataactcatttacgtgaacttcgtattgcaaataacaggcttgagaacttacctgttgaaatagggttactgaagcatcttgagattctgatagcaaataataataggtactgtgctactagtgcttaactgaagtgactcattgaagtctcatttttttgctatgcttatagcataatttacactttgtgctaatgtgaagagttacctcaagagaggatttctgtatataatatagttgttgatagatttttcacaatcatgtgagactttcagcctgtgagcagttccattatagaaaaacttttaaagaaaatgtattctatcaagccagaaaatatgtcttttcttatacttctaatgagaatttacatgattacttttgttttgagaattgaaaggtatcctgacttccacactgctacaatttcacttgttggcaggataacttcattgccttcatctataggtggttgtgaatctctcaatgaggtgtgtgctttatttctgtttcagttttccttctagttctaggccatactgagcacttagctcttctgagtttccatatggcaatttctggttcatcaaaatttttaatttcattaggttgatttgtcatcaaatcttttggctgaactgccagaggcttttggaaaccttcaacatctcaaggtatgtgcctatgggccacacatggagaaatatattccttaataaaagactaaatctgcatgcatacttctaagctatcttgttcctagcattgaaacaagatattactagtgcccttggttcaagatggtacaactacatgcttactcccccattttaaggaagtttaagttgcatgttcataaccaatgaacatataaaaatattatttcgcacaacagtaatgccacaacaaacctgatatgtgagtagtcagcgtgaaacattccatgcaattttgtggtatcatgtagcctgcaggttcagtttgaacttaattttttatttattatcagcatacggtggacaaagttttggcttatgacttgacagttgagagagtcatgagtatttatcgttcatttgttatactccctccggtcaaaaatatttttgtcggaattttaattgtttgaccaaaccttgtcctaaacaacagatatttttgactggagggagtatatgattattgcaccagatcgttattaaactatagcattactagctaaacttggtcaaaagatttactatcctgctgcttctagttgttcactgtatattatttatgtcagagcagatggttatttgtgctttcctttatggtgatattttttttccattcaatattttttcttttgtctagcatgggtgtaataatcagttacattgtactgtcatcagtttctaatgttccttttttcaaaataactttattccatcaggctttgagtgtacggaacaatggtcttacatccctaccttcagctttcttcataaaatgctcgcagctcattacacttgatctccatggcactgaaatcacaaacgacgttcttcggcaggtataagtgacctaagtgacccaaggcttcacagttatgtagtgtttgttactttgttatggtcagtactctactgaattaagatagctaccagcatatgcttaagacctggacagttcagtaatcactctcttaaatagcctattggtttcactttttgggacgccaaagttgatacccaccacgttaaatacataatacataatacccacaacgttgatcaagttatatagttcagggtaaacatgtggtgaaaaccccaacttaggtgacaactcgtgtccatctacatgtgtgatttattttgatgaatttagacgacttttttggcttgggtttacacgagttttcacctaagttgggatttccaccatatatttacctttccgttgcgaaaaaggcggataagtcgtttatttgctagcggttgctttcattggtcctggctctgatggagacatttcaaccttgccactgctaatgccagtttttacttgtggaaaacaggtggacggttgggaggagtttgacgaacgtcgaaggaagaagcatcaaaagcagctcgatttccgggtgggatcatcagttgtgttcgatgaaggtgcggatgacgattacaggcgtttataaataaaatctctctttggataagattgtgtattttatgtctccagcttaatccgttgtcgcaagaataacttgtatacttaagaacaaattaggagctgatgttgctactcacatcaatcctagatatgtacttgtacttcatcctttttcaaaatcccttctttttagggattctttaaactgtttagggcatcaagagtggaaaaacattactccgtccatttctatttactcgtgactgttgaccaatcctgttgtaactttgaccactaataaattttgaatggtttgaattatgatgaacggaaacttactggattcagatttgctatttcacttgacagatttttggctcctatctttttttttccgtaggatcttgcatcaagattatgatatcatacttacagttatacttagttacaaaatatttacactcagttacataacacttaaaatcagttgcatagcatttacacttagttacaatgcaccaaaattagatttttacaacatttttttcctctagatttacgctttttgacatgtttatttcatttaaaaagggctatatcaattagttaaaaattccgtaagattcaaaactataaatctatcgaaagattaataggtagtcccggatacggatacaacataatgccttttttgtaaatatggataatatcaccctataaacattccatattttaatatgctgtgcggtctccctctctgttttacggtaaagtaaatatggataatatcaggtgccaagtggagtagtattaagtgacggagggagcagtaatcacttgtagacattagagactttatacgtatatatatattagaaaaaatccacgttgcaaccttgcaacggttggaggctattttaatcttattattgctactatttagttaaggtgaaatttactatggaaattcacttagtgatatattttctaagaaaatcatgagatgcaattagtagtctaatgttttttttaaagaaatttcttatacaactccttttgtattttaaaaaacgaacgaacttagaaatagactcaaatacaaatctgtgtttccaaaagcgaataaacttaaaaatagactaatacatgggtgatttaccaaagtaccgataaaaatatatttaatttttataatagtagaaatagagatagagatagagaaaaagatagagacagatttatcatgtactgtcactctacagatagagtattacctcactaaacattacaaatttattattattttattatgtcactatacaactgtcactctacatacaagccaaagctattcatttttttttattccaacacaccaacaataatactcctataacactccagcttatcggagaagcacacgaagggggagagagctcggtcacgcgaagccgccattgacccggatgacctggccgttcacccacgccgcggcgtcgctgacgaggaaggccaccaccggcgcgacgtccgtcgtctcggcgatccgccccatcgacctctcctccaccttcttcacgaacgcctcgtccttccccgccatgaacagctccgtcctcaccggccccggcgccaccacgttcgccgtcacccccttcgccgccacctccttcgccatgatcctcgtcatcgcctccaccgcgccgttcgtcgccgtgtacgccgcgtacccggggaggagcgtgccgaggatggacgacgagaacgtcacgacgcggccccccgcccccgccgggaagcggttcgccgcctcgcggcacaccaggaacgtgccgcgcacgttgacggcgagcatggcgtcgaagtcctccacggcggtgtcggccagcgacgggtacttggactccaggaggcccgcgcaggcgacgacgatgtgcggcggcgtgccgaacgcctcctccgtgcggtcgaacagcgcgcgcaccgccgccgggtcggacacgtcggcgcgcacccccacggcgcgcgggagggcggcggcaccgcgggagttgaggtcggcggcgaaggcgtcggcgttggcggagttggaggcgtagttgacgacgacgcgggcgccgagggaggcgaggtgggcgcacacctcgcggccgatgccgcgggagccgccggtgacgagcgcgacgcggccgtcgagcgggagcgcgctggctgctggcgccgccatggcttcacacgcactcactcgctcggggtgttgctgcttcgcgtgtttgtttgggcgcgcgagtaggattttttggtgtgttgaggaggtgcacgatgggcaagctagggtcctttttatagacgaccaaaagctgtaaatgtgacgtacgcggtgacactgggctgggttgatttttactgctattgttatagatgtgttgtgaattatcatgttcatgatgcagccacaaagggccacagggatgtagtttacttgtgatcatatgaattgctatgttcatgcaaaagtaattatttaattagtatgataaaattaacataacagatagactattgtactagttggcttcagcaatagctgtaaaatgatgtggacataatatagccagcagccgactacactattaatcttgctcttatggtaaggaaaatagccctcactgtcacgatgacttggctgagttcgtttagaggagatgaaaccgatctcctgcacacgaaaaacggagcaatgcattagcacgtgattaattaagtattagctactttttttttaaaaaaaatgatcaatatgatttattttttcaatatgatcaatatgggcaagggtcttttttatagacgaccaaaagctgtaaatgtgacgtacgcggtgacactgggcttgggttgaattttactgctattatggaaaggaaaatagtttttttcccacctgccctcactgtctcggtgagtggtgagtggtgacttcttcttttgaccaacttctccaggagtccaggttcttagcccccggcgcttccctgtttaatccgttatttgttagtaacaaaaaattacttcctcagttttatattataagttgttggaccttttgtttaaattttattaagtttaatcaagtttatgaaaaatattagcaacatctaaaatataaaattattttattaaatttaacgttaaatatatttttataatacatttattttgtgttagaaatactattatatttattttataattttgttcaaaaagtttgactaagaaaaaaagtcaaacgactaataatataaaacggatggagtaatacataggtatatcttctatataagtacgtggtcttagtgattaaaaataaatattgtaaaataaattatgataacaaatcacaaattatgtttaaaattaagttttacattttaaattttatagcttataagtatgaaaacgatgatagcagctcatcttctctgatcactgatcggcatcaagggacaaccagacaagcgcggttgctgtggttgtttaatcgatacgtggcgccgtcatacatagtaggataactatagtggcggctaagcaatgatattatgtttttgtctcaaaagtatggagatgtgacggacaactaggctatgacttttaactaggttggatatagtgacgaagaatacgtactcatttgaaagcagctataatagcagactataagctaactataaataaattttaaaaaaaataaaagagaagagataagaacagtgtgctacatatttgtgggaccggacattaatagtgtagtatatgtttataggtaactattatatgaatttgctatcaaatagactatagatgatttggagctagtagtggactgtactattacttgctccgataagaacaaatgaacgcaacacataatatatttatattgtaattatataaaatagtataatattataattaacaacttaaggcataaatcatatgagtaatcaccacacatgaattaagcgagtttgtcttgtaatggtcttaacatcgttgtcaacccggcattacactagcgaccggaactctctaaacctaagaacaaattaatactcaaattctaattacgagcaaccgcgtggctagataaaggtaccatcactaattgctaaatatttattctgaaattccaaatattgatttttttaaaactagacaaacataaaataaatgaatattttatatatctaaaaaaattatctataactttcgtgtttggagaacaatttaactagggactacttttggattacccttgcagcaaagaacatcaatttgaaatggatttcatggaattccccaatttcctcctttttccttgctctcttcttccttgtcttctaaattacattgttgaaaatgtaaaagtttatcgcatgagactatcacaattatgaggttgctgtgcaacaca

SEQ ID NO: 26915 - DNA, 8897 bp, Oryza sativa
  unsure (1)..(8897): unsure at all n locations
agtacccgccattgttatagcttactctatgagctatgactgcaggaagagatgagtcttgagtgaagaattgcatgggtatttatagtgcttgaggccacatgcaacactagtttcgtgatagcatgcacgttagcttttttagttggcaactcccagtaggatataatatcaagttgaggcttaaagaactgtagaaaaaagagctcatttacttcaagagatccttgctaatacatatccctgattaattacatatcaatgtagttaattgcagccacttgtattcctccctccatcttagagcaagtttaatagtatagccaactactagctccaattcatctatagccaatctaatagtccgttcatacaatagctacatactacactattaatatctgatcccacatgtcatacgcacattgtgtcttgaagtccgtgctacagttggctataaatctgtagcccgctgccattctctctcctcatttatcttcttaaaatatgtttgcagttgacttatagcctgctattgtacctgcacttagacgtattaatttcatttgtagtactataaggtttcttgtgttaacgaaacaaaatgcatcctatatttttaaaatattttaaagtagagagagtacttattactgaatatacgaatatacaaaaggtgactcaagatgcagagtgcttctatgctctaaacaaattgattgactaattacagtactacagcctggtaaactcttaatttcaatgacttccgcaaatcagcacgaccatctatgctgctaattaatgaataaaattacagctagaagaattgacattacgaggagacttcgaggctctcgactcgatcccatcgctgctgactttgacacattcaaacgccgttttgtactagtaaaagtgacaaattaaactgacaacccgaccagtctaccacacacagaatacttacaagaaaaggacagccagccgatgaattcatatggttgcatgatctgcatgcggagaatgggatgaatgagcgagacgcgctgacacaatcgttttaatagtgcttaattaatactccctccatcccaaaatatagcaatcttgtactggatgggacacatcctagtccaacgtacaagattgctaaattttgggacggagggagtagactactctctccgtcacaaaatatatgtaagagattttgatcggatatggcacgcactagtactaggatgtgtcatatccgataagggattttcatcgaatgtgatacgtcctaatatcacaaatttagacttgattcgtggtactaggaaatatttcaatgaaaatcccttatattttaggacggatggagtatctcttagtacagtgccttctctatgtggattattatttgaatacacaaacggcattctaaactttaagagcaggtacaatagcagactattagccagctataaacatattttaatgagataaaagataagagagaaaagcagcgggctacagatctgtagccagctgcagcacggactccaagacgcagtgtttgtatgacaggtgggaccatatattcatagtataataagcaactattgtatgaattggctattagattggctatagatgaactagagtaagtagtgggctatactattaaacttgctctaagcaacaattaaacagtactactgtaaaccacgttctagcacttaggggtgggcattcggtctaaccgaaaatttcggtctcggtcttcggtctttcggtctttgaaggacagacaaattcggtctcggtcttttcggtctcggtctcggtcctgaccgaaattcaacagcattttcatatatgtaaagaaataatggaaattttcaacacagaaatcacaaaaaaaattcgtatgcacttataagtaaagactcttattaggttgcatgcttagaagaagtagggatgtgaaaattagagtttaatcctattaaacatagtggattgtaggttgtatttagactttttttttgataattcggtcttttcggtctattcggttacccgatgagactaaccgaattgatgaccgaatttctcggtctcgatctcggtcccggttttttcggtacgttcggtctttttctgcccacccctatgtcacgccccgaactagtcccgaccggaactagcccgtgacgctccaaattaacctgttaatcgataccagtcccaggaaacagtgctggtatcacagggagacagaatatcacagcaacagaggtctctttattatagagtagaagtacagtcatgttgggctgcggacagatcccgagctcacaactgcattacaaaaggaaagcggaagccaggacttggaccaaacatcacaggcgcgacttgggaactaggccgaaaccctaaaactcatcgtagccggcttgctcctggaagaactcctcgtcagcaggatccacttcatcttcttcagcaactgggggggattatttatatagagcaagggtgagtacgggagtactcagcaagccaggggaaatgagtgtttaatgcaggcttcaaggaaaggctgttgttttcgtaattgattttgtttgaactcttttctaaaaagtctaagtgagtgcttctcaaacgacacggatgagacagtgcgtctcgtccggtcggagtatgtgcaatgtatcagtctttagatcttgaaacagggttggcacccggccaacagcttttcaaacggccacccgggccaaccacttttcaaacggccacccgggcctagctgatcccgtcagctgctgatttttcaaacatcgaacccagtttcacaacagcaatttcacaagcagtagtcaaacaaaactacgctaggaatcacctcacatccgcccatgaccgtgggcacggctgttcgaacagtttgttaacctctgcagagggggtacactttacccacacgacattactaacccggatcacccagcccgtggggatcagccacgtcgggagacctccaagctttcatgacaaggcatttcgaaagccgatacaggtttaccatatgccgacgagaggggtcccagaccaacaacaggttaggtcccagaccatactgtgccaggaagcccaggggtcctccccgacaccaccccggcgaatccacatgtctctcggcatcaaggctcccctgataagctagttactcagccaggggtgtcccattccacccatgtggtcgtacttgtcttatgtttggatgaaattccaaggaatcggtccttaagtgcaagagcgggaaaccgtacacccggtacgttccccggtccgcggttttggaaattcatttagttcgcaagcaccgacccaagtgtcgggttttccaagtcttttgtaaaactccagttttacccaagttgttactcagattttaagtttgaaggcgaccgtcgatactcgcacagagtgcacgaatatcgaggtgcaactgggtggttacaaggggacatagtatggcaattaacaatggaaggatcaaatgcaataagttaggtaagtccgccaatctgccctacagacgggacaacagattaagtgtgatcctatcaatgcataatattttgcaagcaatataattaaatttcaaatataggctcaagatgttcaaaggtggcttgccttgctcgagatctggagcttgatcctcgaaatcctcgcactgcgggtcttcgggctccgaaactacacgcgaaacgggacaactcaacaaacggcgaaaatagagccctattaatgacctctaagcgtgccactagatagatctcgagatttgggaaattttagaagttgaacggagtcaaacggaattacggttgggaagatattgaatttctaagattattggatttttggtctaaaggaaaaggatttaattaaatcctttttgaaaaagaaaagaaaagaaagaacagagggatggaaattagactttttctcgggcggctagggcgcggcccaaggtaaatggagcggctcggccgagcttaacgggccggccggcccaagacggcccaagcgcgcgcgcgcgggagggaggagagagagtccggtggaccgggctcaccacgcgcggtcccgggtgggacccgcttgtcagcggctcggctcaccgtgcggagggagtacgtggctcatgcgcgcgggcggggaaaggacgtggtgcacgcgcgcggtccgtggtggacgcaggtgcggcgggcccacgcgcagcctcacggctcgcggtggaacacgcgcacggggagggactgaccggggtcggctcgatccggtctaggctgagctggcgccgacgtggcgcctacgtggcggccacgtgggctggcgggaggtagacgacgacccggccgcgaatggacgtcgggcggcggcggcgagcggcggagcgaaccacggcgatacgggcaaaagcgtgcacaccgggcggttgcacgtgacaagggaagacgagccaacggctcggattcgccggaggttgctcgacggcggcggattgcggcggcggcaaccggtggcgggagaagagggaaacggcgacgaggtcacgagaggtcgattcccggcggtgagagcatctacgcggcttcgggaactcgacgctagcgtcggattgggcggaactacgccgagcgaggccggcgacgagcgggtgctacggagctcgagcggcgacggcggcgaacacacggcgagcgacggcaacggtcggggcggcgccggctaactacggggaggctactcaagctactaccgaaagctagggggaggtgatggagcgaggaggaagaacggagagaggcatcaccgagaagaggagcggcgctgtgacgagaggccgacggcgcgggagtaatctctccggcctcgggccggggaagagaaaggagagggcgcggccgaagtccccttccgcgtcctcgaacgcaccggctctcccggcgcttggcgaaggacggcggaggcgagacagaacacgggggcggggtggcggcaatggcgcggagacgaatggaagatgaagggaaagggggaggctggggtttaatgggcggtaatgtcgatttgggaaccgccttgcgcggtcaagggcgagctggcgctcggcgcttgcagccaaagcggcgacaggaggatgacgccggcggagaggggaaaagaaaaaaagagagaaaggggagctcgcccctttctcctttgggaaaaaggaggaggagagcgaggcgactcggcagagggagaggggacgctgcctccgtcccttggcggcttgcgcgccgagtggcgggggccgggcggtgacgacggcgatgacggcgggcggtttggagcggagcggcgacactggcgacaggcgcggcaggcgctgacgacggcggcgaccgggcggtcggccactcggcgcgcacgcgcgggaaacaacgggcggcgtccgcgcgggcgcgcgcacgcgaacacggcgcgcgggaagcggctttgcgagcggggagctcgcgcgaggggaggggcgctcggcgcgggcgactcccgcgcacgcgcgcgcggcgcgcgggcggggcggaggggggagcggggagagaggcgctcggggcggctctcgcacgcgcgagcagcgtgcgggcgaggctgagcggggggggaaggagcgcgccggggggagagagagagagagagagagagcgcccgggagagagggagagatgggccggggaagagagagatgggccgagcgagattcggcccatcgacctcgggggaggcaaaatagacttttgcggaggaatttgattggaaggatttggattcggaattgaactcgacgatagatcggtgattgagatcttgagatggcacggacactagacaacaagcaaagaaacaaatttcgcaattagggcttttaagagataatttttccgctaggcgtcacgacggaacgggcgctacaccctactagccctaggcacaccatccttgttaaatctcgaaaattgcgtggcaaagcaagctaaatcgatccacgaacttatctatgacgacaagtactttatcagtcgattagcacaaacagaacgttcatcattatgcatctatatgagaaatcaagaacctcaggcacccaatagtttgccatactgcttctctatgaatctgcgaggtggcaccttaattcctatgacatatactactagagaacacgctaaatgtgcatgctcttatcaagaaccggcaccaataatactctccacgaccatcccgggctgcactggaggctatctgtgccggtttcaaaatcgatagtgatggttcttacaaattagcatggagagatgagcaggggcagatctatatagagccatggggattcctagacacccgggtgaaagaaaaatttaagctgtaagtatccatcttaccatgcatgtaggcacccccgtcggcctaactttgtgtaacccaagcagccaataagaccgagcaaggacaataaatcaatagagatacacagtacgtgatgactcatcacaggttaagtataacaccagtagtcaataatttgacaaattgtcatgcttggagcccaacacaaccagtctcatcaaccttacgccctcatttttttaatagatgacatcgttgacttttaaatacatatttgatcattcgtcttattcaaaaatgtcatgcaaatgtgtaagatataaagcatgcttaaaatactttgagcgataaaacaactcacaaaaaaataaattataattatttaaacttttttgaataatatgaatgatcaaacgtgtgacaaaaattcaataacattatctattaaaatacggaggtacttagtatgcaatcatagtgaaacagaacgctcttgccggccagactagtcaagctattctgtaatgttgtttgatactacctctgtcccaaaatgtagttatttctagcacaataacttgtccaaaataaagctatttctccacctgcctccttctctcaaccaatcacaaccattcttcttcacctattttttctttttaaccaatcatacactttctcttattattctcacttactttcttaatacatgtgtcaactttgaaaatatctatattttaggacacgggaaatagaacatataagcaacatatatagtggtgtacccctctgctttgctctagctctgccccgggagatgaggtgttctgaggtagtgatattatgtgtatgccggcactgcgagtttcattacaagtgtacctctattcaaaacttgccttagattgtcgttagatcaatactaaatagtaatgattagattttagaaggtaatggttttatctaactaataattggggcatactatgcagaactgacctaattaatcttgatagtatatttcctatttccatttttatatggcaaccaactaaacaactgctaggtatattataagagatacaccccaaaaatgtttgaatcctgcgggataataattttgggcttcatgtttaatttgtgtagtcctatgatgcatgtgactgttgaattcctcagcatttctggggtacgtacagacaattatcaccttccaatttgtctagttgttgctttggttgtgcgaatccttttctactggttgatatgatcatgctagatcgtcgtcctggtcgtggaaggaggaaaaatatatagtacaaatcaaatatatagtggaatcctaaaactaggagaatctaaaaatggacaagtgagaattgttcacgtcatcatgagtagatttaactgatggtgacatgaacatatcatatgtttattttttttatcctacggtagtttcctagctgcatgtagctagcacattgcagaattgtgtccataaatattagagtgacatgaagcataataatattatcaactgacagatcacatacttaattgcaaaatctctcatggttgtacactactaaattactaaaacaatggagccctttatttcattctgcataatgcataaacaagtactaataaattaaaagaaattctacttcacagacaatcaaaaatgactactagttgggctccattttccaatttcctttgtgaaggaaattaagggttcgcatcaccaaacccagatccggaacctacaccagcaccgctgccaccatattgaccctgaccgttaccaccaccgttgccaccagcatttgcatttgcatactgtccataccaggtattagtagcctcactagagcctgagccggtaccactaccagacccatgaccataggatggccagtaaccaccagcttgtccagctccagcaccagcaccgctnnnnnnnnnnnnnnnnnnnnnnnnntaaccataatacccattttgactggtctggctagagcctgagcccgaaccagatccactaccagaccctgacccaccatattggctgtagccaccgcctccgcctcctcctccaccacttgcatgggcaccattgtaaccacttctaccagacccagtcccacttcccaacccagctcccgcaccattcacgcttcctgtgccctctccacttcctgtgcccgaaccttgggcatttgagtatctttctacccttacagcactagctaatccaatgctcaagaggacaataaacccaagagctgcaagcttagtgcctgccattgtgagattattctgagtagtgaaagaatagatgaatacttttgggtgatgggtgatggattgcatgggtagtatttatagtgcttgacgaggccatatgcaacacttgttacttattatcttaa

SEQ ID NO: 26916 - DNA, 48136 bp, Oryza sativa
  unsure (1)..(48136): unsure at all n locations
cccccccccttaaaacccaccccgatccccggccgctattaagccaaaggcgcgcttccgccgctgcagccgatacgggagattggatcggaagcttctagaagtttccgtgggcgatggcgatccgcgcgaggtcctcctcctacgccgccgcggcggtcgcgctggcgctcgcgctggcgtccgtcgccgctgtcgccggcgaggtcttcttccaggagaagttcgaaggtgaatggctgacctgctcccgatcccgtctcgatcgatctgatccggttcgctgcgcgttgcgggtctcggctttggatgtagtggaggcgtcgcgtgggggtgtttggtggtgggtttgtttggatctctggggttttcgggatttctctggggtttatacgactaggaggcgtgctggttgttagggatctggagtgttaggcgctaaattgggtgctgatcgtggtttgtctcgccatttttggatggttgctgctgcggtatggtgggatctgattgatctgacgtgcatttgctcgtgggaatgggatctagttgcgtcgtctagtaagcgtgcgctgtgacgctgtgtcgatctgctttatgtgaattggttatggttttttgttagattgtgggaaaaaaaacgtggttgggttgattcggatcgaanaatgttaggtttgtntggtatatgatccgcaggtttggatacttcattgtagggagtagttggtattctgctgtataatgtggtgaattttactttactttatactgcgaaatgggaaaatttagagcccagacttggtgatgttttgtgattgaaccttatgctttatgtatgttgtttaattctgatgtttcatatgtttaacctgaatatgaataaatgtttaagatctgcctatgctagtgctacatttgaagcatactagtgagaattggcagcttatgatggttgtcacctgtccgtgtccattagaatgtgatttgccacttatctgcatatgggatatggcattatgaaccaggtgcattttacacttcaggttttggcgtatagtttattagttctatacggtatgtctggagatccataattcgaatgtgttgatctgtattgctaatgtcgcctgttaaaattttgtctgtactactatttaaggaaatctccgggcagataatgaatttgcgtgatcatttgctggttctgcacatgatgcactgaacatggagttctgtgttatctaaatgtattctattgtgtgcacagatggatgggaaagtcggtgggtcaagtcagaatggaagaaggatgagaacatggctggtgaatggaaccacacatctgggaagtggaatggagatcctgaggacaaaggtaaattggaagatcaatacacctcattcagacactaacagatgatttttactgaattatttttcttgttgcaggtatccaaacctctgaggactacaggttctacgctatttcagcggagtacccagaattcagcaacaaggataaaaccctggtgctgcagttctctgtaaagcatgagcaaaagcttgactgtggtggtggatatgtcaagttgcttggtggtgatgttgaccagaagaaatttggtggggacacaccgtacaggtaatgattttcttctattgtagctctgattctcacttttctcaagattagtactagttatctaacttggtacttttgaatgcagcattatgtttggaccagacatctgtgggtacagcaccaagaaggtccatactatctttactaagaatgacaagaaccatttgatcaagaaggatgtcccctgcgagactgatcagctgtcccatgtgtacactttgatcatccatcctgatgctacatacaccatacttattgacaatgttgagaagcaatctggcagcatctacgagcactgggatattctgcctccgaagcaaatcaaggacccagaagctaagaaggtatttcgcatattcctagctttcttggaatgccttgcttttgtgtctcttgaatgttaagatattaccttatgattacagccagaggactgggatgacaaggagtacattcctgaccctgaggacaagaagcctgaggtacttttcctttgttctgacttccgatatatcttgtaaaaatgactaacttcgtatcttgcatgaatgagaaacgggaaccttagctgacctgaattagaaaagttcacactatattgtactcttgtaatactatatgtcttaatagatttaaacgtgatgctagaaactaggaagaagctacatgtttttgttgtgtaatgacttgtggtatgctgtttccagggatacgatgatattcccaaggaaatccctgaccctgatgctaagaaggtacttaattgttataccattttatggtttatgttatatatgatgagcgtcattctaggttttaaaatttctttgatgtgatttctgtagcctgaggactgggatgatgaggaagatggtgagtggactgcaccaaccattcctaaccctgagtacaagggaccatggaagcaaaaggtgtgaatatctgtttactgatgcagatgcacttgaaacacttgcatatttctggtttctgacataaacatgtttctttttccagaaaatcaagaaccctaactaccaaggcaaatggaaggcaccgatgatcgacaacccaggtataattgcctttaattgaacaacttggtattacacatttttcagatgttgaactctgcattctgaactgtttcctttgtggttcacagacttcaaggatgatccatacatctatgcttttgacagcctgaagtacattggcattgagttgtggcaggttagttaagcaaagtacagtacgcctttagttctgatttattttgctgggtcaggaagacagacataaatagttatgaacttatcccttctctcttctatcaacaggtcaaatcaggtactctgtttgacaacttccttattactgacgaccctgagttggccaagacattcgcagaggagacatggggcaagcacaaggatgtatgtcgttcttcacctagcttttaccgtgtaatagtttcgttatcgacccaacattctctaacattagtgaatcttgtaggctgagaaggctgcttttgacgaggcagagaaaaagaaggaagaggaggtaaattccttcaccttacaatgttctaatatgaggatgatggatgtacaactgtccttgtcattgcatttcagtctgtgctccatttcactgtctttgctatacgttttgatttttgttggcatgaacaccagttccttgatgatcagtgggccattgcttccacttaattatactatggtgtgatcaaaaccttttaactcactggcatggttctgttatttgtagttttacgtattatcttctgattgttacaccagcatagctttaagcaactgaaatattctccttttgtgagctgccatcactcgtggttattgtggatgtaatttgcttaccattgattatcaatgtccttgttaacaggaagctgccaaggccggtgaggacgatgatgatttggatgtaagatttgcatccgttcttcctccatgttctatattttccttttgggcttgatctaaacctcaacaacatttatatttcacaggacgaggatgctgaggatgaggacaaggccgatgagaaggctgactctgatgcagaggatggcaaggattctgatgatgagaagcatgtatgtaacactcctgcgttttcttgataccttctggattctggtgatgcatttcctgttaacctccatgtgtcctgatcaccgtccttcctttccaggatgagctctaagatggtgaggatgaagaatggaggccgccttcgcgacgatgccaggatttgctagttctcccattgttatgaagttccctttttcgtgatcagaaacttgacaagaaagtactctgtagatgagcattgctgaggaactttaatttggtctttgtagctctctctgtagtgtcatttttcccaccacaagaaaaagaactgataacttattgaacaagagaaatcttttgcacaatcgctctgcatcctgctgtgattgtatatgtgcttgtgccatttcccattgttttgccatagggaaagcgtcttcagtcgttactcgttaggcacctggtcacctatggcatggagtcgaatcgatgagaaggccgagatagaaatgctgggcaagtttgcgttccaaacttccaatgccaagtctttctggttaatcaaagaaatccctcacattgcctgtttattgataccatcagaaatagtttgtttgcattccgctattgtggcaatattctcccacgaccgcaaataactaaatatgggttgatcaattgagcaagatccaaagcaatggtggaatatgcttgtccgaagagtggtattgctttttttgaaaaccaagggggttaaccacaaaattagccaaaacaacctaatggggatataaagttaactgatactccatccgtttcacaatgtaagtcattctagtattttccacatttatatattgatgctaatgaatctatccacatttatatattgatgctaatgaatctagacctttaaaatgtaagtcattctagtatttctcacattcatattgatgctaatgaatctaggtctagaatgacttacattgtgaaacgaagggagtaggagataagattagggcagacagcgcttggatcaggcttgtagttcgtcggtacatgatatcgctatatccgcatatatttagtccttaactagtgcatagtattttaattatatcaaaattattcgtatttactgagttttttatttagtgtttcttattatactaattatgattaaatagtaaatttaaaattattaatatgatataaatgagatataacaactagtgcttagtattttaattatatcaaaattattagtatttaatgagtttttttggttatttagtgtttattatttatactaatatatgataaaatagtagatttaaattattaatatgatatgagatatagctcgttgacgagattgctatctcgttaagataatgagctcaaacgagtcttagccttaacaacccgagctagctctttatccatctcggataagatacctactagttaggtcataacctcagtggcttagagtaagtgttagtagctataccttttttgactgataatacttatcattttgtactatgacgaggttaattttaaaatctttgactataaatattttctaaagtatttattctaaaaatatagagaccatattaataaattggtcttaaaaggtacttcaataaaataatatatttgttgatatttctatatattataaataaaaagtggtcaatgttgcttttgagaccgtgtaattgttcaaaacgataagtattatcatcctgaagagagtaagggtttaacttttcgatttggaagtgaaaacgctcatcaccggtttaccaaaatttaaccgaaaaccattaaaaactgatgactttcggtcaaagccgtacgaaaaccggctaaggctgtgtttggcagcccctcttcccaacccatctccctcgtttttcgcgcgcacgcttttcaaactgctaaacggtgtattttttgtaaaaagtttctatacgaaagttgcttaaaaaaatcaaattaatccatttttcaaaaaaaagcaaataattaatcacccgctaatcgctgctccgttttccgtgcgggcacttactgttgggaaccaggggttccgaacacaccctaataccgaccggttttcataaaccgagatctagcagtttcaccacagcccaccaatttttgtgaaattccatcagttacgtgatccctgaagagagtactaagtagagcataaataatgatgtgatgtcagcatctcatagtaaatgccacgttagattttataatgggttcaggagagagaaataggttagaatgaccgttgtttgagtaaatgccacattggatttacaatgtgtcaaattttacaactttttacatcctactccctccgtcccaataaaccctccgtcccaataaaaaataaatctagagtgtatgttggtttttttatagaacggaggaagtatgttttattttggatcactctttaaccaggccgagccgacccatcagctggcctagcaggccgaggcaaactaacctcgccccgcgctctgcaactgcaaaggattattttctgctttcgtgttcactgaatttctgctggtctaatgaccaccactttatgcacatctcaaatgaaaattgaagctccttccaaatcagcatcaccatcgtataccctttttataaaaaagaaaaatcataaatgtttcagaactacgcttatgcactgcctcgagatttcgccttgacctcctcgtgctcggcaacacaagaacaaaacaccccacactgcacagcagctcttgagccatcaaggttgacaaaaacacgcatgctgcatactaaccacatcacgatgaaaatcagaggaacaccaaatcgttttccagtacatgataacacttgtaatagctgtgatgttcgacaatgatcaaaacaaagcccaaagatatacagaaacaaataggtacaacaatcagaaaagcgttgcattctaaatcacaacccatccaaagtagaaatgcagctgatgtaaagatactaagtactaaacaataggtgattgaatgttctgttggtttgcttgcaaaaaaaagaataggtatggcagaatcttatcaaaatgtgaatatgccaaaaaactgaagccgtcacacaatcttcctactgctcagccttcttcacctcttccgatgactcgggttttgttggctcaaccttcatcacctcttcccattgcccatctgatgcttgcttccacagagttatgttgttctcaccagcagctacagataatatgtttccagtcaaggaccaggaaaccctccaaacaggggacccgaagtcgtgcatgacctttccctcccacttatcaccaactttccctctactccaaatgacaaccttcccatcttgagaagcgctggcgatggtcgccttagctaagcccaacactggtgcccatgcaacatctctcacacagtctgtgtgaacatctgaaggaagagcactctccagtttccagccaccattgacaaatccccagaccttaacaactgagtcaaaaccaccagagacaagcttataaacaagctctcctgaaccagccagagaaccaagtgctgttgctggagcccaggagattgctgtcacaccaacagggtgagctcgctcaatccttgcagtgtcccatcccccatcagctcgcatagtcatgacagaaatggttccatcagaagacccacaggcgagacaaagaccaacctcatatggggcccaagcaatggagttgacagaggacttgtggtcagtaaatacatgggcttgagaccagtggcctccagcaccctccttccaaatgatcacacgcccatcatagctgcaggatgcgaggatagtaccatacttaggatgggcccatgcgacacgccacacagggccatagtgcccgctgagtgttgcaaggagctgggatggggcagatttgccgcctatgctggagatcttgacagtggagtctgaggaggcagttgcaaggcgcttgccatagtagtcgatagctgaatcatggaccatgtccttgtggtccaactctattttcttcgatgacatggttcaaagctgtagtgtgccacaacctctaagtcctccacaattctgcacatgattaaataaaagtttcagcaccaattcatgggcatagcagcctaaatttgcgaaactagataatagaatcccacccgaagtgccctaaacggttaacaaggaccaagaaatagtcacctcacaaacttaatattaacaatctaaacaccattttttgtcatactcccaaagagacagaagggggatgcaatagaacaatgctggtgtatcatcgcctcataaaatcaaccatggaattaaacacaacgagactgtaaataagtatgtagacgaggctcaagggtcaccattggcaaatggtactaattcacaaactttgttagacttgtggcaaaccactatagtaaatgttggtggcttcaaaataataacagaaccacttacatgctaacctcatgaatgagtataacaaggcattggattaattcgatgaattgacttaacaggatgtaacaatttcacagctcaaaacacgttcaaacatggatttgaattcctcaggcatgagaagaacagaagtttcgatagactataatctaaaaaatgaaaacaaaattaattatacccctcattatttcacagctcccaaatctatacaattctgattcttctctatcatgtcaaaaaataaaagaaagatagctgatctggtgtgacctacacccattccctcattccacgagatcttgcgccccccagagggcggatccaacttgggacatgggggttcagttgaacccccaaacttttgggtgaacaaagaaactgttacttgtattaaggttaaggctctgaaattaagagaagagctccttccagatctagaagagaagctagggtaaacgaacggaacgcaagcgaattccagacaaaagtagtcccggtgggagagagatgaatcagaaagaggatgtggatgctcaccaggatcccctcccctgccctgctctgctcgccggatggagatcggcgcccctcccctgttcagccgcgactcgtcttggcgcaaggagcggaggagacgggagattttcttttttgacgcctaagggaaggggaagatactcgagttaagacgtggcagttactgggaatatttaactattagccactttttagacgtggcaattaaggatttgacactaaaatactaaggctgagttcgtatgggggagatgggtacccaacttctgcgtacggaaaacggagcagtccattaacgcgtgattaattaagtattagctattttttttcaaaaagggattaatttgatttttttaagcaacttttgtatagaaactttttacaaaaaatgcaccgtttagcagtttgaaaagcgtgcacgcggaaaacgaggggaagaggatgggaaaaggtgcatgcgaacacagcctaagtgtgtgtttagttcagcgtaaattttgtattttggttaaaattagagatgatgtgactgaaaagttgtgtatgtatgacatattgatgtgatggaaaaggactgaagtttggatctaaacacagcataaacccatatatcgcagatagagaagggtatagactatgagtggtaaatagttaaatgctatattttaaaagtgacgaatagtcaaatatcctgaattagatggatgaaaacagttcggaaatggaaagcgtccgtccgaattttttcgaaaataaattcggaatttttttctcagaaacggaaacaaatatgatgatgctactatccgtcgaaaacgaatttgtggacttttcgaaaacaaattcagaattttcttttctcggaatcggaaacgaaatatttctcatatacagctgattatcttcagacttttctactccaaatatttagatttatactatgtgccatagtacttataattggagttatggatgaatatagttatttttctccaagaaattaaactgtataactagttgtgttattattaattgataaaaattagaaatattgatttattgttttacaaaagatattgaggtatatctcttcatcgatttgagaagtttagcttaaggggtttttatattctaataaatatcattaccgtattagcttcgattcgtattcgctccatttttatattcaataatattctattcctttttttttgtatctgtggttttcgatttcgaaaagaatatggaagcggaaactataaaagtggtttccgaaccgtttccatccaatcgagtactctacctttatatctttttcttactactttaaaactagctttatctttatgatgactagtggcccacagatcagcagtactcagagaaaaaagtacaacaaactccgttggggattgtgttgacagcaacctcatcagaccactagcaaccactagctgatgcttcacgaatgtcacaccctgaagttcttcccctaagcctaaatggaattaataattggtctcgagaaaatacctgtgtaaaagcaagagtgaaaccctaattaattaatgtaaataataatcggaattggcatgtggaatttttcttgagttctacatgtcgaaatatgctaacaagatttttagtggaattttcagaactctagggataattttaaccaattaaaaatgagcataagcattatttaaatccctggaaattcttttccctttttctttttccctttttcccctccttttttcctaatgggccgccggcccatttcctcctccctcccgtaccgtgctgagccggccgaaggccacggcccagctgagccgcgcctcctccctcctcccgtcgggtcgccgacaggtggggcccacctgtcgggcccgtccccaacctccggccacccgccgtccgcagccgccacctcgcaaccgcccgcgccagccttccccgcgccacgtcggccacgcccgcgtgtgcgcccgcctttcccgtgcccctcaactccctctcccgctcgcccgcgcccccgagatggccgggatccgcctctctctccacctccacctccccatgtcggccggcgaaatcgggccgctcccggccacgtccgagccccctctcccctatttaagcatcaccgctctcctctctctctttttctccatttcgccgagctcccccgtgccctccactgccctagcgccggtgccctcctctccgccgccgccgccgccgctccggtcgccgctagccgctgcgccaagccgcgccatcgccgccgtcgggttcacgagcccgggggccatgccgtccacccctccgccgccaatttggacatcttggtacatcttggtacatttttctttgagatcttagtacatcttggtactgcctggatgaatggagtactgagtctgatgagcctcggtgagtatcagatctttcagctctttgtcatcaggtacgcacaatctttctcccaaccagattgtgccgtgctcatcttcaaggaaatcctgggattttccaaccctcatattctttttcagctctgctatttcaggatcatttacctgagctgctcggacttggtccacgagcgtaggccgtgcctctagggcagccatgtacccgtgttctacaattcccaagttgagatgttcaagttcctgctacaattctttacacatgtcttcggtgcacgaagcgttgcagtagcttttcctgcttaaggcatctgccaccacattggctttgcctggatggtagtgaatgctcatatcataatctttgattagctccaaccatcttcgctgacggagatttagatcaggttgggtgaagatatatttcaaactcttgtgatccgtatagacttcgcagcggttgccaatcagatagtgcctccagattttcaaagcgtgaaccaccgctgccaattccaggtcatgtgttggatagtttccttcatgtggacacaactgtcgcgaggcataagcgaccactctgccttcttgcattaagacacatccaagcccgtgacgggacgcgtcacaataaacctggaagtctttcgtctgatcgggcagaatcagaactggagcagacaccaatttcttcttgagctcctcaaaactcttatcatactcggctgtccatttgaatttctcatctttcttaagcaactgagtcataggtctggcgatcctggagaaattttcaatgaaccgacggtaataacccacaagtccaaggaaactccgaatctgtgacactgtcttaggtggggtccacttggtaaccgactccacattcgatggatcaactgccacaccctgagctgtaatgacgtggcccaagaatttaacctctgataaccaaaagtcgcatttgctaaacttggcataaagctagtgctcttgcaacttctcgagtaccagacgaagatgtcgttcatgctcttcttccgacttggaatagataagaatgtcgtcaatgaataccatgacaaacttatacagaaattccatgaacactttgttcatcaggttcatgaagaatgcaggtgcattggtgagtccaaaagacatatccgtgcactcatacaacccataccgagtggtgaaggctgtcttgggaatatcctcttcccgaattctcaactggtgatagcctgatcgcaggtctattttggaaaacaccttggctccttttggctgatcaaacagatcatcaatctgtggcaaaggatatttgttcttgatggtgacctcattgagtgcgcgataatcgacacacattctcttcgtcttgtccttcttctccacaaaaatgactggagcatcccaaggtgaagtactcggtcgaatgtaccctttctgcagctactcatcaacctgcttcttgacctctgctagctcgttggctgccatcttgtacggtctcttgtaaattggagcagttcccggtgccaaatcaatgcggaattcgatctctcccttgggtggcatggtagtgaggtcttcggggaacacttctggatactcgcagatgatgggaatatcttccaatttcctcgaactcttctcctcggtgaccaccggaatttccacctcaatctgattcaaggaaacccccagctttggtggggctggagatttgtacaccactgtttctcccttctcattgatcaaggtgaccgtgcggttcgcacaatcaatgacgcccttgaacttggtcaaccaatccatcccaagaatgacatctaggtctttggattcgagaaggatgaggttggctagaaatggtgatctttggatttctattgttacagaaggcctgaattgaaccgaggtggagctatttgtggggctgtgtcttgtgggtacagttgtacatctctgattagagtagaactattcgaatagccgtgcccgcggttatgggcggtcaaccagattcaccgtgattagtctcaccctagtttagtctaatggaattgattagttcaggtagatggttgggcctattgcaacgtggagtagcgttggacagtggatggttaacattgattaattattacaaatgttttactgctttcaactattgtttataactgctcgctttatgcaaatgtaccgctctacctatcctttggttatatcctgcatcataccccctgttccggtatgacttgctgagtacggtggttgtactcagtcttgctctacttttccccaaccccagagtttgagtatgcgtcagatggtggcttttctgaggagtaggcttcgtccgtgccgttaaggatgcctgtggagtggtgttcccgctgcagtcccagtcaaggattagctccagttatcttttattttccaatgcatttatgtaagacttttataatgtttgtaagacgtggatctgtatgtcaactttgtcgcttgtgtaccccggccggtcctggacaggggttttaatgcacattctgcttggaattctactcgggaatttctgggcgtgacaacgcaccgccaccactgctctttctctttgagccaccatcgttcctcatctccacctttgcatgcgcagccgcaccctctagtcactgacatgactttcctcctcccccgtcatcatgcacactattgtcgtggtcatcattgaggtcaggggtgttgggcttacagggattcagaggggcagccatgcaggagttgacccgacaaagagcagagacactagatccgagctcctccttggtggatctgacggtttcccaacggtcaaagggaaaaagaaaaaggagaaagggaattagtgtgcgaaatggctgtagagtcaccgaacttggagatggatagaatagggtggtctaaattgaaatgtaaagtttgatgttgtgtaaatgaaaagaatggttaattgatgatataatatgaaaacttttaaaaatacatagtacaaactacccgatagtctcgtgatatgctaagcccagtacagttttatcgtctctgcacattatggttgggttggtgtatttagctattactaataatctcataatatattgatacatgacgatacgaacttctactaacatgagttgattaattatggttagatagatctggctaaaaaaagataaaaataataccaacaattttgcccaatagtaaagcattcgattgtggtcttcttttctcattgcatgattgttgacggtcgttagcgactagtttcgaccatcaatactacccaaataaaggagaactagtcatgcttgcaatgcatatttatgttcaataataaaatattccactagcactaggattactaacctcttgcagagaatggccataaaatagaggataatcgacatcaaaacaggcgatcaatcaatcggacgatgttgagaatcagacttatcaatgaatgggccaagaaagcaaaaatgacacgaccaattggaccaaaatttacaagtctgcatttgggagcaaaagaggaggccacctgccgaaattgggccaggccggaccagcccatggttcggccaaatccaccgcagctccgttcgatccaggttttggttggacggctgggattgatccccaatgatggttggagggtactaccgacctttccaaccgtcattaccagcctatataaacccttcactctctccatttcaagacacacctcaagcaagaagctttatacatttctcaagtttagtatagtctctagagtatagtggaatagaaatagaatataatattcagtcctcggagtcttcggaagaattcgggtatggctctagtagcttttccttcttttgtaagacttgtacttttattaaaatattcttctttatacaattttggtattgtattactttccgagtatatgaataccaactttattataggtccaagttatatttattatgatgctagcttatctgagagatgcaatggtgtgggtataatgatcgtattaacgatgactctatgtcatgacgatgatattagagtagtatatggtaatttaagcgtggtgtttggattgctggatatcattatttggggttatatgctgcggaagcgatgtgggccgctgatggtgatagctcagtgcgggtattcctccgcgcgtttatatagtcctaagttaatttcctggggagggtactcctccgtatttatccccagttggatggtcatgacgggttgtcgtaagaaactcggcagtcaggggtggcttctcgaagcaccaggagggcatcggaaagagggtattagtaagtaagtatataactaggatgcatgtataacatgaagtataggaatatgatctttctatattctttccacttagcttagataattgtgaatgaaagtatgaatgcttctgcttagtgtcactctaccctctgaattagattaacccctgcttagactttggttgttacaagtaatatataaattattagtacggttctctctattataatctttccacgggattaaacaaatgcgatacccttggaatactctcgggtgaaatgctacaatggtatatccgtgcgcttgcggatgaactctgtaaccataatatactagaagtatttctgcgtcattgctgggaattatatttctagtaatgtgtaactatattggtattttcctaattctttcatattgttttttgtttttttcatacatgttaatttggactaatattttttctcataattaaacagataataaatcatttttcatatttctcctacaaaatgtgaatagtgcattgtataatttgaaaattgcattataagtgtatgtaatttaatgtgtaagatatggatttatagtataagatttgattttttttctaaaaataccgcactatagaagataggtggttaattagtgaacaaccataaaatatagtgagaatctattgcaagtcactgattttgtctctattttatgatatgccactaggtttgtcaagttctaatatgccatagtgttttgcttaacttctactacgtataatataccattgccgcctagttagccgtcgtcaatattgtacaattttgtcctaatgaccaaactagtactcctagacgaaaacttccaaattttggtcaaaaattctgaaatatcatattgtagaacttccaaagtttgagatgggtaactataagttcaagtgccctattttggttttggtgattaatggcaaatctaattatatgagactaacgtttttatgagctttttttaactagtctcatttggatatgaaaataaaaatgataatatgtatgcattaaacttcatatattctaacttggtctctcctgtggatccaagatatagtgtgagctccctcgttgatcttaattgattatgtgcatatgtgttcctttatatccatatatatgcacatcttgagggggagcttattatatatatttttattataagatctctaccttgatttgaaatatatttcatctcatctctctatattgtttatatcgggttattattcaacaccaaagagagaaaagattgaaagatcttggattaaacaatttgtgtaattgttgctttggtgatagttgataaatcgatgtttatgggttaacatctctattacataagttgtcaacttaaataattcctgataatgagatgtggtaggtatgcattctttggtgatggaccttaatcatgataaatgaaattcatgtagataaagttatattctcctttacattgagaacatagagatcatgaaggaataggtcccttcccaccgtgatgaggctaatggatgacaccatgtgttgatggtcaccaatccaaggacatcgccatgttgataagaatgaagtcaagcttgtgataagaataaagtcttgacaaaggatggttaagacctcggcataaacatggttcaaccgaatgatcacaagtgttgatcatggctcaatcattgaccccaaattggatagcgcaaggcaaaggtataatggagctaagaatgttttcttagtattttggtgtagaacgaatttgctagataggcgtcgtactatcaagaggggtctatgaagcgagcatgtcgatgatcttgggccatattagttcatatgcatgtaggtgcatttggtaggcttgtctagccaagtgtagtgagttttctcaagtctcaaacaaagagacaagtggacacattttgggtagccttaagtggttttgtccggtggaatatcctttggagtgtgagccaaagtcggtctgactggaaggtgctcgatctgacgcagccgaaggaggtatgaccgtgttgacgaaaaatccgcgcttggccaatggtgccagaactgtgttggcacgaactaagtcgacgaacacaacggcatgggagatcttcttagctccagtggcggtccaaatcttggtgagatgtgggcgtgccagtcagtttgatcctgcaactgacaagatatgtaaacaatagatcaaatagccgatcggctgataagctaatggagtaattccagccgatgccgacactagccgatgtcgatagggttttgagcaatcgactatatgtccaatgtagataatgatataaagacaatcggttgatgataatgtaatataacaatagtatactccagtagaaaccaatcggctaacaatgatatgatagaataaacactgatccgaaggttaaagcatacatcggctggaggttcgatgtcataaaatccataggattagataaacagtgaaatctttgttgcgatcggctaaaactaacttgtacgtaatccttataagccgatgcaacgtccatataactcatcggctaaaactccgatgaaacccttattataatcaaagatataaattccttatcggacactaaacacacattcctaaagataaaaggaaactaacaaactattcctaattaatagataaacttgccatgactcatcctccttgaactcggtctcttctggataagcttccttgaatagattaatttcattaactgaatcctccaagaatacaactagtggcgacttgataattcacatcgggcgataccaggactctaaagccgatactttctctaggctgatgatgacttcggggtttgccaaatttcactgttaacaaacctttgatggtcataccagctagccattgctcgtgcattaaatgcactataacaaactagttttctagccattacaatgaaggtcggtctgaccggccactccaaggcggtctgaccggccaacacctgtgagttgggatttcgcccccaccgactagttttggttgttgtgggtatatatacccactccctagtagcaatggtaaggttttagcactccattgcattatattgaatccttgcaagagctctcatgcccttgtgcactttatctagtgagttaagataacccaagtgggcaagtagttactttgcatgagcataaagcctctcttttctaccaaagcttcaaaagcagaatgggagtgtcaacctttcccacaatggtttcaaaaaagacatctcatgagacagtgaatgatttcagacccatttctctcatggggatcagtttaaaggttataacaaagttaatggatgatagattgcagtgtgtgattttgaagttaataagtgaaaatcagtatggtttcatcaaaggaaggataatccaggactgtcttgcttggtcctttgaatatattcatcagtgccagccgtccaaaagggagatcattatattgaagttggactttgagaaagcatttaatacaatagagcattctgttatcatctctgtcatgcaactcatggatttcccagtgaaatggcttgaatgggttaagatggttttttcttcaactcaatctacagtgctcctgaatggagttcctggtaagcccttcagttgcaaaagaggggtcaaacaaggacatcctttgtctcctttgttgtttgttttgggtgctaagctgcttaaagagtggtgaataaagcttttaatctggggttgttgtcaaaaccaattaatgaagctgatggtacatgcttcccaataattcagtatgctgatgacacccttgttctgctcaaggcttcacagaaagaaatcttttgcttcaaagctttgctcaattcttttgctcagtcaactggtctcaaggtcaatttcagtaaatccagcatatatcctcttaatctttcttctaaaaaagctgaacttctggctgaattgttgggatgtcctattggtactttaccttttcacatatttaggactgcccatgggcactaccagacctagagtggttgattttgcccctttggttgatagagtggaaataagactcacatcaagctcaatgtttcttcctcaggggggggggggggggtaggccgaccttgattaattcagtgttgtcctcaatcccaacctattatatgtgtcccttgcagttgcctgttactgtggttaaggccattgatactgcaagaaaaaactgcctttggaagggtaataaccaaggttctacaagaaaatcactagcatcctgggatatggtttgcaggccccaaaggacaaaggaggactgggcatagttaacctgagagtacagaacacaactctcctaatgaagcactcggtgaagttatataaaagtgccaatctgccttgggtgaacctagtttagaattcatattacgcagcaaaggtcccatactcaataaaggttctttttggctgagagacatcttggttttgttagacattttcagaggcattgcttagtgcaccattcagtctggtaattcagccctcttctgggaatatctatggaatgatgaactcctaagtgataaatatccaaatttatgtcatctagctttgcagaaggaggaatcaataagcaatatgtgttcaaggtctttggaggactcttttcttctgcctctgtctacacaggcctatgtggagtttttgcagctggaggagcagctcaattctctgaacttgaatgaggtgcagggggatagctggagttttatttggatttcagatgtctacactgcaaagcacttttacaagcttaatttcttggctttgaatccaccaagaccttttgtatggctatggaaaacgaagtgtgttatgaaagtaaaggtctttgcttggctgctttttagtgataggcttaatacaagaggcatgctgaaccgaagacattacgcaaaggaagatgatgatctcacatgtgtcttatgtgatggaggacataaggaaactcggttgcatgtcccttcagtgctaggtgctggcaatacttgggcattatttggaatctgaatttggagttctttcaaatggtcacttttgcaaggtggagatttggttctctgggtgggaagggcttcctggaaatctttttcatagttgcttggcacatatggaagcagaggaatggacttgtatttgaaaatgtggccccctcctttcagtcctggaagtttctttttacgaaagaaattcttctacatatgtgtagaatgaaggaaccactgaagcaaattggttacaaacattatagatttcaaggtttgttgtaattaaactcttgtaaatattctcttttaatgaaatcacactgctaggcaaagccttggcagtattcaaggtcaaaaaaaagaaaacccaagtgcattgcttctttttttttaccagaagtgcattgcttcattgttagagctagtgtggcacttgatcatacttggcaaacattttagacttgttactcttggaggttgccaccttctagacggtttgaaggagttgtccggtgacctctccaaaagagttgtagaggaggcctggtgttgattgtgagtggctcggtgttcgccatctccgcagtggagtaagaacaaccatagtgatagagtcttgggagaccacttcggtaccggctcccaccttgcccaccccttgacaaagaggacttgtggtggcttcgtggtttgagcggtgaagttgggctcgccccaatggtgatgtaggaagttggcaagcttccgaacatcgatagaaaaatcctttgtcatttgtctcttttattttgtgcaagtttactttgagcaactttacatagtagattttatttgtgccaatatcaacataggctagcttctttgtgcacttagttgacactagttgtttaggttttgaattgtgcaaaaccattttgatttacgcctccacatacaaaacttggttttagccaaaagttttaaaaccgcccattcacccccctctggtcggtctccttatctcattttgtgtatttcttatctttttttttctttatctcaaacataccctgaggcaattcggatcctctgctgtggaggagaaaattcagaggtagctacagtgcctggcattaggagtactgtgaagcgtccgatagaagatggatggatcagatgagacgctacagcaattcggatcctctgctgtagaggagaaaattaaaacactgttcccctcacatattactgtagctacagtgaccctctgcagtaatgcagaggatccgaatccgaggataaggaagagctaattacgatgaatggagaaaattaggcaccaactaaatattattctcactactagactactagaaaaaccatttttctaaatgatggtatttttttaggcgggtaagcctctcggagctaaatggccacctgcgaaaatgacaaccatgggatagggatgaaaacggagtggatacggacggataatactcatgccatattcgttttagtatttttttttaccggatataaaaacgaatacggatagctcgaatacagaaacaaatacggattatctcgaatatgaataagacgaatatgattggacacgaatacggaaacaattttttctcggaacacgaaaaccaactcaacttctaatagaaacaaatatcaacatatataattaactcattttatataaaatgaagtataatttataaatattttttaaaatttaaataatattaatagtatggactagtgttaagagataaactactattaaaatatataaatctatattgaaggttctagaattagaaagaaatagggtatgtctcatggcttctgcgaatatctgaatagcactattcaccggatatctgaattattatccgtatccgacggaaaccctgagaccatatctgtattcgtatccgtatccgaactatccgagaattatccgattcgaaaggtatccgtatccgtttttgttcgaagcggacggaaactatccgctctattttcatccctaccataggacaagatcgttgtccgcctacgaaaatagattttcgcattacgaaaatagattttcacaggccgaaatttaggtcctccacctgcaaaaatccattcggcctcatatatccgccacccaccccttatctctatccactcccttcccctcctttcccctcttcactctctcactcctccctcccagatccactctcttcccctcccctcccctcccccttcactccttcactacttcggcacggagggcactcccctccctccctctcctagatccgaccggtggcgcagagggcggaggcggcggccatggctgacaacgtgcggcgactagaaggagagacagcgccaccgaccctcccgtccctctcagatccggccggcggcggaggtgcgtggcgactgggaggagagccggtggcactcccctccctcctagatccggccggaggaggggagccggctgccgccgccggcagcaatggacagaggggctagagggggagggggaggagagccagcggccaagggagggtagcagcaggtcggggggatgtttttaattcagtgaggtggtctttgtaggcgggtggatgttgcgtttgctaatgaagtacagacaagatgaagatcgcctagaaaattttttttggtccgtttgcaaaaaccccgtttttctagtaatgtctctcaagttagacccattaaaagatcaagtgatttagccgaaataagaagcatagctccaaaaagaactggtacaacacaccatacgtcaaaacagtcaacatacacaagttcttttttttttcttttcaaatctaaacaacaaaaatttgcagaagctagtttcctttgttctacatttctccactatgatatttattcttcctcacaaaagtttacctacaacacaaggtttactggagaagttacaaattagctgtctggcgataagccgatgactgatacagaagttcagtagtgcaaacgttacgtcacacgactgtacgtcaaacatatagtgttacaggtagcccggctcagccgacaacagaaaaaacgctcacaaccatttacaaagaaaggggtaagcaccttgttatctccatacggtgttgtagtgcgtaaggaagaaccggaagtctggatgatgcacttgacggtcccggagccagtcgtccgctgcctgcatcaatgaggctgcgagctgctgctcatgaggcccattcgacgaccaaacagaactccgcaacttgtacggtgccagtccaaagacgggcaatgttagcttaccagctgcattcatgcagctgttaaagcccccagaaggggggcaggctggtgtactggggtcagcatctgcatgagacacatgaattattattgagaagaaaagatgaagctacaaagaaatgaactgagaccacaagaaatgacattgtattaatgtattcggtatgccgactggcataagatggtacttacccctggaacgtgtcgctgttgataggtagtgaaatgtcaagaaacatgcatcgagatccttgagcgttggtccagtagggattctatatatagggtacctgcaattgtaaggcccaggatgaaaccaacatgtagaatcatagcaatacttcatttccagtattgctcttctacacaagtttattaactgatatttaggccctgctcggcttagctagctgcggtagtgcagccacagctagcaccaccgagcaagaccttagcttagtgagtgcccttttgtatcagctgatacaccagcacaaaagcggggtatgcatcctctgtttgggccagcacagaaagtgttatgaatctggctattgcaaaatcagcattctatttcattcaaatatataggagaagtagatcgagcactaatatggggctaaatcttgtgaaaatattgatggtgctaataaaacaaaaaggtcagcttggtgcagtttacacaaggtatatgattgtctgcacatactataatgatataatgtggaaattatccttcaaaagaatacaaaatctctaaagcataccaagaccacagatgctactgataaaatgacgctgtaaattatatgaatctgaagtataagagatataccatgcaacagacatccagctagttggcagaagatcacagcttctgattgacattaactccggaaatttacttgcaagaattgatacctgatgggacatttataataagcataaaagcagtacatacatatggcaaattttcttttgtcaaatgagggaggggcccttgccttgtctgtcaaaggttctctaccataaggaggatccttctcaagatactcgaataatggacgagtagatggaaaatgcgattcactgtcctccctttgaaagccaccattctccaaacctcttaattggtcagcatcagtcccactgctactttcgctgctagtatccatagattcctcatcactttcctcccaaggatgccttaagtaagcgagaaaattaactaagagaagttctggactatgaaaatcgcagaagaaaaaaaatgataaatccacactggaatgtgtaccaatgctctcttcgtcatttttttcatctccatataactctttgatagtgtctttatttggaacaatgttatacagcagttatcaccaccagcgtttcttttgtttttttccttgaatgcaggtttacagttctacaagttgtagtaagattcagattttgtactggttctaacaaatactacgcaaatcaatcaataatactgacagtgtggtagctatagttcccccacaatccaacaagaaaactggcaaacaactggaacttcagatactaatcaatagacataattgaaaataatgtattgttgatagagtatacaccagtgacagctcaaaatcacacaggtaaataaaaactaagtttcttggaataactacggtagcctacaaacatatgactgtcaactcaatgctgattgtagtcaaacatataatcctgtagagagaattacaaattaacaagccactggtgattattaggcaatgacgaaagtccttaactagttcatttctattctagcagatgtaataagataagatcctgatgaccacaattacctcaatgaggaaaacaatctctaaacaaaagacaaaattgtgtgaactcaagaggaaatattttggttgagcaattcaaataatgaacagaaaaggtggcagcaagcagccatgcctacaggctacagctagcaatcacatttctctacaaggatattcaaagcactagctttctgtacgcaaatgagttgtgacttgcatccccaacacaaaagaagaaccaatagacttgcatagtcaaaggaaggcaaaataataataatgaatccataagtacatcctctcaactctcagttctattggttgtttaaccaaatcaaaaccttttttttctttagcagtcccatattaaataaccagagacagaagaatgataaaaaaaaaagaacctccagtgcttactgcactagcttactttgcagcttttataattcctggcaatgcacaaagcagaatggagaaaaataagtaatctaagggccaagagaaactagaataaatttctacctgattcttgttgaatgctttgatgggtctgcatagagttgtatggcagagagatacggcacataatactgtatgacggaatctttgccatttaacacaacggggacgccggccccataaaaactccactcattgaaagcttcccagagatctccaaggcagaaatatggtgatgaattcatagcatcaccactcctccaccctctcatgcttgtctgcacaacagtacataatccttcagtatgaccaaactaaggcagaaattgacaaccatcattgatgtgtttttctttttcatattttttatagcaatgtaacagcattttgtcctcataacaccaactatgcctctcccaaaaccataagtggcaaactgaatacaacaaataggctggttattttggtaacatgaatcaccacaattgagagctcaacctgatcccttagaatctgattcagaagggttgcccatcttttgtataatatgacaaaaactgaaattttgcccttacagttgttaccagtttccagcaaatttgttctacaaaaagtcacccaagacaagcacatttctacagtgttgaaagctccagaaatgatgtatcatcaataaataatgtggggttacaatgcaccaccgatttaccattatgataacagtacaagaaccttacatatctgaagcaggtgaataacataaccaaactatcttaaattaaccgtacgttctctcaactttacttgaaactaggtaaagatagtcgagaactatctttgtaaccacgattcacaaactttccccaatcataacgaaataaaatacagccgaaccgatgggcgaaaatttaacaatccgaacctactctgctagaactgattatcgaaacatctcctaatgcagtaaaattaaacgggcatcgcactgttccagtccgcgaccatttttttcgccaatgactgagaaaaaaaaaagtcagaggagagcctctcaccttgggcaagtactggacgggcacggatggcgtagtggagctgaggaacctctccagattccccgccgcctcctcctccgccgcccgcgctggctccggcgccgattccgccgccggcggcctcttcacgtccgcggaggacggcaacggcgacaccgacggctttgactgaacaaccgcgtccacccgcctctctacctccttctgcctcgccgcctccgccggtgcgggaggcggcggcggcggcgacggcgacggcagcggcttctgcctcgccgccctgggcgccgtcgccggcgagggggagagcgaaggcggccgttgcccctgcagcagctgctgctgttgcagcagcagcatctgctggcggcggacgtgaggcgggctgtagaaccggtcgctcagcatgtagcctccacgagtcgacgacgactgcgacgaggacgacgtcgtcgaggaggtggacgacgacgacgaggacgccgcggcggcgccagacgggccgaccatggcggcggcgggtgggggggctaaggttttggggggatctgaaccggaagtgggggggaggcggcggcgaggcggcgcgggggcggaggaattaggaaagggagggaggggaggtgaggcgaggtttgttttgccgttgggttaattaaattaattaatcactcgcttaattactccggggcttggggtttctttcctttgctagtcttgacctcacgacactctgctagaatgctagatgcaccaaacaccactcgagtgataaaaaaaaaatcttcctctctatgacggatcacgttggagttcttttcttttttgccttttttggtacgatatattcctggcagaaatgatgtcttgttttactgatatcctctttgcttcgtcccacagctattcctttgtctttctgttttcggctaggctttttccctagcattccctcccttttagattataagatattttaactttagttaaagttaaactgcttcaagtttgatcaaacttatagaaaaaatgtaacattttcaatccaagataaatttattataaaaatatatttaattattaatttaataaaactaatttggtaatatagatattattatatttatctataaacttagttaaacttgaagcagtttgactttgatcaaaatcaaaacattttataacctgaaacggagagagtaacttctttaacgcatactccctctattacacttctgaaaataaatctatatgtatgtcgagatttatcttcataaattctttttgatacagaaagagtattttttaaaaaaaaatagacagagagtttttttaaaaaaaataaggaacacaggaggggagaataaaaaaacaaaacaatccgagattacaccaacataattcaattcttgactacatcttatctctctcattcaatctaaacaacgaagaacgaagtctctcttaagaagcacaaattgcacatgtagatttgtcttgaaaagtaccataataaaatcataggcttactaggtactataattttattcgatgtaaactggtagtcagagtttcaatcctaaacataagtctaagtatataccgaggatgaagtttctcatgtttaccatgcatagttctaccacctactaatttgctgggatgtagaagcgcaatagaatatatagtttgtcattgtgccaaggagaagctaccacatggttaagatataatgcagaaccatgttacatgtgttttctctaggttttggaaggtcatacaatatgattgtgtttatgatcttacaatatatgtgccaacttgttgttttactcaaaaatatttcatctgctcacaatctctatgtatgttgagtgagatgtgcatccttctcgagtttaatttatcactgtatccttgtggccattaaacaaatcaacatcatttaacatgtccacgttgtttcttattctgcttttctagagagagagtgtttttttttctttgacctaccatggtaaatcctagcctgtataaactggaaatagtattatcttagataaaaaaagagtgggactagtgaagtgggcgtagcgcaactgattaagtttttatcttgtggtgaaatttgtccacctaaatttaaattttacacttagcataggttcacgtattaattattttttcaatggaggtaggcgggtaggatgtgcttataggagtaaatgaatgaggctaaagagtacagttcccatcgattcacgtcttaaattttgttagctatatgcctagtcaaagtaactaaaatgatggatatatagttaattcaagtgtcggcatttttagataaccaagcatgagtaaataatagtgtcgataaaaaaaacaaaaagataagactcctactacatcctagtcatacaatatggttacattactatatatctgccatccatgcactatgtgccaatttgatgttttgctaaaaaattaatcaaagtaattacaatctacttgcattgcattccctgtcgaagggtgatcgataagggctgaattagatccttgtggacttctaaaaaatccacacagaccattagcatatctttgatctaccacttcaaaatatacttaaatgcaaacaagcgttggtaagatgttgacaagatatcaatgagcatgttaagtacagctcggatccattgacacacatctttaaattcactatgcctggtcaaagcagctatggaacgatgcgtggtcaagcaagtattaagcatttcgtgttaaattaaacaaacaaaaatatataactctttgttgatcacaaatctcccaaataaaataaaagaaaaagaaatgaaaaatggcaccgtactagatactcgtacttgaggttatccatgagaaatctaatgggtgaacgtttcctgctaaacagtgctcagttcagcccacctcctagatgtctccagcacagcacctcgagctgtctcagaaattttatacagcacatgtattacctgggtatcaaaatatacgataactttgtacaccaaaagattatatgttcgacaccaacatagaaaaagttttcctaagtagaatatctctacattaaaaggttatatatctataccctttaaagaaggtattggtgatgacagtaaatctgtcaccccatctacttacattataaattttgcagttagcccttaaacttcttaatattaaaaatatcaaatctaaatggaaagccacatacaaaattagattaagattaatattccctatagcacaaagatggggaacacacttctactttttttttaccatagtaaagcacatgcatttagctcatatatatagtactaattatgtcctaaaatataagagatttaatttgtctatgtacttatatgtgtaaaatcaaagaaaagaaaaaaatacgtgaagaaggaaagcgcagggtactcaagcaagttcgtcacatgaacgtttgcgagatagccctttcaaagagggagagcacgcacatggatattctagtctttcttaaaaaaaaacttagggaatattatgattaaggccaaaatcaaccttatgccaaattattggcaagttgacaggattgccaaattttggtaggatggaataaatatgttgtgtcaaaattccctatgcgttatcaaaatttggtaacaaactaaatgcagccatatatttgtcaattttaccaaacaatggtatcgtttaaaatggcaccaatctaaacgggcccttaaatctctatatacttgtaaaagaaaagaaagatctctctcctaaaaaagatccctacgaaaatggtggcaacaatacataatgtgtacatgcttaaatcttgttgttccacatatgagagcgagcgaatacatattcatttaggataagtgtaatgggtgaaagtttagttgtcgcgcgaaacatatctagtctattgtccggggttgtctgaggaagttttttaatataaattttatatatagaaattaagctaagcttatgacagagtgacattcttttgttttccatgttgaaatccatatctaaattaagatttatcagcgagttgtcagcgaacgcttggctacttggcccctcttggttatccggataagatgctccaattttccgactattccctccccatcccccaccacgctggagaccgcaagcaaaaaggtccacgctactacagtctccctaatctcagccgtccaccaccgatccgacggctccgctccccccgcgtgggatcttttctttctggaaggatcatgcgacgtggagaatattcgcagtgagctcctctggactctggtaagcctctcgcgctccggcccttttcagccacttacactgacaaatggggcctacgtcgcttggtccacgtggggtccacctgtcagcgagaagaaggtcgctgcgggcctgtcactagcagctcgcgcgtgttgtgtcccacgtgacagacaacgcgcggctcgcggacgggccaacgacctgctaaacggtggggcccacaggtgacgtggtgtctcgctggtaggtgggtcccacctgacccggaacagatctgggcctgtcagagccacgcgcacgagctactactgctagtgactggccacagtactggctggtgccattggtcacgtggcgtggaaattgcaaggtccacgcgactggcacgagcactttgtgctcttttccccccttttttttagagtatttgattatttatgctttattttttgaaattttcacattaatcttatgatattctttccaaatatatcaaataatagaagatattacaaccttcttgttaaaaaaaaatcagaaacccaaagaaacaaaataaagaggctctatatcttatattgtcataagagaaatgagtatacgagagcagtataacgctgaaaaacaccggcataagcaaaacgatatgaaagagtatcaatcaccatttttcattcttccaacagctaagtaaactgacattaccgaacaaatcagtacctcggattctaaagcatacacagctaattagatcatcctcaatccaacaaacaacttcttctagatctctaatgaggtagccattgaaagaaagatagagaagaaaatactccaaacaaatcttactctatagataaaaataaaatctaggatggatataaaaccctaaagactatattcgagcaaaaacctaacttagggcctgtttgggggagcttttagtctctagctgctgcagcttctcgcataatcagaagctcccctaaacagtccagtttttggtctagattctaagaatctgttgttgtagaaaccagaaaatgaactagaagctagaagctaagaaacccagtttttttagattctcataagctgccttctaaccagctgcttctcagaatcttaagttccccaaacaggcccttagaccctgtttaaataggactaaaacttttaagtcctatcacattgcatgtttggacactaattataaatattaaatgtagactattaataaaacacatccataatcttggactaattcacgagacgaatctattgagcttaattaatccatgattagcaaatgtgatgctacagtaaacattctctaattatagattaattaggcttaaaaaattgtttcgcaaattagctttcatttgtgtaattagttttgtaagtagtctatatttaatactctaaattagtgtctaaatatagagactaaagttaagtctctgaatccaaacacccccttagttgctaacggaagaaattgattctcttttcccgtggtgatgaggacgttagagacgaaggaaggagttcggaagaccctctcgctaggttgacaggggctacaagcctgagacccacaaatatgcttgcattatccttaacgaatattgcgatattttttatttatacaaaatgttagatgttttttcattgatccaaaaaaaatgtttttaattaaaggcaagactttatctttcttgaaacgaaggataatccccattattcttttttctttagagcacccatttttcatcgattttccacaaaatctcatcgattacagttgattcttcgaccctccgatttgctttagattagtgctgaatattatgatttgagtatgtgtggtttgcgatccgcgctagctacctgcaatctatcatcgatgtattattgatcgagagcagataatcgctcaaacatcaaatgagagagaaagaggcccctaaaactaacactacagacctatatgtgcacatcttttctagctaggtaatgtgttaattaagtgtaattattagagatgactaacaaagttaattacacaccacttacatcccacttacgtaacacttacatatgtaattttaggacttacattataaatacactaaatttacatactccctccgtccaaaaaaaaaagacaaaccctgaatttccgtgtccaactttgactgtccgtcttatatgaaattgttttataattcgtattttcatgttgttagatgataaaacatgattaatattttatgcgtgacttgtctttttaatttttttcataattttttcaaataagacggacggtcaaacgttagacacggaaatcaggatttgtcttttttaggacggagggagtatgtaatttatggacttacaatgtaaatacacgctgactatttttttgctgaaaaatatggcgccataaatatagctactcccttttgaaatccgatagtcatttaggggttgtttgggctatttgggcctttctttgtgctaataccccagcccagatgaaagtttcagccttgcactattgggctcaactgcatatggcacagtccaatcggctaaacttcagttatttcacgcgcaaaaatttgacaaagcctgatgctccatttcaattacagaaataaatatggtttcattccagttggcatcctccttttcttgtggctatagtttccattggctatagcctgggtgtggagattatgggtacgccatacccacacggcacggttatccgattagttataggggataacctatatctatggaatatgtaacgaatcatgacttgtgtattatgtttccttgtatatattatagaacggcctaaaatcatagtttgataatattgtaaattagatttaggaaaccgataccgtattggttgggttggttaaggtttttatcttgtaatcctgccccccatcctatataaggtgggcaggaggtcctctaggggacatgagcacatatgatcgtcagatctatactacacccggaggattcaaatccccaaacaggagtagggtattacctctcattgagagggtctgaacctgtctaaatccttgtcttcgcatctatccacttttaggtctcgtgcgctaaccccttttattattgccgaattcttgtttcaacagttggcgcgccaggtaggggttcgccaagtttccggcaacgagtacgatggaatcaacttcatgagtcatcggcttcgtcttcgcttcgggatttttacttcctcgctgccgataacttgaacatgctctatctctctgacttggattcaaaccggtcggaagagattcaatctatagaagagaacaaacactcaaccatgtcaggagattcagatcagccgtgttgatcgcatgcatctactgatcactgccacatatgcatctatgcatggctgcctacgagaccatctaatcagaaggagttcgtctaactaccaggttgattcttcccgagtcagcaaggtcgagcaaagcatcaggatattaatccacgaaccagatcagatcatcgagtctgttggctccaatctttgacatggatcggtttgttattcttgttcaatttaattagattaatctccaattatgatttgctcttctggtgttttcctgcaggtcggcttagatcaagacggagccgtttgcagcgccctcgtacatagaggttttatccatgagcgatccaaatactggagcagcgccgacggacatcttgtggccaccacgggcacatgggagcagtcgcctacggcttacccggaaaaaatacatccatgaattgatccaactgataatgcattactaagcatcacgcttctataaggaaatattaatttccgaattctaactagattttctatctattttcatgcatgtatctctggagctaccatgtcacattgtggcagttggattttcggagttgtgatctccactgccaaccggtgtcatttcatcgtagaccgctttcgtcgtcgccgaccggtttcttcatcaccatggttggttgattccaccgctgttgcagatggcgacatcattttcaccaccggccgcctacgtcgccgtcgacgggtgtcctcgcctatacggttggttggtcacaccaccgttcataggcgtccatgtcttcaccgaccggcttgccttcgccgccgctgaccggtgtctctgcctacacgactggcctattatgctgccgttgttgggcatctatcgttttcaccgaccggccgcctcgtccaccgccaactggtgttttcgcctgcacggctggcctattacaccgccgttgttgggcgtctacgtctttaccgaccggccgtttcgtctgctgccgactagtgtctctgcctgcatggctagctattatgtggtcgttgatgggcgtctacatcttcactgaccggccgcctcatctgccgccgactggtgtctccgcctacacggctagcctattatgccaccgttgttgggcgtctatgacttcaccgccggcttgcctccgtcgccgccgactggtgtctccgcctacacggctggccgattatgctaccattgttgggcgtctacgacttcactgccggcttgcctccgtcgctgccgactggtgtctccgcctacacggctggcctcccgttgttgggcgtctacgactttaccgccggcttgcctccgtcgccgccgactggtgacctcgcctatacggttggttggtcacaccaccgttgttgggcatctacaccttcacggaccggcttgccttcgccgccgccgactggtgtctccgcctacacggctggtctattatgccgccattgttgggcatttatttacctacaccgtcggtcgcctcagctgcttacacggttggtgttttcatcaccattgatagactacttcgttcctatatcgatcacctttatcgtcaccgagggaaatatcaaaaagctaagtcatcattattttattttatttatatgatattgtccttttcctctgcctcaatacatcaacttgctcgccgttgactagtgagtcgggggctacagatgttatatcatatttttcaacatttttcataatgtctatcttgattgcttgcgacataatctaagtacaaaagtgcctatcgagttatggagttctatcttcctatgctttccgtttggtttgtcgatacatagttgcctttgggccgattcctagcacccgggggctcgttggatggaccgagtaatgcaaggtgctaagttcggaataaatcaaaagcatagagataagataaatttattttctgctcttaacaattgcaaaagtactcgagtagtaaactctgatccatgaaactttgttccattaatgacgaactcatgtcactcgtatgcatgtttgggaagtgcctaggctgactcctggtgcttgggggctatgactagtcgggcagagtgttcaaacgtaaggagtcatccgctcggggaaatcaaaattgacaagaggagaaatacatatttataaacattttaaaatacttgaatttttctcaagtattgtatttacatcagatactactcatcctatatgtttgttctgcaggatccagatccagatatgcacaatagggattcatggctttaagcttatctcctacgctttaggaatggatcagtcagaacatcaccgccggcttgccttcgccgtcgccgactggtgtctccgccaacatggctggcctattatgccgctgttgttaggtgtccacgccttcactgaccggttgcctcgtccgtcgccggctggtgttttcgcctatacggttggttggtcacaccaccgttgttgggcgtctacgtcttcaccgactggcttgcctttgccaccatcgactggtgtctccgcctgcatggctggcctatcatgccgctgttgttgggcgtctacaccttcaccgaccggccgcctcgtccgccgccgactggtgttttcgatatacggttggttggtcacaccaccgttgttaggcgtctatgtcttcaccgccggtttgccttcgccgccgccgactggtgtctccgcctacacagttggcctattatgccgccgttgatgggcatctacatcttcaccgccggctcgcctctgtcgtcgccgactcgtgtttccaccaacacagttggttggtcacaccaccgttgttgggcgtctacgtcttcaccgaccggcttgccttcgccgccgttgattggtgtctccgcctgcacagctggcctattatgccgccgttgttggacgtctacatcttcctcgaccagccgtctcgtatgacgccaactggtgctatcgtcttcacggctggccacgtcgccgcaaccgctaataggcgtcatcatcttcaacgcaagctgtctacgtctgctgccgactggtttctacatttccgtggctgcatgattctgccagtgttgattggccttatcgtcttccccgccggtcgtctcgtctgctgctgactagtgccctcgcctctacggctggtttataccgctaccactactaatggacgtcatcgtcttcattgctggccgccttgtctgatgccgactggcttgttcgcctccacggctgcatgtcttcgtcatcattgactggcgtcaacgtaatcaccggcttgcctttgtcgccgctcatggtgtcttcactttcacggctggcctattttgccgccgttcaaggacgtcttcgttttcgtcatcattctacttcttccatcgccgactggttatatcgccgctggctggtgtttttatcttcacaactacgcgtcttcgctaccggtttgcttctgttgctgccgactcatgttcacttcatcacggctatgcaactttgtcgccatggtggagcgacttcatcttcattgtcttcggtaccggcaaactctattgcccctactttgcaaactttgctacttcaccaaccacaacgcttacaagagcctcgacatctcggcattcactaccaaatttgacgtcatgctaatctactacaagtggttcttcaattttcaagacttctactcggacatcttcaacacatattttcactcaagcaatggctactcgacgacaagaagctacagttctcgactctatgttcagttgtttcccaactaaccaaagagtcgggggctatacaaatacaatactctcaaaattcaacaagcagaagcaatcaattatcagccaacgagtcaactccaagagtcattatcttcgtctttacttcggagcagaagttctacttcagcaacttcaattatttcaccggcaattttggcttttccatgccgccacaatctactccaaatttctcaagtatcaagtttgagatttaatctacatgtccaggagtttagagttatcaaccaatcagcttagtttcgacgagttggacaacaatatttatttaccttcgagtgaagcaccttctacggctataacaataagttctacaatcatctttataaatcaaggggcgtcgcatcagtcttcgttatgcacacgctcgcatcaaggaaactactcaagcttcgatattattgtcactcacatcataaccgacacctctacttcatcggccctgacatctccgtcgttgctaaggggtgactatgtcttcgccttcggtttgcttctgtcatgaccgactttcatcgccgacttgttattttgtcttcacggttggcctactacacaactgccaatgggagacatcgtcattatcatcggctgcgacactgctattgactggattaatgatatcatcatcttcatcaacatcctaccatgcctcttcggctatgcctactctgctgttgttgatgggctacttcatcatcatacccggttatctctgttgctgccaattgtcattatcgccgattgcatttgtcgtcaccgattgttttcttcttttgcatgattgatggatttcgccattgctattgatgagcgtctacgtctttaccaccggcttgcctccgccgccatccatggtgtcttcgctttcacggttggcttattatgcctctactgatgggcgtcttcgtcttcttcaccgggcacctcgtctgttattgactgattattttgctgccatggctacacaactctgtcgccattgctgggcgccttcatcttcactgctagttgatctgactgctgccgactggtttcttcgcttccatgccgattgcatcagctatcaccaatggacaattttaactactccaaaaggataagctatatgctcaagggcttacgagctcaagcacaagggtcataccttcaagttggattttgttctagatacagacaacatgcactcgtagtcctgagattattttctatgctcgaagactagaccaatcattattccccgtaagggctatcaaccgaatacttgcgccagtcgggattcaatttttatatctattttggagtatcccataagggataatcactagatcagaagctattcatgtgagctacacttggtctatatcacccggaagatttattactcgggagcatgttacatgcgtcatcctttaaagggtgtcgaaggcatattttttggcctaggcctaatatgtctgcagcccatattttcaggtgtggcctgtcacgttcgtttagggacttaggcactttttgcttaggccaaaatgcacgtgatcaagtgtccaataccttaaaatccttttataccgcagttactcaactttttaggagttgatacaatgcatcttaaaaggtgtcaaatagtaaagttttatatagctgccccgctgacttttttatataagtcatggcgttgtttgggtttaaaaagcaattgattagatacaatatcgttgtttttttgccatgtaagtgtgcatttcttattgaccaatattatggcttaggctgattatatatttcggtcattttctaagcggttggtaaatcttttatgactttatttactcggatttcatactacatatgtcatatatttccaggtgtggtgaaaccacgtgtcttttagggacttaagcacaattgttaaagcaatgtgcgcatggtgtatgcccgatactttggaaatttctttattcacagcattcaagcttttttatagctgttttgctatgtgaattttcaatgatgtagtcaactttagattgcacgcatcatattttataaagcagtcggtatatcacttggatcatattattcagggattcacaagtcacttggttgactatagttatcaaaaaccacttggttggttggattatttattccttgactatatgcttagtttgttcaactgaccacatagtcgggggctacacttattaggtgcatctagtcgatgcacctgactttattttttcagccctccacagtcttctgatttggaaaaagtactcgggagatcatggcgaagatgattgaagcactcggctttggagtaatctagttcgagagaagattatcttttcgactgcgaaggtctcaggggctactgtggagactatgggtaccctatacccacacggcacggttatccgactagttataggggataacttatatctatggaatatgtaaggaatcatgacttgggtattacgtttccttgtatattatggaacggcataaagtcctggtttgataatattgtaaattagatttaggaaaccgataccgtattggttaaggtttctatcttgtaatcctgcccccatcctatataaggtgggcaggaggccctctatggggcatgagcagatatgatcgtcagatctatactacatcaagcggatttaaatccccaaacagtagtagggtattacctctcattgagatggcctgaacctgtctaaatcctcgtctccgcatccatccacttttaggtttcgtgcgctacccccttttattattgccgaattcttgtttcgacactaggcaatcacaatgtattaaaaaggtaaccttaagataattattacacttgcaaaaggaaccacgtacattatgggaaataacttcagcttagaaatgcaccttatgcttaagttctactacaagaaaaaaaattatctatctcatccatctcatgaacatgagttaagcaagtttttctatttcatgtgtgtgtctcatcttgtggttaattaggtcttagctataccatcgtgaaaattgctttaacaattagtatcaactactccgtattcatgtacccactctcaaggttaagacactgtattcattgagcttacccttaaagccgtgcgtgcgtgtgtgcgcgatcgaaaagcgccgccctcgcgcgcgcgcgacgggtcaacccgcgcgcgctcttgatccaccgccaccaccccacctacgcaatccgatcgatcgccacgaaccctagcttagccagatccaatataggagtatgagtatacagctacccatccttataaatcccgaatcccgaggccacacatcttcccatgtcagatcatgtcgaccatccatccaaaatatatatagcagcagctagcagcgatgatcgatctccatttcacacgctcgctgctgggcatggcgctcatcatgtcgccgtcgccgccgctgcgagcccccctcctcgcgtcgccgccgccatcgtggccggattgctcctgctggcgcccgccgcggcgcagcagccgcccccgctggtgcagcagttctactactactcgcccccgccgccgtcgtcgcccgtgggaggcggaggtaccggcgggggcgggccctcgccgccgaccaaccccgcgccgccggcggtgccgtgcaactgcgggacgacgacggcgccggcggcgccctcgccgccgggtgtctacaactacagcgcgcctagcggcggaggcggcggtgggggccagctcgcgttcttgtccgggtcggcgaggtcgacgtcccacctgccgggcggcggagggtggcgccatgcgcggctgcttgcttctgctgctgctcctctactactaatagtatggtggtaattgatatattagtcgcttgcattattcatgatccatatgtgtaagtgttctctgtaattttagctacaaaagtcaagatacagtcacagatggctgaggactgatcagatcgaggagttaattaattagtcaaggcacatgtatgagtaaagtcgtcgactgatatacggaatctcttttgttgcgaaatggaggactcaaacttgatcttaaagctgaatgcaagataatggtactccattattaatcaagtcataggtgacaacttctaaattcctgataagagtttgtatatttcatcggaatttggtaaacagaacacgtgagtgttgcgttttcttttattgctatagtaagtgaacgacccgataggtcggcttctaatagttaaatgcgaaaacgttcccaaagtaatgcaccaaaggccgcaacctagctgaatgcaacttaggttgccaatgagctgagctcgagcgagctcacctaccttaggctcaagctggacacaaactcaaatcaaactcgtgtaatcttcgagctttcagataagcttggttcaaactcgatcaaactcaagctccactagcaagcttggcttaggccccattctaaagtggcaggttaatgtgttgctacctactattcagagcgccaattcagctcagcccagctaagtctgcactttagaatggagtcttctaagtagaagtatgcatattttaagaatataatctcttaaaaataattaatttttagttaatcacattaataaaagagaaaagtatatatggtactaatacaagctacttccttgtgtgggtcacatacaaatgatatatttgatgttctagtttattaataaacaataaaaatcatatattgttaggcacgttaagagatcgagctcagctcgataaagttagtaggctttggtataagctcgagctcggtttttatagaactcgagcggagctcgaatccagcctagggcgagccgagctcaagtagcttgtgaacctcaagccattttaatagccctagtgcaaccaacagtaatacatcaaaggcgcgcaactatacgaatattggaaattttgaccagacgaaaagttccatgttatgggttgtgaatctgtcgaacgcttattcgggagaaagagactcattagagcaagtccgtgctagtgtgccggcctacatcagcctccgaaggctctaggccattgttttacaccgtattgacaaaagacaaacaattaataataggggcaattgcgcatctgaccctctttttttaagcctaactaccatttaactctcttttttttaacttggctcgtttgacccttctttttaaaattgaagattcaatgtgaccatattctgttaagggcatgtaacggtgttaattggagcaaaaaaataccccttctacccttggtcagttgaccctattttatcaaaagtataaataaaatattaaaaaaattggatagcataagaaaacatgcagcttgtgaataaaaaaaacagaatccacagcaatcgtcgtggccaaccaggcggcggcggcgcgcgtggaggaagacggacgccagcacgcacgcggaagaagacgaaggccggcgcgcacgctgagggaggaagcggcgccctgtgcagagctcgagctcgtcggcgtgcggagggcgggcggcggcaacacgcgagcggaggcgagaggcgcggaggacgagtggtgacggcgcgcgcgcggggagagaggcgcggaggacggcggcgagcggcggcgagcgctggagagcttgccggagtggagaaggtgtcgcgcgtcgttgccgacctgcagtctctgagaccactgccgcaccgccatcatcaacccgccgccaccagatacgcaacccgcatgccttgacgccgccggattcgcggcttgcacgcccagccgctgacggatcatccaccgccacaacccgagctctaccgccgttgctcctcctcgtcgtcatcgagccgctgctgctccttccgctcgccacagccgccgtcaccgccgctcctttctccgtgcacgtgccgtcggcaccgcggcgccatgcctctgcgcgcgcgccccgccttctcctacgccgcatgcacccagatagatggggttgggaccgaatgaatggatagggttgagttgtcaccatgggtattttggtcaatttgactagtaaatagcactattttctttttttctaaatgaaaccctaacagtgtggtgaaagtagggtcaaacggtgacttcgattttgaaaaatggggtcaaataagcaaactaaaaaaatctaggtcatattagtagttaggtttcaaaatagagtcaaataagcaattgtctcttaataatatgtggttagaagggtacgttaaggcaaatggataaaaaaagggttagcacttgaactttactttaagtttatttttgagtaaattgcattggtggcatacaaacttaacatttggatgcaatctagtacacgaatttacaaaatgcttatttcagtacacaaacttgtttaatgagtgcgaaacaaggccaaaatggcagacaatgacaaagaatttctgagttggagcctacttagaatggcatgagcatacataaggggtcatgatacacgctacatgtgcgaatagcctctacttggtaatacctccgtttctaaatatttgacaccgttgacttttttaaatatgtttgaccgttcgtgttattcaaaaaaatttaagtaattattaattcttttcctatcattttattcattgttaaatatacttatatgtatacatatagttttacatatttcacaaaagtttttaaataagacgaacggtcaaacatgtgctaaaaagacaactgtgtcaaatatttagaaacggagtatttatttttgttatttctttgttttcaattcattgcattctttagctatatttcatattatgtccgtataatcggtatctcttattatatatttggttgagcacatatatacatgtcaagatgacatcatcctgatgtgtgcctgtatgacatcctaataaacacaactaagtaggtagtaggattaactagggcatgctcatttgaaggttctcatgcaccaaataagtttgtgcatcgaaataagcgttttgcaagcttttgtgtatcgggttgcacccacttcacaagtttctgtactgtcagtgcaatttacacttcattttttaccctaagctacagaacctatacatgtttgtcattggttttgtttgaaatggagatgattttcctatttcatacttttatgttcctgatgcaatgtcatttaatttggttcacaaagttcatgctagcaaaaaaatcactatcatgtcaatcaaaaccaccatacaaatgttctttagaaaatatgtatccgattttgaaagacatgggtgaaataactagttttgtatttgaggataaaaaatggactttcacataaacaaaaaaggtaaaatttataggttgattgtgttaactaggtgacgtttcaaacagccattgtccccctatattaatggcaggggtcaaaacccttcaattggactcaaatataacataaaatcaactcaaatccttttcaaaagtcacaaactgacttggaccagaagttcctatactgaagaagcgtgcgctttctatctgtttgattaaaataaggccatatttgtttaggcttataagccaaaaagtctctaaacaaacaatcagttttttcgtttggcttttttgaagccataagccactctaacactaagggcctctttgtttaagcttataagccaacttataagtcgaaaagtctaagcctaaacaaacaagcagcttttccgtttggctttttttgaagccataagccactctaacactattaagccaaaagctaggttggagaagcttttttggcttatgtgaggtagatgtatgactcaactactaaacttaggacattaaatccaccggcttataaatcatataagccaataagctgacttaaaagtctaggccaataagcctaagcctaaacaaagagggcctaagccaaaagctaggttataaaagcatttttttttacttatgtgaggtagatctatgacttcaccactaaacttaaaacattaaatccatcgacttaatgttcagataagccattgattgaaaagtctaaaccaataagcctaagtctaaacaaagagtacctaaatcagccaaaaggtccgattcataaccggaagtttcagaatggaactattgtgtccaaaaggtctgatttttcagcaaatcaaattccgtctcgaactatgtccatatacctaatatatattccgattgatatagccacattgcacagtgccaaacgttggtgtaaataatgcgcttaatgaatatttggtgcctttttctgtggaagaaatgatcgggacgattgaatatgtgtatgcacaaagagaaacagagcatgctcactatgggttaattgggtatatcagaatccaattgtgcaactgttggttatatcttagaggagaaaaaagaattacaatatcctatttggcgagtctgttagtaagaggtaagctctcaactagcttgatatttaatcatgttttagagagggtaaaatctaaatcgagagagctctctatttagttttaatgggagacaccacatacatgtcttctttgctacacatgcatgccatgtttgctattatgtcatatatattttttccttcttataaaaaaatttctcttacattacttatctgatctacaatccaattacatcattgagttcgttacaattaaatctttataacaagatcttacatgattatattatgataaaaaatatttatgtttataattacttttattatatttttaagttacttttattacgtattgactccgatgttgggctcaactacaaaggtctgataaggacataatgctaatgaataatgcatgccataaacttgagtcaacggtcatgcaaccctttgccaacatgggtgaagattcacaaataggatccaataattatgttttctttatcttgtgttggttttcattagcgtgtgc

SEQ ID NO: 26917 - DNA, 25241 bp, Oryza sativa
ttagcactcctattgcacctcattttaaattatcagttttacaatgtgctagtactgatgaggatgtagaatacatgtctagagttccatattctagtgctgttggttctttgatgtatgccatggtttgctccctgccagatttatctcatgctatgagtttggttagtagatacatggctaatcctggtaaagaacattggaaagctattcagtggattttcaggtacctcagaggcacagctgatgcttgcttgaagtttggcaggactgataaggggcttgttggatatgtggattcccattggtagttgtgctatgagttggaaggcaacattgcagcctgttgttgcccagtctaccactgaagcagaatacatggctattgctgaagcatgaaaagaatcagtttggctgaaaggattgtttgctgagctttgtggagttgattcttgcattaacttgttttgtgacagtcaaagtgctatatgcctcaccaaagatcagatgtttcatgagaggacaaagcacattgatatcaagtaccattatgttcgcgatgtagtcgcgcaaggtaagctaaaggtatgcaagataagtactcatgataatcctgctgatatgatgacaaagcctgttcctgttgctaaggttgagctttgctcaagcttagttggtatagtggtttagcctgagaggctatttggcgccgaaagtgtttttttttgtctttgttgtgttcagggtgaaggattgattcatgctacaagaagggatttgtctcaaggtggagtctgttgagttgtgatccaaattcatttgcacttaatatcttcactatatctgggctgtgcgcctggggacgcccggaggggcgggggcagagcccccgcggtacggatcatcatcccttttagggttccactatatatatacctcttgtaagcccccgtgcggcgatgtaaccttacctcagatatagtgaagatattttgctggctggcgcctgtggttttttctctcctgttttgggagggttttccacgttaaatctcgtgtcttttgtgattgatctattgttctttatcgtttgttcgcctatcgtttcctaacagggagtggatctatgtcagaacctggtctcgcacagcttcacagtggaggtggtggtgcgagctgaataggcaaaaccagcccgtcgtccttgccggcgttgtccactggctaatggatgcctcccgcagtagccactacatcctgacgtacgacattgcgacggcggaggaggggaagatggatctccccaccgattattgtggttgcaaggaaatacggttgggatcgtcgccggaggggaggctgaggctgctcgtccttcatcagcacctctcgttgtccgtgtggctgttctccggctccggctccggctggacaaggcacatcatgatcgagacggagagtaggctacggtgtgtgtacccgtcgtggagcgtggacttggagttgccgtggtcgtgcaagtgggagaggagcgacacggtgttgctgcgtcccatggactactccgggtccgggtggacaagatgcccactagggttgctggtcttggacgtcaccatgggggaaatgcgtactgttaataatcggagcgaccaacttgttctctacgcagtcgatctcccctctcgcatctcagcaatgaaaacctactagctctttttttcttttcgagtatacatgcatgtcggacacaccctcatatacttgcaactagcgagtattatcttctcatgcatcaaataataatccagatacatgattaattaaagcatttatacttgaaagacatagccccacgacatgtttctgtgggctggtataccaccacggtaccccggaaaggtactgtaacaggacccttcacataaccctctctaaccaatcgcaccacacctcaggtttcgcccccactcctcaaccagacaccccatggacagcccccctctcgtgccatggtgaattcggcggccgatcaaccagacaccccagccgacccaactccatcacgcccaccctagcctgggtacgtcagctagaggaaagatccactacaagcccagttgttgcccacgctggctcgtggtatgcatggtaattcttctagggtttcccgtgaaccagtccttaattgccatgggtacgactagcaaaaccattcacacacagcccaccattaagccatattttagttgaataattacgaccaataaaacatggccagatgtctcgagctcgtatagctcaacaatatactaaagtaaaataatgtaattatcccattatgtgagctagtggtaattaagcacggctaagcatatcatgattctagcaagatcaacagaagtgacacaaggtagttagattatcacccaaagtttcacaaatgacggaccacaactaagtataactaagtatagcacaagcgagcagaaaggtaatcccataatccagtgtagttagtaaaacatgcaatttatttgtaaacggtaaaaaaattgtaaattaggttcaacatgctcaaggggaatgtgtgagtgccttggttcttcaatcaatctttaaactcttttccttgtgatcgcgatcttctgaaacgatggattttatgcgccggcacgcaaaatgaggaaaaatcctaataaaaatcaaatggacagtacatgaaaagtaaacaaacatgtagatcttaattttagatgaattttgcaagttgaatggctcaatttggagttgtatgaattagttatgaattttagaagttttgagccatttaaatcaatttatgaaattaatatcgatttattgcgcaatttattatttattttctcaaagaaaaagttaagcgctgatgtcatcaaaggagaccagcgcctacaggtgggccccacatgtcagtggcacaagggaggcggcccaccatggaccgggatcaccgaggtggtccaccgccgacccatatcagcctaagccgaccaggcggccacgtggtggcgtggccgaggcacgacgacgcccgagactggcctggccgaccatggtgcagcggcggcgcggggccaccggtggccacagccgacggcgccaaacggcggtgagcggccggaagacagtggcactcacgggtgacaacggctcaccatatgaggcggcggccggcaaggaagggggaggggagaatgagaggagggaggaggggccgagggagcgggatgccatggggaatgtggtagaggggttacgatgagcaagaggacgcttgcagcggcgtgaatcgctggccggaggcgagaaagagcggcggatgctcaactcaagcaaacgagagggagttccggtagcgattggagccggcggagcggtggccgaggggctgcgcggtacagcagagctgatggaggtggtgcgcggcttgaggtggtaagggacggcggcaagaggcgactagaggcggcaggcggtggtggagctcggatcggcggtggaagcggcgctccggtggtggtagagaagaaaagagcggtggccggggtgcggcaaggcgcggtgaagccaatggtggtggtggcacagcgcagcggtggctagagtggcgagaagcggcggccggagcactccggcgagtggcggggagagaaagcaacacggggagctcggacggaaagggaaaaaaatggagagggaggtgcggggatggtttttattggctcgggacagcgggatcgtgccaggggcgaagccaggataaatgatcgccggggtcattactaaccagggtctatgttttcaaccaaaacggactgaaaacaacgtaattttgatgttttgacttaggatgaaagtagattctgagagaaattttgaatagttttcaagaattcaaatttgaaatggtaaaattgaatcaattaataaaaaaaatcaaattttggttaaaaaaagtcatatcgctatgtttggaatccaatattaaatcaaagaggtggaccccgaatctgggtgtgttcggaccgctacgggttctgaacccttccctcccagcacgcaaaatgaaacgaggattaacgcataattaattaattattagcttatagaaaatttgaaagtagattaatatggtttttaaagccattttcctatagaaattattttgctagggaattcaagaagttgtaggtcgctggttttatgtatggtctcaaatctcaaaagctcaaatgtatatgcatattcagctgacgaataatcgtaagtgctagctaattttcttttcgctgctgctagtgtcgtttcaagttgtcaattgggatttaacacagcaatcaacaattaatgttaccggggtctaacatttatttttaccggggtcatagctagtaagataaagaggatacgagagattaaaagaaaatcatcgggtcgactaaccccggtaaatgactgtagctttgccccgggatcgtgcccggggagaggtggcacacgtcagggaagtgagatggcagcgcgggctcgtggcggggtcaaaacggcaccaatttttgggggaaaccgggggaagagatggaggagtgagtggtaggcgcatctgaacgtaggcacgaaggcacgatcaggcagggcgtgttgtgcttgggccaagacaaacttcatgtcgttggtcgatcgggccgttgggctgcggtcattttgaccaactataggttgctgcattctctagccaattgtatttatttagtcatgtatgcatttgtttaaaacaagaaaagcaagcgaataaaaggttgttggctgtgagagcctagctagccaccaaaagcctcgtgtattattgttcttgtacactctgtttatgtgtgtttagattagtgtgtttgagtgaaacaccaaacaatgagctaagggatttggctcccaacaagatccagggatctacttccaaaatcgaatacttccatgatcaaaaagtcccaagttaagaggaaacaacgttcaacatgatcaggtgttcgaaaaaaaatagaaaacaatcggtatgcaaaaagtattaggtagaacggaagcagagtttagagtttatcttggttgctcgatctacttcgtttgtaccatgcaaacaatgcacggaccatgcgtaagctgtgaaaacccagctagacacccatattgatctacaaaagcacagcatcacgatgtgtgatggacgaagagaagagaccggctaaactagaacttccacgaaggataaacgggcactgcagagacgggcgacggatagaaacactctatatttattaagtagataaaggtttattctttatgattgacacatgggccccaataatatggaggtttccatcgtgatatgccacgtcagcacatgaagtgggttaattaaagtctgtttggatcgacaaatttttcttggatccccctattacatggtcctatgagactatttatagcccctattacaggttcttactactagggttttggttatataggggaatttatatggttacccttatgaaagggatatttacatgggtacatagtataatagaggttcatggactcctgatgggccgttaggcgatcgtcggcccaatggcccctaggcttgatgggccggaaaaggcttcttcggccctcgtgggagggggggttcgccccgactaactttgacgtcttgggcttagatccccactcctcgcatagccttcggcatattttggtcgtagggcctcatgccataccgctaacaagcccctcacgggcaagggtgaatttggagcttcggccgagaccgtgcaaaccatgtggtatgtggtatggtatgtggcgccccctttcgaccgatgctcctgccgaaacctacattgttcctgcaaataaagtttgttgtctgtgcggctggtattgatttgccgctcttcgcctcctgcggatggtgatatatatttattattattatttttttatttttaccgggccgaaagaaatagtaatgggccttccctttgtgggctttttactgtgcagctcggtcgatgggaatttaccgtttcgcctaccctcgcaacacgtggcgctttatcactgctgggtagacgaaccgtcgccgtgttgggctatatatgctcccccgttatcttgtcaccgccaggcttgccactttcaccgctcgcgctctcttcctccgttcttgctctcacggcaccccttggccctttagatttctcgctcactccccttgttcgccactacacacacccttcgctacttcacacatccttcgtcatggctccccgcaagcctgacccctcttcggtgaaagggcccgaccccgaccggattgtcgacgacaccaccgcctatttagggatttctctcatagacgacggcgagctggcaaagttggtcagctctggggcgttagtcgagggacaggctttcgccccggggaaagccgttgtaccgaagcccgttgataaccggacagtgagtgttcgccgtattttttgagacggggctccggtttccgtgcaacgcgttgttgccggagattcttcgccttttccaggtggagctcccgcagttgagcccatcggcgctggtccggatcgctatcttcaactgggcgtgccggacatccgggtttgagccaagcgccgaactcttcggcgccatattcttctccaccgtgaattcgaagacggtgattaccccagctagaacgaagaagacagtgttcgggagcgtaaactttaatgttcgccccgagcggtccgatttctggccggtgaacgccgccatgccgaagtgggaccgccattggatggcgaggtggttttaccacaccatccccttcgaggctggttctgactccacaaaagcccttcggtgccggcgcagggcgattgcgccgaaccgaaagcccaagatcgccgtggacagcgctatggaggcgtggttcgctctactgcgtaagttctgctcccgccttagttgccgcgacttggtggaggaattctgcatgcttcgcatctttcccctctcctagtcgtgccaagtcgcagttgagcaaggcgaagaggttgatggtttgccgaagttggttctccctgatgggacgaacggtaagactgccctttcgcaatacactcctgcgctttgttatttttctttgttcgacgcttaatgtggctacaccctttatttttgtagtgttgaccctcgaccaggctgacaccgaagcccgtaggatgatcggcgacgtgtcggtcgtcaagtatagccagctgctaacgcgacaagcggttggccgggcgaaccgggtttacaacggcgaattgcctccccgggcgaacccccacaaggccgacgacgatgcaggaccttcgcgaaagcgaacgcgcgaacaagtaaagcttgcgccttggaagcgaagggttcctgtttcgtccgattccgacgccgacgacgaggacaacgtcgaagatcgtgacggcgaggagaaaggggaggaagaggaggaggttgaggtcttggtcgaaaaggccgcggacgagacggtcgaaaaccacgtcgacacccctggctatactcctactccaagcctgggtcacaatgagactggggtggagtcgaacagctccccccttcgtcgaaaggagttggttggggcgaaggtgctaattgcgttttcggcaggcaaggcagcgaagggaggtccggtcaaaaagatttccaagaagaaaggactcgtcgatgtcgctcgcgtcttcagcgacgacgagtcttttgacgagactccgacttctcccactggctgcagcctggacctttcgactgcccccgttctttcacttggcgttgatggagcaggtggtagcgccgccgccggggcttcagcctccgcggaacggattgtgacagctgtggtgagggtcttcggtagccctctgcgtcagccggttgtttcgccgctagtcaaggcgaaggggaagggtgcagccgtcgaaacatctacttcggagtattcccttgcggcgccccatttcgcccctggcgatttcgagacccgggcagaccttattccctttgtggagggagtaagcaatcttgtcttacctgctagcaccccgagcctattcaccgaactgaatgagttcgatgaggggtgttctgctattaaaagcttggcggttcgggtatgcttttcctctattcttggttttcctcttcttttttacatgtcccataattaacatttgctctcttcgccgttcctattttgcatccagattcttgcagctcactgttcgacagagcgaaccatgcgggctcgtcttgacagatttaagaaccgtcttcgggccaaggatgacgaaataggccgcaagaacttggagatggaggccctcgccaacaccctgaaagaggcgaaagccgaaaacaagcggctccaatccgagttggagaaaggaagagaggttatggccgaggtcgatcgcctcaaggccgaactggagaaagggagagaagccatagctgaggttgatcgcctccaggccgaattaaggaaagaaaaggctcattccgccgtgctgatggattattataaccttactgagccgaagatggaggctcttcgcctggaggtcagcaaggccgaagcgagcgctgtggaggagtcgcagcagttttcgcgggagatggcgaaaactaccgaatctgcaagaacggcgtgccaaacgcttcgcctcgcccttactgacatgggtgcaaaagtgcgaggggtctctgctgaagatgcctcggccttcgacttcttcgagtggacccagcaggctggtggttcggtttcggactgcgccactgcatacggcgattgctatgcacgtgtatcagcggcctttactatgggtctcctgcaacagttcggctgtgagcacgtcgccgagttccctaactatgtgaaggaagggggactgggagattagcgcgcaggacatttcgcccgcacatcgtgcatggcggaaacagttctggtagaaggacagccggtccaccgccaaggcacgccttttggagcaactagcgaaggcagaggcggcagacttttgcgaagaagaggacgcggcggctgaagggggtggaggtgatgcccaggatcacccagaggtgtgaggccctccgccctttccttagatttttgtagttttccttctttttgtgttcgccaggagtggcgaacgatgtgtattcggctagctgccgctaaccctccttattgtagccgaaaaagaggcccttggatattttgaatatatatgactcactcttagccactttttgatggtcgaagtctttggcgtatttatgaatacgcccatttcacattatgcaatacttttttcttttttcgcctattcttactatgcaattcgccttttgccctttttgcactgtctactagggtgttcgccgaaagttgtgtattcggcccccttctgggagtttgcgaaaccaaaacgagaaatttgtggcattaaaggatttgccaaaggtgcgatgcccatttcggcctgtttatcatgaaatggtgataaacggacgcagctataaggtttttaaggttgccgggtggcttcgggcacaccctgggtgaaccttagaagactatgatcttgttcattcaagacatttggaggacatggctcgcttttggcaaaatgtcacatcctgatttttgtttcaggatttataaattatttaataaattattattagaatttatattaaatgttcattaatttacaagtgaagttaaatgtgggaaataaaatttcctaaatataaaacatggatggatttaattttgattaaattctccatgattaattacactctctgaaattttctcagatttttcggagctcaattcttaattttttaatcatacaaagagcatttcagtaattacccacatattaaattaattattaaatggtctggttttaatattgttaaatactttgggtgtccaagtatgttcaagatttttcttggaattatttgagcataggaagtatttttaacaattcaaagatcatttcattgattaatttaattggaaaagtaataataatcctcttcctagtcttgggccctttccagcccatctccctcttttgtctgcacggccgtgcagcccaagtcggcccagccgagcttcccccttctctttctttctttgctttgttttcagccagcccaagacgaaaagtctaatttgcctccctcggcactgtttatcttctacctctagcagccgaactgagaccgatttggctcggtttttctcctccaaatctgacctttccccttgtgtttttctaaaattagttgaggggaaatattcctcttatcctcctctatctttacccccaaaaatcggagctaatcgttgagtatcttatccgaatcgaactcgttttcgagtttatctccaaaaccgagtttttgattttccggatcgatttcttgcgggaggagtccgatctcttcaatccaaggctataaataggaccccctagtcctcctctttcgttttccccctctcccgtgatctcccgtgcctcgtagcgccgccgccacgtgctccaccccgccgtcgtcgccggccgagctccatccgcgtcgcgccgccgcctccgtcgtcgccgccggtggccgtcaccaccgttaggtgcgcgggagggtggagaagcccggccgctctctccccgaagccgccgaccaccgcagccccgtcgccgccgtcgaccgaagccgggccgccgctagacctcgtcgccggccgtcgtcgttcgtcgtttggttcgagggtgagtaccgttgggttcgtctcgtcgtcctctacgtgttcttgtcctccaaagtcgcagccgaccatctaatctccggcgaggtcgccatcttggttcggccattgatgaggtcatcatcatgacgtcatcatcgttttttttctttttcctgtttttctaatagattaaatcttcggaaattcataactaaatcatcgtaactcggttttgagtggttcaagttgctaaattcatctaaaatcatgatctacatgtttgtttactttatatgtactgtttatttggtttttattagtctttttctttgttttgcgtgttagcttgtcgtttccgtcgttgcgaaggttcgtgagtgcgccggaagtattcaagaagattaattgaagaccgattattgcaaggcaagtcacacagaccctaaacacaatcctttgagcatgttgatcctatatttaaattctctatttatttcaactgtgcatttattttcgaatgtcactaggtggtgtgaacttattcctttgttatggccaatttgcattgattactttattccttgataccttgggttattataacttgactagttgagctttatatattggttcagctagatattagatatgattgcttagccatgcttagaaacattagcacactattgggataacttatgactcattgtttaatgatggtttaatggtagctcacgatggttaatcgtgttatgataattaattgataactaaaacttgacaatggtgggttgtgagcacatggttttgaaggtcgtgctcatgacaattaaggaccggttcacgagctactgttgtgaaacattaaccgtaccaaccacaagccagcatgggcaacggctttaccttctgtatagcatgattcattgcggggcaccagactgagaagcggcgagaagtccgtgggggtcgctggggagtccatgcctctggttatatttatagagggggtgattatgatccaggaatggtgcactgtggtgagttgtgttgtgcaaagggtattgtcacagcctctattcgggtactttccagtatcgcgacgcatggtagacatgatgatgaggctgtgtcttgtgggtacagtggtacacctctggccagagtaaaactattcgaatagccgtgcccgcggttatgggcgggttgagcaatgtttttcgtgattagtctcacacctctcacaataattatggatgttatatctggtaataatttgcttagctcctagtttggagttagatctgtacagccgggtatggttgttcaggatggttgggcctgtgcagcatgggtgtgctgttcagtgttgattaaaatttctgattaattactccactgttttacttctcttaaatgttttgctaaatgctgcttttgcaaatgagcctatattatgccatcctttggtatccttgtgcacttgcatatttgctgtgtggcttgttgagtatgtcatatgctcattcttgcaataatcaatcaacctcagttgaagaaaaaggatccagaaggagaagacgtttggcttataccccagttgagctgcctgtgggagtggagccggagcttcgctagattttattttccgctgcagttttcttcttggtgaggactaagtgcctcttaagtaagtatttatcgttttagttaatttgatgaatctgtatattaaattgtcagtttgtgtacctcggctgatttctggacgaggattttatgcacaaataagttcggaaattactagtgaatttccgggcgtgacacaaaaccatcagaagactgatcggcaggaggtgatctcccagcgttgttacagtctagtctgtatttcgtccccttctcctcttagggttgtgtatgatattagtagtgatgacgaacctagttcgcccgatcactccttagagagagagagatagcgggggctaagatgtaatttatctgtaagccgggctataacgccattgctcctttctcttcatttgtaccattgtgatgtattcttcgacacatttttatttaaaatcaataaaggtgcgttttattttctttttgctatttttgcattgtcacttcgcgtgcttttcgttgggtcggaacgtgtcgacccctttgtatatattagcgaaataggttttgacttttcagctttcagcttccgttttcgatccgttttgttctacgttacaaaaagcactcgtgctttcctttcgatcaagtgtaacggtgttcggctaattgttctccgaaacaagctgttgcggtttcaatcgttcggcgagcaatgcttcggccgattcgtttcacccccctgcctttttcgctgatcaggcgtttgccttggggtttttccgcaaattatcaatcgcacaaacaaataaaaagaaggcagaggacacaaattttatactggttcgggcctccgtggtggataatagccctacatccagttttttttttgtcttttttcattttcctctttttttccttttttgttctcttttttttctctttttttttcttgccgaaaggcttacatagtgccgaagggcttgcatagtgtcgaagggcttacataacgatatatacatttttacaagttggcgatttgggtgccacccgttctagacatagaaacgcttgagagaggcagcgttccaggaatggtcgaactcttcgccttccagtgtcgccagtcgaaaggatcccgtcctggatttgtacttgatgaggtacggtccttcccacttcgattcaagcttgccaacggctattgggttcgcttttttccttaggacaagatgaccaggcaacaactccgtcggtcgaacttttttgttgtaagttgccgaagtgcccgtggcatacttttgcatgtgctcgagtgctttgactcttaccccctccaagagttcgagcgacaactcgcgcccctcttcgcccccagagaacgtcacccttggtgagttagcccctagctctgttggggtcattgcctcatcgccatagagaagcatgaacgggctgaacttgattggtcttgtgggggtcgtccgaagggcctagagaacagatagcatttcctctggccatttgcccttcactgccccctcaagccttttctttagtgcttctaggattttaccatttgtacgttcggccgctccgtttgactgccggtgcgcgaccgatgcgaacctgatttccaggttaagcccttcgcacatttctctgaacatgtcagagtcgaattgcttgccgttgtcagtgatgaactcttttggcactccaaaacggcaaacaatgtttttccatacaaatttctgtactgctgccgaagtgatcgcaccaaggggttcggcctcaatccatcgagagaagtattcaacggccacaattgcgaacttgtgccagttttgcgccgccgggaacggcccaataatgtccagtccccatctagcgaagagccaaattggtgcgatgggctataactcatactggggcgcggtttggcttcggccatgacgctggcaactttcgcacttcttgatttgctcaacacatactttcaacacagtgggccagtaaactccttgtctaaatactttggaggcaactgttcttgcggcttggtgcgcgccccatagcccctggtgtatttccttcgccatttcctcgccttcggtgaaagaaatacaacgaagcaacggttgaagtatcccggagcgatagagctggcccgagaccatcttatacttcgtggctctgaattgcaaacgctttgcctctgcttcgtctaccggaagccagccagtttcaaggtgcttcacaaacggggttcgccagtcgtatgggtcttcgcccaatttgacctggtagatttccaggacctccaagctgtccatgggcacgcttggtgcatacaggacctcaaaaaggatgctaggcgaatgtgggccaccacaagcggcagatttcgccagggcgtctacttcctcgttctggcctctaggtaaatgtttgaccgttatgccggtgaagcacttttccatagaccgaacggcatccaaataccttttcatcccttcttttgcctcaaaagacttgtcgacatggcccaccaccagcttggagacggttcggattagcaggcgccgaatccccaatgctttcgcctttcttaggcccaaaagaatggcttcgtattctgccgcattgttggttgtgtcgaactgtagccttgcagcataccgaattggcacaccatttggcaaagtgagtactgccgcaacgcccgcccccttgtgcgaccacgaaccgtcggagtacatcacccagggctgttcgatgggctcgggttcaggggcgaatgctggtgtccattcggccacaaagtcggctagcacttgggacttgacagcagtgcgggcaacaaaatgtaagtcgaaaggggatagctctgcttcccacttgctaagccggccagtaacttctttatcccgtattatttcgcccaaagggtactgtgatggcactatgactttgtgggcctaaaagtaatgcttaagcttgcgtgaagccatcaccagggcgtaagcgagcttttccatttcaatgtatcttgtcttcgctccttgcaatgcttcggagacgacatagaccggtttttggcctgaatctgtttcttggacgagagcagcactgactgccattggcgaagctgccaggtatagtagcagtttgcttcctgatgctgggctgatcagagctggcgggctttgcaggtattgttttagctcgtcgaacgctgcttggcattcgggagtccagttgaattttcccgcaccccggagggttttgaagaagggcaaacctctatcggctgcctttgagaggaatcaactgagtgccgcaattcggcccgcgagcttttgtacttcacatacgctcgacggaggcttcatttgctgaatggtatcgattttcttgggattcgcctcgatgcctctttcagaaacaaggaaacccaacagcttgcctgcgcgaacgccgaaaacacacttctcgggattcagtttcatacccgctgcgcgcaagttgtcgaaggtctcctgtaggtcggacgcgtggtcgaaagccttgctgctttttaggacgatgtcgtcgacataagcttccacatttcgccccaactgcttgtaaaggaccttgtacaccagcctggcgaaggttgctccggcattcctcagaccgaaaggcatcctgaggtgacaaaaggtgccgaatggtgtgatgaaggctgtcttggggatgtcggccgggttcatgcgaatctgatgatagccggaatatgcatctaggaagctcatgagttcgcagtcggctgtcgaatccacgagctggtcgatccgtggcaagaggaaatcatccttcggacatgctttgtttaagtctgtgaaatcgacacacatgcgccatttgccatttgacttccgcaccagcactggattcgccagccactcaggatgatcgatctctcgaatgacgcctgccttgagcaatttttggacttcggcttttgctgcctcctggcgatcagcgggcatcttgcgtagcttctgtttccttggcttggcatctggcttgactgccaggtgatgcatgatgagatctttaggatgttcttagcttcttcttcgcccatgtcgccccccagtgatacgagctttgtggggtcggcatcatcaatctgcatcttgactatcttgccgtgagggacgggctttggcgcgtgcttcgcccggtcatgcggttcggcctcaacattatgcactattctgttgattatggccaaatcaccttttgaagcagccgaaggctgaagccccttgaccacgatcactcctgccgggccgggcatcttagcttgagataattatgatgggaaatggcttcgaacttgttcaaggttgcatggccgaagatggcgttgtagttgtatgggatgtcgacaatgtcaaacaatacttgctcttcgcgtctgttttcccccgcgccgaaggctactatcaactgtgcttggccaagaacttgaactgcttctccgccgaatcctcggagcgatgtcggtgctagggtaagggcttggatagtcaatcccatcttggcatatgcttcggcaaagatgacatcggccgaacttcctccgtcgaccaggattcgccggacctcgaaaccagctatctcggctaagatcaccagaggatcttgatgcgggaacattactccttcggcatcttctggcccaaaaaagatttgctggttcagatactgcggagccccttcgcctgtcgaagtgatattgtggaccgttcgcaaatgcatcttcttttgtcgcttcgacagttggatcggcgggtcggcccttgtaatcacttggatcactctgcgttgcgcatcttggcgttgttcggctgggggtgcttgttcttgagctacttcacgagttgcttcggtcgctgctccctgctgcgtccttggatcttgcgcattgccacgtttctgaatgtttcggcattgctccgtggtacacgaagagcgtccgtggaaggcgcagtagaggttttttcggaccttcttgcggacaggctactaatggttgcttgcttgctgagcgttgaactctttgcggagggcttgcacttcttcgacagccatcacagccttgcccgcacggtcggttctgaacttcctccaggtcatgggggcttgaccttgccttggcggttgtgtttggatcgccggctggggctggtgaacaacgagaggaggtggttcgacaacttgaaattgttgttgggtttgagcagcggcgacggaagtcttatcgtactcagcttgtattgcttgccgtcgcttggaatcctcttcgccccttgtgaacccatcaatgatgcgaagtaggtgttcaagcgtttgcggctccttgttggcgatttttcttgagagttcgccctcgagtaaaccggccgaagcggcgtttatgactgatgcctcaattatgtcttgaacttggcagcgggcttgtgagaagcgacgcatgtactcccttatcgactcctccggcctctagcaaattgaaataccaagagcgtgcgatgccgtctagggtgagatgtattacctttgccttggtattttcgtcgccatgagccgcttcgatcgcggattcataaatggagaggaattcctttgggtcagtttcgcctaagtagcgtgggacgggtgggaacttgcactggggtgggattggacgggtcttgattcccccactcagcggtagccccttttcgccccctgccctgttcacggcaccttgctgcgggtacggcgtggcgaagggcgaaatcacggcttgtgcgtgaggttgggccatggcatccggctgcccggccccgattggtgatgcttgctgagccgccatgaatgggtcgaaagttggctgtgaccatgtcatggcgacctgatttggtgcttggtttgctctgaagcctggcgttggtgcttgcggccgaacggttggcgcctgagcagcattgatagagtcgaactgcggtccttgacttcacggcgaagcccacagacctggctgattcgaaggcaaccaactaggcgcaccttgacttgtattcccctccgggcgggccgaaggggctgtacttgaaatgttgtggggttggctgagctgctgaaggaaagcttggagctgcgcctgcagagccgaagccccttctgccattgttggtggcacttggccaggcggctgaggatgtacttgggcagtgaccagttgagcttgcagttgcacgtgagggaccggatacgctgctgcggtcaatggctgcccggcaaagtacatcggcgcttgcgcaacttgtggcggaaggggctgggtcggcacttgtggatagacttggggtgggacatagcctgctgaatactggaggattggtgccgaagcgaccttggaccgccttgccgcctcgtacgcttgctgctgttcttgcatttggcgaagcatgtcttggagtcgtgtcatgttctgtcgcatggcttccatgtcggcttcggtttgtgtctcggggtcagggttgacttgggcttgcacagcggcgagcgcagtttgggccgctgccggctgcgacggagcagcttggggcaccagtagttggcttgtcgaaaggatctccgccctggtctggagtgccctcgtcgccgcagccgccctcgccatgtcagccgcgttcggcacctgcacagaggtagcaggggccgaaggcggtagtgatggcgcaggtgcggaagcagatgacgctcctccatcttcggcaacaggcgccgaaggctctgctccctcttcggcggccatatccgcccctgtgtcgctttcctttcgccttgtaaccttctcctttacgaccttcttcggtggcattcgctcttagtggtttcgctcggaggtccccacggtcagcgccagctgttgtcgaaacgcaattgcatacgtcgaaagacgtggttactcaacagtggttgaaagagcagggctgtaaatggaggtttcatgcctctacaagtaagaaatactatggctgcaaggtaaatttgtgctgaaatgttcagttaattattttatcatttcatggttaaatttgatgcataaaaagctgataattacattgttatatgtgcaggtcaaggtaaataggcctgcccacagttgttgttccataaataagactggggctgccatggcaacaaatagctgggttgctgaaagagttatagattggctgaaggagattccaactctaggagctagtgcattgaaggtcaagctagagaagaagtacaaatttacaataggatatgacaaagtttttagaggcaaagagaaggcccttgagaagatatttgggaagtgggaagacagctttgcattgctgcccacttttagagaggagcttttgaaggcacaacctggaagtattgtcgatattgataccgagattcatgaagaccaagtatgcttcaggcggctgttcatagctctaaaaccttgcattgatggattcctacaaggttgtaggccatatattgcaatggactcaacacacttgacagggaagcatagaggacagctggcagctgctgttgcaatagatggaaacaactggctttttcctgttgcatttggtgtgatagaagctaagacgacggagagttggacatggttcgtgcagaacttgaagaatgctattggtaatcctcctgggctagccatcagcacagatgctgggaaaggactagagagagctgttagtgatgtctatccaactgctgagcaccgggagtgcatgcgacacctgtggaagaacttcaagaagcagtaccatggaccactttttggtgaaaacatgtggcatgctgctaagtgctacaccagccagcagtacaactatcacatgaacaagattgctgagaaatctcctgaagctattgcatatttaaaaaccaatcacccatttttttggagtaggagcaaattctcagagctttcaaaggtggactacatcaacaacaatctttctgagtcattcaacaattgggtgatgaagatcaaggaattacacatagtggacttatttgacacacttaggcaaatgataattgacaaatttcacttgagccaacttgcaagcaaaatggaaggaagaataattccatctattattaagacactgaatgaacagagcaagaatctaaaagattacaatgtggtaaggagtaattgcgatgatttagctgaagtttctatggtgtccaacaagggagtggtatggaggcatgcagtgaacctgaaggctcatacatgctcttgtagagcctggcaagtaagtgggaaaccttgtaaccatgcattggcattcataggctctctaaggttttctgacatgaatggctatgtggatgagtgttattcagtgcaaagattgaggcaaacatatgctgggatatggaacccaatgacatcaaagaatatgtggacatttgtagatcctggtttcaaattgatgaggccaaagttgaggagaaagcctggaaggcctaggacacataggattaaagcttcagatgagcctggctgtagaaagaagaggacatgccctgaatgtggtgacaaaggccactttgcaaagacatgtcagggaggacctatagctagcaaaagttacttgtcatccatttttttccctttcatttgtaaattggctgctcactctagattttatacaggaaaaggtcatcttcatcaacaccatcctcagatcaaggaagcaatactcctggtgcagcacctaggtcaaagaaaaaattactactggatcatccatgtaattagtatttcttactagttaattccatcctcatttgcaatctatttgcatcttgtattcagatttaggtactaacttatagaattgttgttacagtggcaatgcaaatgatgtgtcaacaagaccaccaagagcaagagagaaggggaaggagaagaaagggtttgttgcggcatccatttgatgcggttgtcttttgggaaggttctaatggtctggaccatgttgtcctatcaaattgatatgatgtagaacactgctatcagatgtagttgtcttttggatgtgaggatgaatcatatgatgtaaacctctaactgtgttggttgaattagtcatatgtagttgtcttttggatgtgaggatgaatcatatgatgtgaacctcaactattgtcatttaatttgtttatgttactgtgttcatgccagaatgacgctagttgactatgttctcttgcttgttgtctcaaatggtgttttattgatgccaaaatgctgtcaatattacaatttcatgggcaggggcattcttgtcctaattttcatgaaaatcagccatataacggtgttagtctaagctgtgagtccagtggcagttatgttgggttcaaagttcaaactgtttttaatggcaaatttgcaattacatttttttatgggtagatccacaatacctgttcaatccagtggcaaatatgcaattgaccccttttgttaacaccactccttgacgtagataccaaaaaagatatttactttaagaggcattttaaactttcaaatagttttgttaatattgggagctttcgtatgagccaaagcaagataatgagatttaatcgagaatctttcatctagtgttaaattatatttaaaatcatcttgctcacgtgacaaaactatattataggatcttgtcttcaagattttgaaaatctcggcattcgcccactcctcgtgaccattgctgcttgggtgagtagagtaagcaaagcagagcagcttgatcccgaggtcaggtcccggcaatatttgctaaacaaggaaatggtggattgcacccctttgttagtgattattcgattcgggccaccaaaacgacatgtgatgccgtggatgaacttgaccgtgccgtgtactgcttataactttaatgctccgaattaccttgaaccactttgatgaacttgttgatggcgacctagaggtgttcgtatccttcatctgctcattgaagagcccaaggatatccagttctcagattgcaaacaaccattttgttgcaaaataattaggcaataaatacgtgcacgtgttaagttaagtttagtaagataataatagtctcatgataatacagatcgttggaagttagatcgtaaagaattcatagatgtgtttctgggactcagatatggaatataaatgaattttcatttaattgcatcaacctgaatttataatcagcctcaaatattcggaattcatattgggcgggtgaatcgctactccatccacccagcgatcaccccccccccccttctctctcctatactatatactcctccctcctctcccccttcctcctacccttcttctctttctactacagtacaccccacaaatttttttaaaaaacaaaagttagaaaaatttatgtataaaaatactatatataaaaaatttgaattcaaattcaaatttgaatcgggtatgtaaacttttgacttgtaaactttgtatctataaattttaggtgtataaactttagatgtatagaaatactatatatagaaaatatttggattcaaattcaatttgaatataattcaaattcaatttgaatataattcaaatttaaatttgaatcgggtatataaactttaggtctataaactttagatgtatagaaatactatatatgaaaaatatttgaattcaaattcaaatttgaatcggatatttgaattcaaattcaaatttaaatcggatataattcaaatttaaatttgaatcggatatataaacttttgacttataaactttaggtatataaactttaggtgtataaactttagatgtatagaaatactatataaaaaaatatttgaattcaaattcaaatttgaatcggatatataaacttttgacttataaacttttggtctctaaactttagatgtgtaaatttgaggtgtataaactttagatgcataaatttattaaaataggaaagtaatgcggtgccaaaaaaaaaaccaggtggagggagggaggggggctacaggtatggcgatcgatcgcccattagaactaccctcgaatattactcctacatcaagtggcaaaaaaaggttactgacaaaagcaaagtcgctgggaattactcctctacggcactacccctatatggcggccgcctccctccggctggccacctagctatcaatttccaccgccgcgtcgccgcccactaaccgctgaccatcacactgcggcggcggtggcggcggcgacggcgacggtgcaggctgcagcagctgctccgtcgccggcagcatcacggcttctagtggataggtgcgcgtgtgggccttagtcgccttcttgacggcgatggcgaggacggccaggaaggcgatcggcagcgccatgatcaacgttcaccggcaggccgctatcgatcgatctatcggtcgaattctccggcggtggtcgtgagcgcgggcatggtgagttagttggttaccggcgtggtggaagatatagaggccggccggcgtgatggagtccggctcggagttggcaggcacagccacgtacacttcgatttgctgcgtactcgcatcggcatcggagtaacgacgaggaatccagtaatccgagtccgtgaaagaaagcagtggatttttgttcttgtgctgttatagttaatttgtaaaaatatttgtattttgaaacctttcataaatccgttgtagtctagctggttaggatactcggctctcacccgagagacccgggttcgagtcccggcaacggaaatttttttatgttgttttgtttttccataagtactaaaactgtagaagtgcccggctgctggacattggccatcggtccacggaaatggctaatcagcgatcgctcgcgtgcgggagcatcacgcgatcagtgcaaatccatttttcggcccacttgagtgctgagaatgcttagttgctttattgctcaagatttttacacagctgatgttagcgattgtttagacctttatttatgtataaaaatactatatataaaaaatatttgaatttaaattcaaatttgaaacgggtatgtgaacttttgacttataaactttgggtctataaactaatatttgaattcaaattcaaatttgaatcgggtatgcaaacttttgacttataaactttggatctataaactttagaggtatagaaatactatatataaaaaaatatttgaatacaaattcaaatttgaatcgggtatgtaaacttttgatttataaactttgggtgtataaactttagatgtatagaaatactatatataaaaaatatttgaattcaaatttaaatttgagtcgaatatataaacttttgatttataaattttagatctctcaacttcagatgtgtaaatttgaggtgtacaaactttaggtgtataaatttactaaaataggaaagtaatgcggtgccaaaaaaggaaaccatgtgggggagaggagaggagaggagaggggaggggaggggaatgtgg

SEQ ID NO: 26918 - DNA, 12811 bp, Oryza sativa
  unsure (1)..(12811): unsure at all n locations
ctattttagtaaatttatgcacctaaagtttgtacacctcaagtttacacatctccacaattgttttaaaaaaacaaaaagttagaaaaatttatgtatagaaatactataaaaaaatttgaattcaaattcaaatttgaatcgagtatgtaaagttttgacttataaactttgggtctataaactttaggtttatatactttagatgtatagaaatactatatatagaaaatatttgaattcaaattcaaatttgaatcggatataattcaaattcaaatttgaaacgggtctataaacttgaggtgtataaactttagatgtatagaaataatatatatagaaaatatttgaattcaaatttaaatttgaatcggatataactcaaattcaaatttgaaatgggtatataaactttatgtctataaattttaggtgtataaactttagatgtatagaaatactatatataaaaaatatatgaattcaaattcaaatttgaatcggatataaaaacttttgacttatgaacttttggtctataaactttagatgtgtaaacttgaggtgtataaactttaggtgcataaatttactaaaatagaaaagtaatgcggtgccaaaaaagaaaaccaggtggagggagagagggggaagggggatcgatcgctacccccatcgtcaggcgatcgatcgcccattaggcgtacctgaggaggggtagggggggcgacctgattgtgggtcacaagatctcgcgatcaatcgcgaactaggtcaaccctctatccacatgggagtatagtagtgcacgagacatcaatagcaattagtaccttgatcatattttttttctaccttgcccatttgagtgacatccaggcttttacaaagaaagtcggtgacatcttttcttttctttttttttatctgaagtcggtgatattttagtttgtcttgatggtggaggcatagaactgaaaaagaaaacgctcaagtcgttcatttcagctatacttcacccccactcaattataccgcgtttataagatataagggtgtggtcaattcatttaaagaaaagatacaaggatgtggttaactcgagatgagcatccaagagtaagccggtctaacatcccattaactcgaaagagctaattggcgacctgttgcgcgcgctctccctcgtgcgactgaacatgtgtcgcgtgcggaggggggcggcggactgcgcccgcgctctttttcggtttttctgttttggttttttttctcttccgttttttcggttctttttctgttttggtttattttcggtttctcttcccttttttttgggttcctttctgttttggtttttcccttttttctctctttcttttttcggttttttaagatgtacgtatgcaaagtttatatttgtatgtatactaaattttatatttgtacacatacaaagtttgtattcgtgtttttttctcttagtttttaatatatacctatacaaagtttgtatacgcgtattcaaagtttgtatacacgtatacaaaatttatatacatgtatatttttatataaaattatatatacgtatatatatactctgtatacacatgtataaactttatattttatcagtacaaagtttatatatgtgtatacaaagtatatatacacataatagtattgttgtagtagtactactagtgtagcagcagcagcagcagcgcgctagtagtagtagcaggagcagagcagcagcagtagtaggagcagtaggagtaggagtagtgctactactaaaagagcagtagcagcagcagcagtagagacggactggtcgcgcgcccacgctcccgcacaaccagtcactcattaggggcggccccattaactctccctataacacaaccaaactattctttgtaagaaatttgattcataaatatgtggcaatcacagatatctgagacatcccagtaaacatatagccatataaatggtgacagaaaaacatgccgattattacatgtttccatacggaaactttctgctcgcaagaatctaatgcatacatctgttttgaagaatacaatctaatgcatacatttacaggctctctctttccagggtatattcccaatcccacacaagtcaaaaacattctcaagtttcaagtacatcgagcatcatttttcaagagccatcaagcatcatagattggactaaagttcctcgaatccgtcttcatcggcatcatcctctattctttcaaaatgcatccggaagctctccatctatcaagccagagatcaaataaacaaaattgcactataagatctcaactaattgagggttcatggctatatgattaacaatggggcgcatcaacaaatatgagcaactgtggactagcaaatgataattgttttagtaaatcatacaccagaggtatctttctctgaaggacattaataagactccaacaccaataacaactgattaccttaaatttaaggtgtagtaatagataaattacttgcaaaactctcatgggaaaattgtaagtaatgaaggacctcgatgaacaaaatcagacagttgagaggctcatatcaacaaaaccaaatgtagaaggctaaacgttacatatgaacagttgaagctttaaagggcttacatcaaaagattttgactttgggcaatttattataagtgaaatagttgggtgcttacacattagttttggcaaaagaagaaaaataaaatcatacatgtactgtcagtagaatattaccaatatgcactgaatcaattaaggtgtgcttttaacagctagattttctttatataaacctggaaagtttcttcaatatgtaacttgacaatttattcagaacaaaattaaattaagggttacaaaaaaagctaagagtactctataagtgatgaaaataacaaatgcagatgttcctacctcctacataacatgggaaaggtgattggttggctgatttgcaatttctgagtcaaagttttgtatggatgtttcatgaagttcaccgctctaactcgtgtgtcatgtttttcttcatgagggcccaccaacctcgttttccgaaaagaaaaaggaaaggaaaagaacaaactgatatcttggctcttcaatctctcaagatattgcaatcaaaaggttatgggcaatttccagatgtgagagtgatatttttttagagctcacgccaacccccagaatcattgaagttagaatccatgtcgaaggaatagagttggtttcattacctgagcatctgagaaacgcagctgttctgcaataaaaatagctctaccatgtatttccggtggagagtctagacctaagccaacatcctttgccacttcttcatagtgaacaaagctgacacgaaaaccctgagtaaagaaaaggttttccagcctgtcttgctctgaggcctgtgcaatgtagaagggaactgttacttgatgagccaaattaaaataatatatgcaaattttctagtatgtacttagccaaccatgtctgttgctgctccccactgcgtaaaacgtggcacctcccctataaagatactccctttcattgctaaattgccaatgacaagcaaaaggtcctccaagcttttaaaagtgaacaaaggtaaaccctgcaatgccagaacaaattcatgacacaaaaatacaaaatgcagttagctttcctatttgagtgatgccataaggacttggatgtactcaaatggatggcaaaaaataacatcagtgcacattttagtgtcagcatacaaaaccaggtagctagtcaagctaaagcaaataaaactccatcaagccataggagaaaaaaaaaattatcgtctactctagagagatatatagcacagaccccctttgcactcttccactcacatttcctctcttgcagatcaaatttatcaatgacatgcgctgcataatctaccaaaagagtgtggaatttcccccatccataacaataacatatatttatccatcatcatgttaaatcattcaaatgcaatatcactttatgacctactcatcccatcatctgattagtttcatgtgtacaatgcaaaataagttataaaccatgaaacattaatattggcctacttcaaatactgtccactagctggtgccaataagctcatgaacaccaggtatcataagaggtactggaattgccctctcagcagagctaagggttctgtaattgctgttaaaatagctaattgtgaatatacatagcaagtcagtaaacaccaggtttaacaaaaccatactttcagaanattctccaaccttggcatgatacctcactaattaaaaccagaaccaagagacaaaaccagataggggcagtttccagttcttcctaaaatactcaggaagacctgctcattttgcctgttgaaatattgtttttcttttgcaagaatgctgctttctggttaatttccaatctaacatattagtacctttttcctatgtttctgaaaacctaacatttcaccctgctgtgtggatattcagtgtaaaacaacagagaaataactcgattccagaacttactgcagcaccctgagccaaccctaaaacaagacactacacagttcctaccagtttgcaaccatttctgaacacatggatgcaatggctggtatgaacatgtagaaagtgataattttgcataatatgtcacaaccaatatgctggtgatttacatattaacgggagcaccaggagtttttaagttaggtgcatatgtaagtgttgctttgcataaaaagagtgccctttattggttttgaggatttgtgctagcacataatccttaaatctaaaaacacatcaattgatttaattcttgtaagttgattttgcttatttgatcaataacacttgaaaaaaaaaacaaatgtagctccactgccctgctgcagcattattgcactagagctaccaatgttaagtgtatttttgttttatatttattctagcctagggtttgggtatgtccttgagtccttgtactccaaaacctagactagagtgcagtatttgattaattgcaaaggggaatataacaataaatttaatgattagtatcgaaattttgtgcggaaggacatagtggagtaagttacctgcagtacccacaagctcggcctattcccattgaagccatttttattcaagcccgcttgcaagtcaggagactctgaagaagtatgaagtacaacacagttccgtgatatttttgctccggctcctatcatatcacaagattttttttttttaaaaaagaaaaggttagctaactacatacgtgtttgctacggatgaaaatgaatcatacatattttatctataatactattgaaacgaaataaatgatgattcttgcatcaaacatgtccttcacttttttgagttacaagaatcattccaaagtatattaaattttgatttttttagaagaaagaagcatatagaaggtctactatgtaacaaccaaagaaattcagagagcaactcataaaagtacagtgtgcaggttgtgtgttggcagattcactaacaccattaccttgttttcaaagaagtatagatgtacatcaaaaactcatgtacatctatacttcttttttcattaaaaaagaagtatagatgtacatgagtttgtggcaacccttgaatcatcagatttcttttgagaaatgtaaaagatagatagcatggggggctctaattgctatatcattgctattgtaatgtgcttatacagcttggccagccaggtgacacacacagtagcagatgttcccacagaacttgaacaaacaacggctggctgagtaacatagaggataagttacttatcttggttcacccacccaaaagggaaaaaaaaaaaacaagagtttattatcatggttggcagcagagtacccttaactttaagttaggactaaatcttcagaacatgtaaagcttagtttgagttgttagggccagcccaatacaaggcaaaccgaagatttattggagacaagcaatgaataaaaattatgtttttttccaatgcccctctccctcctttatgtctctccccctatgatcagatcaccagatgttgcatatttctcccatgctaaggtttcatacagctattatccatttatcctcctctgtacaaaatacacatggagcagtagagaagaataaaagataaatgaatcaaggataaatattgcctttaatctcaattgagagatcttgctgtttcagatttctggatagtcagaactcgcatgttagtccctcaaaagaaaaaggacttgcatcttacaaatgacagtcgaaaatgcaccagttccttaaaaacaatttgtgatagcataaaacatgactatacctctgagttgctgtgatgcagtaatgaagactcttctaggtgatacatcatacacaacagacaaccttggccagcttagcctgtaaggacgagtgtccattccatctgtcaacagaacaatctattaggaataagccagcaaattctccacagattatgcggacagattcatcgtaacaagttaaatttcagtacctgtctaagatcatctgaattgcttatgaaatgttgcaatttgtcatcaatatatctggtcactagcctataatgttctgcacttggcattaaatgtaaagctagaagatctttatcttcacttgccacatcaagtgaaagtagaacagctgcatatgggtcaataaaaagaggatctgcaacaaaaataatactgagaaacattagaattttgatatacaatcatatatagccatgtgtggccttctcctaaaaaatcagatgatactctacagggattatcatctgaattctgaactttgcgaagaaagagcaattcatgattcaaagttctaaacaactgcgttaaatctgtctcatgtgggactgagacaaaactctgttctagttaattcagaaaaataaatgaacaagcaactaaagcacgtcactgtaaaaacatgtaatttgcataaaaagtttgtatatggtgctgaaatagtactaatgtcatactttaataaataaagatttccaatattaggtaatcaatatgcacattgctgttggtttttttttaaaaaaagtgcacgctgcttaagattggcagacttgaaaacaggtgttaccaaataatttacaacaactaatctataagcacattgctgttgaaattatgactttgcatgcgccgccggggggggggggggggggtaacaaaaccattcccctcaattcgtcgaacaggtagcgcgcactgccagttccgacggaatcggcggcacaagcaaaagatgagcagcagcaaagccagcaacacaaaagatgcaccccccatcgctgacctgggcggcgggactcctcgtcgcggaatcgtgcggcccggagcgcgccgtcgaggagcgtgtcgcgctcctcctcgggctcagggagcgaacccccgaggggggtgtcagcggcggtggcgaatggcccccgcggcgggagcccgctcttcgcgcagttgctccagggagggaaggaagaggccggcagtcggagcagggcacgcggagtagcggggagcggcggcgaccggcgcacgggcgtcgtcgccgccgccgcgagccatggcaggacgggcatgtgtgtggacagttgctctccatcggtgtttcgctgccttcccctctatccagtatgcgcgatgtttacgcctccgtgaaggggaaacgtacttctgtgctttgtaaaggcgcattttactacaacgtgtataagcggaggggcacataccatgaaagtttattcgaacatcacaggtatcaaaacgtgtaagctcaagaactttactagtactactctctgtccggtcatcaaaacgcgatgtttttaacattaaaatttgaaacaagaccaaaaccactatttactactccctccgtcccaaaatatagcaatattgtatcgtgtaaaatatcacacgatacaatgttgctatattttgggatggagggagtactcttggtactacttagaaatttcgatagatgatgacacggtgatgtacggtaacggtttattaggttgggaggaattcacccaataagaatacaaaatataaaggtcctaaaaattaataagatcctcagaaaacagttacctgatcaatgggggcattgccaagtgccaaccaagatattttagtacaccgaaataaatataattcatacggaaaatagttttcaaaatatggatgaaactattttttatcgaacaactattacaatagtttctatatgcctaatttgattaggtttcaaaaactccatactactccttccgccccaaaagaaaaaaaaaacctagaattagatgtggtgtagtctagtacaatgaatctgaacaatctcctatccagatttattgttttaggatatgttacatccaattctagatgtgtactccctccgtcctaaaatataagcatttttagcatagtgttaagtcgatcatttttaactttgactattaataacaaaaaaaaataaaaagatcaattatgtaaaattgatgttactagatttattattaaacaaattatcataatatgcaagtctttttatttaaaatatcttatttttatagatattattggtcaaattagcatctcgaagactgtatcgaagtctaaaaatgcttatattttgggacgaatggaatattttatgggacagagggagtgtgcaattgcaactttttccaaattgtttaaagtaatttagcaacttaacaaagtcaaatacatatatgcagttgaatattcagatttaggaatgaaaaaagtttcaaaaaaatatgcacattataggattataacctagataaattttgtctcaatcagaatacaagtacttgttttcataaaagtttatttgtttatgagcttgctggggtaatttactaattttcaaaattcaaaactatttttagcataatgcaacactaccatgccaacgccgatgtcataattagaatcaccctatgtttgagccaagtttgaacaccgagaaaaatcagatgaaaaaaaaaaggagtcatggagctagcacttagaacagatataatttcatcaaagaaaaccaatacaacatataacaatattacaataataataaaaaaaatctccttttcccaaaaaaataaaataaaataaaaatctcccatttggggccacatgccatctctcctatatgggcctcatttcttgatccgaaataatcctcataaaccatactaatatttttccccttttccccatacaccattgtaataattatgtcaatggattttctacgtaggcttaatgatcaacccatcataatcttcgctagtgtcaacggattattcaaagaagactggagaaaaagaaatggtgatatgaagaaggaaaaatctgtgtagccatgcatgcgccgtacgtcgctcagtactcctcggaatccggtgcgctggcgccgggtcccggcgcgtcggcggagccggacgacgacggcgatggagacggcccttcggtggagccgtacgacgagggcccttcggcggggccggcggcgccggacggcgacggcccttcggcggggccagaggcggcgccggacgacgacggcccttcggcggggccagaggcggcgccgtacgacgacggtccagatgcagggccgccggcggtggggccgccggcggggctgccggcggggctgccggaggggctgccggaggggctgctggaggggctgccggaggggctgctggaggggctgctggatgggctgctggatgggctgccggaggagccgccgtagccggtgtcgtcggatgggctcgggcccggcgcgctggcggcggagcctgagccggagccgacgtcggagtcggactcggaaggcgccggcgcggcggcggcgctgctggattcatagccatagccgccgccgccgccgccggtggcgggcgggagggcgacgtcggcggacatggagccggaggcctcggtgatgaggtcgagcgtgacgcggaggagcttctcgaactcgaggctcttggtgacgacggcgttcttgatctcgctgatgggggcgtccttgcaggtgtcctcgcaggtggaggacccgccgagcgtggcggagagccaggccttgacctcgaggaacttggcgtcggtgagctcgcgggtgagcgcgctgaggtgcgccaccgcctcctcgatgtcgtcggagcagctgtccacgcacttgaacagggcgtcctccttcacgccgttcagctcgtggtgcgcgaacgccgccaccgccgtgcccacctccgccgccacgtacaccgacagctccgccagccgccgcgcgttcgccgtccggctctccgggttcgtcgtcagcgcctggatgcacaccttggggaacagcgtccggttgcacgcgtcctggaggttgtccgccgcgccggcgagcggcgccaccgagacgaggacggcgaggaacacggcggcaagctgggagcgagccatcgccatggtcgtcttcgtgtcgcggtggaccggatcgagctcgggagagatctctctcgctttttgtgttgtagtggttgaggcagaaatggggaggggttggatggggttttatactacgcttctcaccgctgcatgcatatggtgtccatgagtggtcagggacttgttctttccctgccctgcattagcatgggctgaccttggttttaggagaggggagtgtgccctgtgtgacaaatgttgcatttctatcttcctgtctcgttttggtgtttacttttagttccatttgtttttttttcaaaaaaaggtaattgtatttgttttggtcacaaatataagatcattggtgtcctctctattatatataccatcgatcgtcaccacttataaacaagatgtaaacagtgatttgcagtagaaattacagcgcgtctatggtttcccgtgacaccaatgcactggtctatgggttaactcaccagagtaatttattattttcatgtttatgttgtgaataaaaatgtaagcattcgtattgaaaatactctctccgtgcagaaatgtacaacatttgaggaactatacaaccaattttcttcttactttaccggtgatgtataaaagaacaatggtacaaatttttttatgaaatatctcccttctataatagtttgtttttattttcatatgcatataccatgaaatatatgggcgatcaatatatcaaaaccatgtattggcatagtacccatgtccagggcatcctactttcaaaaaaaaaaaggatggaccactattcagtattaccccgagccatatcctatatcctatagtcgatggttttgtgcatcttcataggttacatttccaattaaatataacaagcaaaaatcagaccaaaggcaaccatgggacttgtgtgacaaatgttgcatttggtgtttagtgttgcatttgttttggttgcagatctgtgtcaccgggttaatcccttggggcaattatttttcctgtatgttgctgttgttgtgaaaaaaaaatataagtagagaaccgatattgaaaatactgctaacacagaaatgtactccgtttactttttaaatttaatcaagtttattaaaaattaaatataacaccaattttgtattattaaatcgagcattggatagattttaataatatatttgttttatcttaaaaatgttaccattttttatgaacttattcaaacttaaaaagaaagtcaaaatactttatagtatgaaatgaagggagtatactaattgggataccatgaacccagttttcctcttaattttgaccctattaatttttcatgaaaagtttcattgatatagtagttgtcttctttttcatatccatattttgtaaaagaaatatagtggtcaatctgtcaaaatcgtgtactgtacacatgtcactccagaacatcctactttctaaaaaaagatggagtacgcttaagtggattctaatctctcgagggaataccccatcgtgtatatttttcttcaaatttaatgcaaatggttgttaagaaatctaaaaaacccaacacggtagagtatagtaaagagtatagtaatgtcttatcactccaccaaaatcatgcatcttactcaatatgtacgttgaaaaaaaaggagacaaattcgggatgaattgtactatctaattttcatatgttgaattttcctttttatttttcaatatgtgatttgtgtttagaattaagattttctggagatatctatatcgtatgaatgcttcctttttagttttgtgtgtgagtcttacaagaaaaagtccaagatgtgagctcttctcctccgaaagctaatttgctgacaatatagctaactaagcccatgcctattttgcaagaagagggagaagaagacgacgaccaaaaaagtcaagcatggaacagaagcttgcgtgtgatagttttacactttaatgggaagtaaaaagttcgaattaccccaaaaactactatatggccagtacgaatttatcctatgaacaacaaaactagacatccttcactctcaacttttcataccgacaaattatcctct

SEQ ID NO: 26919 - DNA, 4083 bp, Oryza sativa
cgcaacccctacctggcgcaccaattgtcgaaacaagatttcggcaatacaaaaagggggtggctatcaagcaggaaaagtggatgggtttggagacaaggaattttatacaggttcaggccttctcaatgtgaagtaataccctactcctgtccggggattgattcgccgagtgtgttatagatagtatgatctgggagaaaagttatgccccaagaggcacccggacccctccttatatagtgggaggaatccgtattacaaggtacagcccatattcctaacggaataggcaaataaagataaaatacaatcgtaaccgactagaaccccatgtatttccttgatacacaagtaaggaatttaacccgagtcccttaaaggtattatatctgtatatggtacccctatacctagtcggatatacatgttgtgtgggtatgggtatccataatctccacagtcgagcacgtgcttgggaaatatccatctcactttcacccctagtgctaacgaaaaatttgaagttgaagaaaaacggggccttggtcatagaaaaatttagcccgacggttgtccaagatgatgtctctaacataaacactgaagtataaagtgggacatggctttgggccaagtgcacttcttgtgctagctgagccaacctagtcaagataaaagaagggaccgagagggtatacatgtgaaaggaataagtctattttacctccctcatctcttgctcgtaattgaaacgcttccttcaaacatcgatttgtacccatttcgaaaataagggagttgtagttgagggatgtgattgtcacatcctgatttttgtttcaggatttataaattatttaataaattattattagaatttatattaaatgttcattaatttacaagtgaagttaaatgtgggaaataaaatttcctaaatataaagcatggatggatttaattttgattaaattctccatgattaattacactctctgaaattttctcagatgtttcggagctcaattcttaatttttaatcatacaaagagaatttcagtaattacccacatattaaattaatcattaaatggtctgtttttaatattgttaaatactttgggtgtccaagtatgttcaagatttttcttggaattatttgagcataggaagtatttttaacaattcaaagatcatttcattgattaatttaattggaaaagtaataataatcctcttcctagtcttgggccctttccagcccatctccctcttttgtctgcacggccgtgcagcccaagtcggcccagccgagcttcccccttctctttctttctttgctttgttttcagccagcccaagacgaaaagtctatttgcctccctcgacactgtttatcttctacctctagcagccgaactgagaccgatttggctcggtttttctcctccaaatctgacctttccccttgtgtttttctaaaattagttgaggggaaatattcctcttatcctcctctatctttatccccaaaaatcggagctaatcgttgagtatcttatccgaatcgaactcgttttcgagtttatctccaaaatcgagtttttgatttcccggatcgatttcttgcgggaggagtccgatctcttcaatccaaggctataaataggaccccctagtcctcctctttcgtttgccccctctcccgtggtctcccgtgcctcatagcgccgccgccacgtgctccaccccgccgtcgtcgccggccgagctccatccgcgtcgcgccgccgcctccgtcgtcgtcgccggccgtcgtcgttcgtcgtttggttcgagggtgagtaccattgggttcgtctcgtcgtcctctacgtgttcttgtcctccaaagtcgcagccgaccatccaatctccggcgaggtcgccatcttggtccggccattgatgaggtcatcatcatgacgtcatcatcgttttttttctttttcctgtttttctaatagattaaatcttcggaaattcataactaaatcatcgtaactcggttttgagtggttcaagttgctaaattcatctaaaatcatgatctacatgtttgtttactttatatgtactgtttatttggtttttattagtctttttcttggttttgcgtgttagcttgtcgtttccgtcgttgcgaaggttcgtgagtgcgtcaggagtgttcagaagattaattgaagaccgattattgcaaggcaagtcacacagatcctaaacacaatcctttgagcatgttgatcctatatttaaattctctatttatttcaactgtgcatttattttcgaatgtcaccgggtggtgtgaacttattcctttgttatggccaatttgcattgattattttattcctggataccttgggttattataacttgactagttgggctttatatattggttcagctagatattagttatgattgcttagccatgcttagaaacattatcacataattgggataactaatgttacactatcacttatgattatatttaatggtagctcacgatggttaatcgtgttatgataattaattgataactaaaacttgacaatggtgggttgtgagcacatggttttgaaggtcgtgctcatgcaattaaggaccggttcacgagctactgttgtgaaacattaaccgtaccaaccacaagccagcatgggcaacggctttaccttctgtatagcatgattcattgcggggcaccagactgagaagcggcgagaagtccgtgggggtcgctggggagtccatgcctctggttatatttatagagggggtgattatgatccaggaatggtgcactgtggtgagttgtgttgtgcaaagggtattgtcacagcctctattcgggtactttccagtatcgcgacgcatggtagacatgatgatgaggctgtgtcttgtgggtacagtggtacacctctggccagagtaaaactattcgaatagccgtgcccgcggtcatgggcgggttgagcaatgtttttcgtgattagtctcacacctctcacaataattatggatgttatacctggtaataatttgcttagctcctggtttggagttagatctgtacagccgggtatggttgttcaggatggttgggcctgtgcagcatgggtgtgctgttcagtgttgattaaaatttttaattaattactctactgttttactactcttaactctttgctaaatgctgcttttgcaaatgagcctatattatgtcatcctttggtatccttgtgcacttgcatatttgctgtgtggcttgttgagtatgtcatatgctcattcttgcaataatcaatcaacctcagttgaagaaaaaggatccagaaggagaagacgtttggcttataccccagttgagctgcctgtgggagtggagccggagcttcgctagaccgtaattccgctgcagttttcttttcttttgaaagtatgtaacactattattgatgattctgtatattaaattgtcagtttgtgtacctcggctgattcctggacgaggattttatgcataaataagttcggaaattactagtgaatttctgggcgtgacagtgatttaatcagaagcaagaaatgagagagaaaatatagacttattcccacatgtgatgtggaagaagagagagtgaaatatgggctgggttgctccaaagttcagcccaacattgatgtgttttttttggaataggttcacatcaggtccctaaaccaagttgtcgccgagtctaaaatttgtcctaaaccgcaataccaaatatgacacatccctcagctttcaaaaccagtgcaaataaggtgccaaggcggtttgggtggtggtttcagctgacatggcacctatgtggcattgatgtggcacttaagtaaaaaaatgtgggacccgcatgtaagtgactgttcggttaaaataaataaaatattacagtgggaccctgtcacaccctgaagttctcctcccaagcctaaaattttatttaataatgaccctaagaaaatgccggtgtacatcaa

SEQ ID NO: 26920 - DNA, 785 bp, Oryza sativa
ggcccattttccttcctgctctccactccgctgggccggccgaaggccaaagcccagttaggccggccgcctccctcctcccacccgggatgccgacaggtgggccccacctgtcgggctcgtctcctacctcgcgcccgcaccgccgtaaccgcaaccgccgccgcgcccacgccaccgcctcctccgggccacgtcggtcacgcccgcgcatgcgccgcacctcccgcgcccactcccctctctctcccgcccgcgcccgcgcccgagatggccgggattcgatttttcgaatcccgcctctctctcttctctcccactcccccacgttggccggcggaatctcgcccctaccggccacgtccgagccgagccgggtcgccgccgcccgtccgatcagccccgggggtgatctgggccgttggtcccgtggaccggcggtggaccacccgcgtggtcccggtccacggtggaccgcccccccttgagccgctgccgagtggggcccgcgtgccggcgccccttttccctctctcccgagccgctgaccggtggaccccgcatgtcggcgccgcactcccttgatgacgtcagccctgggaattattgcgcaataaattatttaaggtctttttgttatagtaataaacacagtgaatcttctaaaattcataactaattcatccgagctccgtttaagcccattcaagtctcagtaaatcaagaaaaatgcgtagaatccattaaaaatggttttttttctgtttcagtagttttgtagcctg

SEQ ID NO: 26921 - DNA, 17493 bp, Oryza sativa
gtggtgaaaggataacaataggatttgttaacgaccaaatttggtaatatcagcatcggaaaggaggattagattgaagtggagtcgaagacggagatcgattcgagaacagagcaagaatcggctggagtctggatcggctacgattggatcggctaagtctgagtcagactgggttaagtgatacagccgattccgacaatatgacttggtgtacaacatcaggttgagttgatatgtttcaagatgatcgccgcacatggatagagtcctgagaaggcaattgtatctattaattaggatgttttatgtaatttccttagagatatgtttagggcaaaagtctgccgcaaagacttatggtatcttagagtttcttagggataagagtcgtgtccgacatggacatagtttgtaattttcgggtataaatagaccccgaaccccatgtaataaattaacacacacattcaatacaattttggcgcatcgccacccttttgctttagttttatttcgacgagttcttactttcgggttgagctgcatcagtttcgatcttcaacaagaggtaaaacttgttatgacggcttgcgttttcgggattagtgcttccatctttatgacactttaatcttgtttatgtaattcgtcgagttatcatatgtcatgcccggaatttctatccaaaactccaaacacttacatgtgtgtaaaaccctcatccaggaatcagccgaggcacacaataacaaattgataatagagtgcaattattaatctaattaataggcgaatataaattcattacagaggtagatagttcctctcaaacaataaagatctaagcagcggaaaataaaataaacagcgcagacgacttcatcccacaagcagcttgaccagggctacgcctaatcctccacaccttcaacgtccggcggcggcgatggaaggtttagggttagaggagagaaatcaaatccgaatcaagctcgaatccgatgatttcaaaacaaaattagatgaagtttctataggggaaaagatagaggagatcaaggggatcatttcccctttaccaatttgatcggatcgggaaagatgcaaccgaatttggaaggggtggcggcggcttgcgcgcggctagggcgtggctgcggtgggaggtagacgacaaccctgataggtgggctccacctgtcagcgggtgagaggagggagagcgagcggctcggcttggtgggctgacttgggccgaacgcgagcaggccgaaggagagagagtgacttgggccgactttcggcccaaagccaacagaggacttttaaaacctttttctttttaaattattcatgaaatgcaattccatttattaaaaatacttccttggctcaaataaatcccagaaaaatctaggaactatagaatcaagagaagtatttaataaaattttatatagcccatttttatattggaatttattatttaaaattggatcttttcttctaggcttttaaaatcatttcttataattccatttaaacaacaatttataaatttagaatttttagggtgtgacatcatatatcttgcataatctctggcaatatctttatctaacctacaatcggctaatatctatcagtagagggtagccgattaggttagacaccgacgttgacttggattatatgagatatctaccaccctatgaaactttcagcggcttgattgtctagatattgttcttcttttcatacttaatgctgcatcagttgagtttgatctattaagttgtgcttagaatatcaatctctagcctgccttctggttgccgattagggtagtatcggagtttcagccgatcttatctgatttaactatatttgctctatatgcttcattgacatgttaagtccgccatttatgtcaagatcctattacacttaagtatattaggcttttgtttgatatattgtacttgttttaatatcttgatatagagtagtatcggagtattagccgatacatgctagatctatctgatcagctatgctataaacatatatagtcctgtcattaatatatatttcgatctaagtgatttatactgtctccgcatggcgaccgatctatcccaatcacttgatttaagtatatatcgatataagaattatatattgttaatatctacagccgatcgagtagatttagtttttcattatctatttacgaccaccgatcgatttacatatgacattggctcgaggataaatgatatgtcatcggcacttagccgatcggctatcatttatggatttaaccacggtttctttgtctttatttcttgttgattgcaggatcaaatcaactggcacgctagcatatccgaaggctagttttggacctgcactggagttaagcagatcgcctaggcctcgtgttttacgtcaacaggattgtatccacttgaactgatagctagatcaaatagtgtaaatcaagccatagtgaaagaaaatgatgtacattcagattcaggtaatccacatagaggactattgggctgaagaggggaatcggaagactcactttcagctgaagcactctgcactctcacctgcaaaagagaggatggcacacgtccgtgagaaccgagtgcatggtgtgggcagactataacccttacaacggcggcaccactggaggcgcggcagagtgtcgttggaaggcaggaccacagggccgtgacgggatggtgataccagccgaaaggcatattcacgggggagtcgactatgtgcggcagcggagacaggcttcatgacatacagatccacggcgccggcgagggcatggcatggtggtgtgtggcagtggtggggaggagcggagcgaggagcgcgcggcgaagtcagctccgttgggagcaggccgtggtggagtgtgtcagcagcggggaggcgcggagcacgctagagtgaggagttgcggatcaagggaaggaggagcgtcgcggagtcatcgcgcggaggatggggccgaggtcgactccggtcgcggcggtggacctcggcgccggtgccggcggatggggccgaggtcggagccggccgcggcggctccggcggcggggaagaagcagcggctccagcggcggggatgcggcggcagtccacgcggggaagaagcaccggctccggtggcggggaagaatcagaggctctggcggcggcagtccatgcggggaggatatccagcgaggatgcggcggcgcagcggcagaacatccggggaggaggaggagctagcgaggaggaggagaagcgaagtcttcgcgtgtggagcgatgtcttcgcgggtggaggaggaggagcgaagtattcggcgtggcgtggatggatggatcgtgcggtggcgaaatcaagcacgcagatagacggtagagatcgattcgagtgatttggcctgtaggattggcggagggaactgctcctttttatattagtatagatatagatgagtaaacttcataaaaccacacctattgtggttcaaattgtaaaaactatagggattttggcacgtggcacgtaaccattatagtcctaaagttttataaaactatattgttgaccattttgacatactcctatataaaaaaaataaaaaaagatgcaacatctatatgatagtaaaatcctcataaatttaagatgtgattgtagaacttgaaagtatggtagatcaaaaataaaatgatcaatagtgtgattttgtgaaactttggtattataatatctagggttatatgcgacattccaaaatccctatagtttttgtgcaactttgatcatattaaattgggatttatgatatttgcttttattaaattgatatgctacatattttccatgtgatattactatggagtaataaatatcacctaaatatcttgacacgagtacttttacatgtttatgctagcaaaaataaaaactattggacacgagtgacgatctaatctatggaatgataggacttagcattatatgtactttgattataaaattttgtctacaggcgtgtgttttggttacatgtatatatattggccttgtttgaagaagtagctaagagttattttgagtgctatttttagcataaagaaatagccctaagttatttggatgcaagggttattttaagagctatttggcctttaatgcacttttctatggagagagaagacatttttcggtgggccccacccgaaatagccccaattagcactcctttacagatttttgggtgtgttatttccaaagagccctgaaatagctcatatgtttgaaacttttaggctgtttaggggctatttgagagagggctaaaaagtaacccatagatccaaacagagctactgagagtgttctcggtacaattctattgtgttgatgtaattgtatgagcttttttattaccttaaaaattttgttggaatttaattacataaactacaatcaatttctaaattaatatatgagataggacaagatgatgtcttcaaatcatgacacttacaagacactcaaggtaggagaaaaaaatgggctaccacaagttcatcaaagtaagagttaagcaagcccccttcagaaaataatatagttactaggattggtgggaaagatttcttttatatcgataagctggagcgaacacgctcatgcaaagaaaaagctcgtaagctgctcaaccaacaatacttctttacagggcgagtagcatgatgaatgagatggctgtaacggaaggggagcagcagataacaaggaatgtggtgcggaagaaatggtcgcctcccgggctggtcagcttaagctcaatattgatggtgcttttcaggagacgcaaaaaactggcggttggggatttatcttacgcaacagtgaaggccaagggctgcttgcgggtgctggacggctggcgttcgttcatgatgctgactctgcggaagctagggcttgccaggctgccttgcttgccgcttcggtgcagggcatcactgaggtggggatcgagactgattctcttatcctggtgtcggccttgaaatcctgagagtatgatcaggccccaggtactgccatcttcggtgaagtgaagctccttattcagctgaattttatccattccccgttgctgtaatagtggtgcccatgatcttactaaaatgggcgctagttgggacccgggtcaatccatcgtttaggtcgaccccctcccagaatttataaatgcctttgtggttcgtgatatcactgaacctgctgggtgaataaaaaggcatcgatgaagttcaaaaaaaaaaaacaatactccgttcttgaaacctaatcacgagcaatgtaacaacgaaactgaacgaggtaagcatagcattgctgatctaagccatctcgccttcttgaattgtattggattctctcaaacctataaagttcctttttctaaaatttagaggagatttcagaaattttaaaactctgaaaagagtaaaattgttcaaaataatattgttggattctatgtttgtccctttattacctctaactaatgtaattttactaatccacgcaaaaggactaggtttattgaatccaaattcatttatccaacaacatcaatgctggattcatcactagaaaaaaaagaaataagttcactttttaggttcctcaatttgtcgccgagtctaaaattcctccataaaccgaaatactatatataataggtcccttaatttacaaaaccagattatgtgagatcctaggtagtattacatccggttttagctgacgtgacaagctgagtcaacatgagacccacgcggatcccacatgttagtgactaccacttcttcctcctctctgtccccttctactctttctgtctctcccctctgccagggaaggactcgcagaagaaatcgtcaaactccagtagcgcatgtacgagcgggacgcgattggaacgagatcaagtcagagaagcatagtattgtgactttagggtattcttagccgtccgatttacagtgaacgaacgagatcgatcgctacagtataccacagtaacactactcttgcacagtgtacttcactgtttgttactgttgctacagtaaaaaccgcaaaccactgttctggcgatgaggacttggcgcagcttcacaagcgttgattccctcctagcgccgatgcacctaaggggaaggaagaatccgccgccgccatggaggtggagagcgagagccccgttgcctcggtggagtccagcttcgcgctgccgatacaaacaaagcaggactcggatcttggcccccgccgcccatcccagcaccctggattgggaagaaaggggaagagatgggatatggaagagagaggggaagagatgggatatggaagagagaggagaagagaggggagaaggagagggatcccaagctcgctacccgttttttgtagctacccgctcaccagcggtttggcaactaatgcatgatggcgatcgatggtttcccggtgatccgcttgccagaaaacaaggcgggggcaatggtggtacgtggtaggggcccggccagttgagcccgtcgctctcgttgccgcaattcccaaccgctattggatccgagcgaaggggaactacgagtcccaagctcccagcttccagcttctgtgatacgagtcctaggaggcgtgagcgagcgacacatgctgccggtggctggtgttaacaacggaattttgcattagattcggagaagaaggaagaagatcgaagcggatttggtgttgaatcgagttggatttggagtcagactacgcattggctagatatcgtatcggctaaaaatagaatatgggttgatcaaggttgatgaagttgatggccgatacagccgatatggtataacttgggctcggtttgggtctagatcgggataaccgtcattatcaattagagatagagctcgaataatacaattgtatctattaattaggatatttcagtcggtttgtgttagatttggcaagagaccgccgtctatggtcttgtttgtattttatctttagaaaggtttgaatcgtgtccataatggactaagtctgtactcggagtataaatatgaaccccataccactgtaatacgagagagaatccaatacaacttcagcgcatcgccaccctaatatacatgcttctttactggttttatgtatatttgccacttatttagacagatcatcctatataattatatcaagctagatcagtatcggctgggctatttgaattagtaactgatcatgatttcaaatgtttatatagattgatttgtttatataagttcgtactaaattattagctagtactttatcgttatctatagattctgctctaaatattgttccattggctattttcataatattgtctttatgcttctttatcaaacctaataggcagtattatcgtcggtgaggcatgtttagggtttgttattcactaatctatccagtccatagcctatttggtctactacatcagctgagatcaccaactatactctatcggcctatcggctgactaactatgcttttatctttattgcttattgcatgatcaaattagccggcctagcctgcccttgacacactcgagtaggacctgcattggagttaagcagatcttctagaccgccgtgttttcactcaacagctgggttgccccattcgttgctacggcggaccgaggtgggtggtgggcatgggcaaacaaggatcccatgcagagttttccccaggattgatgagtgctcggaggatggcggcgaggggaccttcgttggatcgatgagtgctcgatgtccgaaaggactttcaacggcaacgctagccccgacgcgggccgcatggatccctccgctatttcactagattggggaggatgaggagacggggagattggggagcaggaggaggagaagtgggtctgtcatgcccagaaattcctgaatagaattccaagcagaatgtgcattaaaatccccgtccaggaccggccgggtacacaaatgacaatgttgacattcagatccatgtcttacaaacatcataaaagtcttacataaatgcagcggaaaaacaaaagataactggggctaagcctggacttgaactgcagcgggaataccactccacaggcaccctcgacggcacggacgaagcctactcctcggagaacccgccatcggacacatactcgcactctggggttggggaaaaaatagagcaagactgagtactatccactgtactcagcaagtcataccagaataggggtatgatgcagggaattatcaaaggagagctagagtggttcatttgcataaagcgagcatttataaacagaagttgaaagaattaaacagttgcaataattaattaatattgatcatccgctgtccaacgctatcccacgttgcaacaggcccaaccatccacctatactatccaatttcattagactaaactagggtgagactaatcacggtgaatctggttgaccgcccataactgcgggcacggctattcgaatagttttactctgatcagaggtgtacagctgtacccacaagacacagccccacaacacgtttccgtgcgccgacatgccaccacgacataccggaaagagtccgtgataggacccttcgcataaccccctctagccaagcacaccacacctcaggtttcaccaccatccccagcgggcgacgggcagtcccctctcgcgcctaggtgaatccggaagccgcataggccgtcgcagggcccatccaaactccatcacgcccacccttgcctggatgcgtcagctagagaaaagctacactacaagcccagccgttgcccacgctggcttgtggtaagtacgataagttcttccagggcatcccgcgaaccggtccttaactgccatgggtgcgaccagcaaaaccatgcacccacagcccaccatgtgatttattttaattaaccaacaccaaagcggtggcactaatccaacaataccattagaaccaacagtctaaacattaataagattttccctattgtatcctagttgaactaagcatggctaagcaactcctagtccaacgtctattcatgttataacccaagctaacaaaggagtaaggtaccaaaatagcatggctgtaacaataggtaaacatcccataataacattataaaacgctttgcagctggaggaacctcggcgactatctcgaagtacaccggaacgtcggaagaaccggaatctaggcgacatacaaagcaaacaatacaaacaggctacaaaactactgaaacagagaacaaaccatttttaatggattctacgcatttttcttgatttactgagacttgaatgggcttaaacggagctcggatgaattagttatgaattttagaagattcactgtgtttattactataaaaaaataccttaaataatttattgcgcaataattcccagggctgacgtcatcaagggggtgcggcgccgacatgcggggcccaccggtcagcggctcgggagagagggaaaaggggcgccggcacgcgggccccactcggcagcggctcaagggggggcggtccaccgtggaccgggaccacgcgggtggtccaccgccggtccacgggaccaacggcccagatcgctcccggggctgatcggacgggcggcggcgacctggctcggctcggctcaaggccggccgaccggccacggcgatggcgacgacgcgcgggcacacgttgccggcgacggcaaccagcggcagaggcggcggcgctaagcggcggctaggaaggagagggaggggagtagaggggagagggcgcctcaccgagggtggccggcgcggaggaagacgacggcgaacgacgacggcaagccacgggaggacgacggcaaccggcggacgggcttcggggtgccctaaggaagaaggagagagagattagagagagggagatgaaccacggcggccggcatccatggccgaaggcggcggtagaggtagaactcaccggagcgcgaggggatgcgaattccggcgacgaatcccgacggaggaagggcggacggggtggagttcgtccttgcgaacccgacggcggcgacggcgcggtgcggcggcgagcctagcggcggctagcggcggccagagcggtaggaaaggcggcggcgggtgggtgcacggcgcgggagcgatggggagcacgagggagttcggtgaaatggggaaaaagagagagagggcgacggcggagcttaaatagggtaggggagtctcggacgtggccggtaggggcgagattccgccggccaatgtgggggagtgggagaggagagagagaggcgggattcgaaaatcgaatcccggccatctcgggcgcggccgagggtgggagagagaggggagtgggtgcgggaggtgcggcgcatgcgcgggcgtgaccgacgtggcctggaggaggcggaggcgtgggcgcggcggcgcaggcgcgaggtaggagacgggcccgacaggtggggcccacctgtcggcgtcccgggtgggaggagggaggcggccggcctagctgggccttggccttcggccggcccagcggaggggagaggaggaaggagaatgggctggcggcccactcgaaaagaaaagggggaaaaagaaaaagaaaaaggaagaaaaggattttccctggaattaaaatattgcttgctcaattttaattggttaaaattatttctagggctctgaaaattccactaaaaatcctgttagtgaatttcgacatgtagaactcaagaaaaattccacatgccagattcgattattatttgtattactttcttagggttttctcttgatttgcaccggcattttcttagggtcatttataaattaaattttaggcttgggaggagaacttcagggtgtgacgaacctacccccttaaacggaatctcggccccgagattcggaggagctggtgaagaggtgcggatgggcagctttcaactcatcttccctttcccaggttgcttcctcctctgaatggtgactccactgaactcggcaaaacctggtgaccttgtttctggttcttcttttgctggtatcaagtatatgaaccggcttctccacatatgtcaggtcctcctggatatcaatatgctccgaatcagcttgttctttgggtactcttaagcacttctttaattgggacacgtggaacacgtcatggatgccgatcatattggatggaagttctagctgataagcaacttccccccttcgttccaagattttgtatggtcccacgaagcgtggtgccaacttgcctttcgtctgaaaacggtgtactcgccggagcggagtgacacgaagatacacgtaatcccctgcttcaaaagtgagctcccttcggcggttatccgcgtagctcttctgtcgagactgggcaatcctcaacctttccctgatggttctgactttctcttctgcttccgctaatacctctgtcccgaatagttgatgctcgcctatctgatcccagaagagaggtgtgcggcacttccggtcgtataaagctttaaacggtgccatctgtagactagcctggtagctgttgttgtacgagaattccgcatatggcaagcttttgtcccaagctccaccaaaatcaagagcgctagctctcaacatatcttccaagatttgattgactcgcttggtctgaccatcagtttgcgggtgataggccgtgctgaaatttaaacgggtccccaattcttcctgcagcttctgccagaattttgaggtgaactgactccctcgatcagttacaatctttttgggtactccatgtagacacatgattctcgagaggtagagctccaccaaccttttgcccgtatacgtggtatgtactggtatgaagtgagaaaccttagtcagtcgatccacgactacccagattgaatcgtgaccagatgatgtccggggcagtcctgttataaagtccattccaatctcctcccatttccattccgggatttgaagaggttggagtaaacctgctagtctttggtgctctgccttcactcgttggcaaacatcgcagagtgcgacgaattcagctatttctctcctcatgctgacccaccaaaacttttctttgaggtcttgatacattttggtgctgcctggatgaatggagtactgggtctgatgagcctcggtgagtatcagatccttcagttccttgccgtcaggtacacacaatctttctcccaatcagattgtgccgtgttcatcttcatggaaatcccgggcttttccgactctcatgttctttttcagctctgctatttcaggatcatttacttgagctgctctgacttgatccacgagcgtaggccgtgcatccagagtggctacgaacccgtgttcaacaattcccacgttgagatgctcaaactcctgccgcaattcctcacacatgccctcgatgcatagggcagtgcagtaactcttcctgcttaatgtgtctgccaccatattggctttccccgggtggtagtgaatgctcatatcatagtctttgattaattccaaccatcttcgttgtcggagatttaggtccggttgggtgaatatgtatttcagactcttgtgatccgtatatacttcacagcggttgccaatcagatagtgcctccagatcttcaaagcatgaaccactgctgccaattccaggtcatgagttggataattcccttcgtgtggacgcaactgccgcgagcatacgcaaccactctgccctcttgcattaggacacatccaagtccgtggcgggatgcatcgcaatagacttggaagtctttcatctggtcaggcagaatcaaaactggtgcggatactaatttctttttgagctcctcaaaactcttgtcgcactcaactgtccatttaaacttctcatctttcttaagcaactgagtcatgggtcgggcgatcctggagaagttttcgatgaatcggcggtaataacctgcgagtccaagaaaacttcgaatctgcgacacggtcttcagtggggtccatttggtaactaactccacgtttgatggatcaactgccacaccctgagctgtaatgacatggcccagaagtttgacttccgtcaaccagaagtcacacttgctgaacttggcgtatagctggtgctccttcaacttctcgagtaccagacggagatgctgctcatgttcttcttcagactttgaatagataagtatgtcgtcgatgaaaacgacaacaaacttgtccagaaattccatgaacactttgttcatcagattcatgaagaatgcgggtacgttggtaagtccgaaagacataaccgttcgatggattcatgaaggccgtctttggaatatcctcttcccgaattctcaactagtggtagcctgatcgcaggtctatcttagaaaacactttagctcctttcagttgatcaaacaaatcatcgattcatggcaaaggatatttgttcttgattgtgacctcattgagtgcgcgataatcaacgcacatcctcttcgtcttatcctttttctccacaaaaatgaccggagcaccccaaggtgaagtacttggtcgaatgtaccctttctgcagctgctcatcaacctgcttcttgacctctgctagttcgttggccgccatcctgtacggtctcttgtaaattggcgcggttcccggtgccaaatcaattcggaattcaatctctcgcttgggtggcatggtagtgaggtcttcaggaaagacttctgggtactcgcaaactatgggaatctcttccaatttcctcggattcttctccttcgtgaccactgggatttccgcctcaatctgattcaaggagaccccttgctttggtgagactagtgatttgtacactacggtttctcccttctcgttggtcaaggtgactgtgcgattcgcacaatcaatgactcccttgatcttggtcagccaatccatcccaagaatgacatctaggtctttggattcaggaagaatgaggttggctagaaatggtgatctttggatttctattagcactgaagggctaaaactgaccgaggttgaactatttcccggggtatgaaccctcattggtgtattaagctcttctttccttaacccatgcatccccacaaatttctttgaaatgaaagaatgcgttgcaccggaatcaaaaagtactattgcagggattgagttaacaggaaatgtacccagtacgacctttggttctgcttgcgcctcctctgcagacgcgtggttgacacgagcctggacaaaccttggcccggcacgcctgggcttcgggcatttgtcagcaaagtggccaagctcgccacagttgaagcaagaccctggttttgttccagtctccttcttggcttgcgcggacgggcctgactgtgccggtgccactggtgggcgtggagctgcaccgcggttgggctgacctccatggtggttctgactgccactggcgccctggtggaagttgctagagttgaacgggcggtactggcggacgatcatggtggtaggtccaccctgctgcccgggagcgaagcgcggtcgctgatggtttccttggttggaccggaactgtgccgcctttctcttcctgtccattttatttcgctgatcctcctgacagattgccttgtccaccagcctttcaaaatccgcgtagtccccagatatcagttggttggtcagctcgtcatccagacctgccatgaacttttcctgcttctcggcgtcagtgcggacatcctccgatgcatatcgcgcgaggcgattgaactcatggaggtactcggtcactgtcctgtttccctgatggagtgcccggaatttcctcttcttttgtgccacgaccccgtctggcacctgcgccttcctgaagctacgacagaactccgcccaagtgacttcagtgcctggcgggcgggtggccatgtgattgtcccaccaagctgacgcaggaccttgaagctggtgtgtggcgaaagcaaccttctcctgatcattgcactgcaggagattcagcttcttctctatggcatggagccagtcattcgcctccatggggttggtggtgctggagaaagtgggtggcctgacacgtagaaactctggcaacttggactgagggggagggggaccaaactgctggtgctgctgttcggcgtgctgcagcatcctctggtgcatctgctagtgctgttgctgcatctgctgcatcatggctgccatcatctgagtctgatgtgccatcacttgggctagcgtcggattctcgggaagtggtggcggaccattgccggaatcgctgttgggatgcacaccatcagtgcgctcttcgtcgttggtgccctcgcctgttgtacggctaccattcctggtgtagaccatctggaggaagagcagacggggaaaagaagaaaaacagatgctcaagaactaagctttattatataggaatttaaactgcaattgttctgatctgaattaaaacacttaaaaagcaagcaaaaatccttattaagacaaccatatcataggcacatgatatcgaccgtcgactgacccacaagcaagcaacctaaacacacaaactaacaaataaatgctagacagtcgataaactaatggaaaacgagcctaatgctcggaacggctcctgcggtcggtggagtcgaaggcgtcctcctgctcgtcaccaggtccctctgagcgactcctggagcctggcggataagtctcgccgctgcccggctctgagccactggagctgctgctgctgaggtcgcgactgccactgggagtagctggcaaccaacctccattgccactggcagggaccctgacggctgatgtaggcgcgaaggagagagcggatgcaggagctgacacgggaacgggagctggagctggtgctggagctgcaggaactgctggagctgcgggcggaactggaggtgctgcgggagctgctgatggaggtgggttcctgggcgcaagctggatgcgcatgggtgccgttgtcgacttgcggggtgtagtgcggatccggactcctcctggcgcgtgaagaccctttaacagagcattctccctcttcaggcgcgctatctcgtccttcagagcgacgatcctcatgagcttcccatcattcaaggccttggacgccttgtgcaggtccgagtgcatcctgtccatccccctcatcacagtgcacatgtgaccaaaggtggtgtcattctcgccggctgtcggacggaaagtactgacatcatcaccgctggctcgacgagggtgaaatcggtatgccgtgtcgtggaagatgtagttgtggcgctcccgtagtctggccatcatcaggtatgctgcctcctgacaggcgtgatctgctgtgccttcggatgcctcaaccaccatattagctaggcaggtaccgacgtagccatggacctctaggcggacacggtgaggaagctcgccgctgagtggtggaacagtcgtgtactctggcgcgttggggtagcccaccaccagcgtcatacgtgctaactctgccacaaagtcgatcatgccttctccgcggtggttgggtgggtggccggccatctagagaagacaaaggagtaggatcaatgcatgcttaaatccaaatttaaataaagcaataaaggactcaaataagagaatcgaataagagcgaaattttatgcatagataattttgcatgagagcgaataaataagacagacttacataacgataaaataatggggaaattagatacatactaataataacaataaaggtacaaataccttgcaacccatattcctgagctaggacctaatgcatttcacccatcaaatcccaactgactgacgaataaaccccaaataattttactaaaaccctagactgacttgttttgccaaatctcacttaaacaagcgaccaagatttttcccttgaaccacaagaacagatcccaattttcccggaacaaatccaattgcaaagaacatatgcaatgaaaaggattcagagggctcttaggtttttccatttggcttgtcctacggtcaaggtcggctctgataccaacttgtcacgcctagaaattcctgaatagaattccaagcagaatgtgcattaaaatccccgtctaggaccggccgggtacacaaacgacaatgttgacattcagatccatgtcttacaaacatca

SEQ ID NO: 26922 - DNA, 7927 bp, Oryza sativa
tgtgttatgatcttttgcttgtaacatagtgttctatgttgatttataattatgcatagcttgaaatgctttgaagagcaactttttttttttgaaacgtacaatttttttcagccatggaacaaaaatatgttcattcttgctctgttactatttgtattggctatttcaggactagaggtgtattttaccttgacatagcatgtgttttcccactgtctgctggacttctgttcctcaatgctatattatcatcttttgcagtttaagcgacaaggaattgagataaggcgtgtggtcgaaagtgacagtgagggatgtcttcctgctgacagtgacttgcacgggtccaaacataagaacatacatcagaaagtgcgtaaaccaagagccttccgtatctcgcgcaatcatgcctcagagaaatctgaacaacaaaaacagcaacatgtgagcaacaatcaagaatatgaagagattgaggagggagaactgatcgaacaggaccatcaggatactgcttccagaagcaagtctaaccaccaaagaaaagtagtactgaaatcagtgatagaagcaagctcagcatgccagggaggggtgattaatgcaacatcaaaagacgctgattgcagcaacggagctacaggggaatgtgataataaacatatacttgaggtaatgaaaaagatgcagaaaagaagtgaaaggttcaaagcgtctattgcaacccaaaaggaggaagatgaagacaggaaagaatcgttggccgtgacttgtgatgtagatgacatcaagaatcagcgacctgcaaggaaacggctttggggttgtagtggttaagatgctagaaacctttaacaaagctcaaacaaaccttgtgtcaggcatagtttatcacagaccatcaccatttggttgagccagaatgtctagtaaacatctctaaccaggtttgatcaagactctaacgctccaaaggtattcaggttcagaaaccgtagatcttttgtttgtttggaatgagaggaaaaatatacagagcattcaattttttgcctatgtaatacatttacaatgttgacattatctaccataattcttcatagtaatatggtagaaaatggaaagaaaaactgaaagtttatgcatatgtctgtaatggattgctcccttccaacagagtattgacttctggtaaactgggaactgaactctccatatgtatttatacacaattttggatctgagacgctgttacatttctgcttgtcatgcaattttgcgtttatttcaatagtaccgaagttaactttctttcagctgtgatgtcgtccagttatacacctgtgcacttgttctgatatttgaatgacatttcccgtggatatcctcagctttggagatgttgatattgagcttttagctttgtttggaataatgggctagtttggtttaaggcctaaattaggcttaccaatatttggcaatttcaatagtgtttagtgtctattttgtttgaagccaaattttggcatgctttcttaggccatttcaatagtgaacttaggctattttggtttcaatccaaatacaactttaccttatcaaaattagtcatgcaaaacttatcaaaatttagcattgtcaaaatttggtaaggcctatttagaccacaaaccaaaccaacccaatatgttctctcctttttttccctcgagtcctgcacgaaatatggtgccgtgttcctgtaggtagcttcaatgttccagaacgcattcggcatccactcgcatttgtgaacagtactgtttgtttgactggagtagtagcatgcagtagctgccgtgttgataacttgatatatctccagtcccttccgtaaaattttctgtctccaactcgagatgggcattcagcctcgtacctctaaaaggaaacacacacaaaaaagaaaaaaaaaagacagaaaaaagatagagagagaaaaaaaaagctttctgcaacagaaatacgccactcgtaccgacaaaaatatcgaagcagttcagtgaaacccggcccgaccccacctgtcagcgaaggcaattcgaactggcgcctgcatcgccgacgtggcgcgtcgtgcgcctccaacccgcaccccccaatcccccgcctcccgcttttacccctgcacccgcgggtacggcattaatggcaccgcatcttcgagggcaatcccgtaaatccggtaaccgcctcctctcccttcatcacaaaggacgcgcctccctcgcttccacctcgctgctttgctacggccggagcggcagagcacactccggcgaggggggccatggcgatgcggctcttcccgtcctcgtctccgctcccgccgccgccgcctctgctcccgagccccagcgcgaaggcaccgccgtccgcgcccttctcactctccctccgcctccgccgcgcgcgggtggcagcctccgcggccgctgcggcggggggccccgagaggggggcgggcgggtacgagggggatgcggaaggcgagggcagcagcggggcgttcgacaggggaatgtcggagatcgcgaggaaggtgcctctcttcgagccggcgaggggcgacgccgcggcggtcgccggcgagcggccgctgcccatcaacctcgagctctggctctaccgcgcaaaggtgcacacgcggaagtacgagttcgccgacgcggagaagctcctaaaccaggtgcgttccttgagaattgtggatatttcgcaacgaaagcagaataaacacgcacaaaaaaaaatgctcccacagcttagcaaattgacaaggcatatatagctagttgaagcctgaaggaagcgaatgttttcctcctatatcgataatataggggtttaacaatcctaatttgagttgtttaatagttgatggatcttgcgccgcgtatctgatttatgcagtgcatcatgtattggccggaagacgggcgtccatatgtggcgcttgggaagctatacagtaagcagtcgaggtttgacaaggctagagcggcttatgaaaggggttgccaagcggcacaaggtgaaaacccgtatatttggcaggtttgcaccggatcacttctcagcctccatttggtaaattgactggaaaaaactgtacagcaccaaaaaaaaaagtagcgcgtgaggtttcttctttaacattccctaagatatgttaatattccttagctgtgtttggagttcaactttcaaagttctccaaatggatgaccatgcccattagcaattcacaatgaagagttattttaggcatttgagcttcagttgcatacattgctttcctctcaaatatggatgcaagatgaatagatctagtccattgcactttgttcacaggaacatcaatgtgattgatggctgatcatgagatatgaatacactgctcctatcatggccatttgccctcttcttttcaagtacttaactcatatgtcaaacataatctcttggattttctgaataagtctaaagacttttggtttgatacaccgggctgggatcatctttcacgatccacaatttcacactgaacaaaccagtccactgttttcttatgatcatatcttgttcatgttatagaaattaagcatataattaagttcctgttgtccttttgctttgagtatgcagtgttgggcagtcctagaacgcaaaggtgggaatattcgaagagcacgggagttatttgatgctgctactgtagctgatgcaaagcatattgcagcttggcatgggtgggctattttagaaatcaagcaaggaaacattaaaaaggctcgaaatctacttgcaaaaggtctaaaatattgtggaggaaatgagtacatttaccagactcttgctctgcttgaggctagagcagagcgctttgaacaagcacgaactttattccaacaagctacccaatgcaatcccaaaagctgtgcaagttggctagtaagtatttgcttcataatttatccattttagtgcaaataaaaactgcatagtttttttgtctaaactgtgaacttatgtacggcaacttctagtaggcatgggctcaggtagaaattcgtgcagaaaacaatgccatggcaagaaaactctttgaggtaataatttattttctatttataattgttcccatgaatgtttgcgttagttcttcggtactcatacttgaaagttttctaacagagatccatccatttccacatggcaaattagaaaagatttcccaagtagagatgaaataatctttaatccaacccagagaactgtgctttcaaaatgattttactaccacatatcaatgcaatgatgtggcaataatttttataacttaataatatgctgttagtgtgattcactccatagttcattcacacctgcatgggatggtttcagtcaacacaatgctgtctacaaagtataatttcgaatttctttttacagaaagcagtccaggcaagtcctaagaacagattttcatggcatgtctgggcactatttgaagcagaacaaggtagcatcgacaaagcaaggaagttacttaagattggtcatgctgtgaaccctagggaccctgtgattcttcagtctcttgcactactggaatacaactactcatctccaaataccgcccgtgttttatttagaaaggcatctcaaattgatcctaggcaccaaccagtttggatagtatggattttctgtgcttatctctcttttttttataagtaatatattactcatttgagccgcatttgtttttttacacctctggttaaattaacttgtagggtttgttttagtattatttacctgacatttcgcaaatagctatgattaattagtttatggcacttcttgatgtaccttgcacacttgagctgcatcttgcaacttgcaagtgctctggctgttcaccttcctgtcacaaatcacaactgaatatgcacacgatacaaataatttgggatttgatggatgtaaaggttcagttgagtgcagttgtctgaattattttgttttagttactttcaagatgctatatatctcatcgttacatttgtccatatttgtgctcatttaggctgttacttgggatctcccgttcaacactacctttagaatttcgtttttctatttgcacttatttagacttgtgcaaagcactatatatcttacaatcaaggaagcatcgcatgttcctggccagagtaaagtaaaaatatttgttatgaactgttagttggtagaggtggtattaagtgagcaaatctattacaccaattttaaatccctagatggatctgtcttgttttatcttgcaaactgtcacgtttgcatttgtttatggaatctcttttatttggactatctttgaagcttagctctgacttatggatcatgttataggcttgggggtggatggaatggaaagaaggaaacgccagaacagcaaggacactgtatcaaagagctttgtcagttaattcaactaatgaatgtgctgctcgatgtcttcaggtaaatgatctattgatggcaatccagctcatattgaactggtagctatacgtttttgctggccgatagctataggagtaggtttttgtctcacgtggtaatgtgttactattgaataataatactatgagtttcatggtttttggaagatgaatgcttctatgtgtgaagtttcttctttactggaactgctgtactcatttgtgatcgaaagactcaaatttctgtacacttaaaacatatcctgccctatttttgtaggcttggggagtcctagaacagcgggccggtaactacaccgctgccagaagattgctgagatcttcactgaacataaattctcagagtgaggtaacatggatgacatgggctgcactagaggacgaacagggtgatccagttcgagctgaagaaatacggaacatctattttcagcaggttagtcccgggtaactacttttagatatgagtactgggtaactttagagtagcatctttctcaattcatgtttattgagttaaaaggcagtaaaatggaattatttttcttcatgttttgtgattaccaatttcatttgcatcacccatgaacaacgtattaacaacaattgctggtgttcgcatcatctctgttgaagtttctccctgatcattatccatcctgacagcgtaccgaggttgtggatgatgcctcctgggtcatgggcttcctcgacatcattgatcctgccttagacagcgtgaagaagctcctaaacatagaccagccttcggggcctgcaacacgagacaatccgaaaagcactggagagccaagcaatacagctaccgtccggacttctgccgatgcagagttttctggcggttcaagagcagaaggatcggacgcttcggaccttgctaacgccgatgacaaggagagcgatgacgctgcagagacaccagagagcgatttcgacgtggatggattcatcaggaggcggctagccctggacccggccgagctggacgcggtgcttgagggttctgatcccaggggagttgtttccaggaggaggacgcagaggttgcccaggaagccccttcctcttctccctgttccgtaaatatttccacttcagttcaacaatgcacatttgccatctacgccgtgcgaagcatcgaccactaacagtaacaggtaccgtgactcgcgagatagttgaacatacatatctgtgtatatctctcagaagaagagcgcggcggctgccattagcagccacatgtttgttactagagttgttattggtccacccaggtgtatgtaattctatcattcttcaggagcagtgtatctgtgtacataagcgcaatctatcaatttgtatgtgctagtgaagaattcaaaatctgcggatatcacttcaatccatcttatgccaattggataggataaagaccatcacaaaggggtcatgaaactagaaaatgatttgattctaaatctgagttatccaaatgtgcgccgttcatgttgccgggtagtacaaattaacaacagtgacaggaagtaaaaaattaggaatcagcaggagaacaaaagctgcaattagggggtggtaaacgatctaacattttaggcttttagcctacaaaatttaaaggctggttttaaaataggatgaacaaaatttctgtttattttcaaattgggtttaaaataggatgaacttttctatttatttataactaaaaatatatgagaattagatctttatccataatgatcccatagctgcaacaggtgattacaaacaacaattaggatcaacagtacatacatctgtgttggctcgaaagattgcaagaggacaagcttagcaatgcactccctccctaatacgccggcctgccccagaaaactcccggcggcggcggcggcgattgctgctgctgcagctgcaaggtgggaggaggtggctgatgcagcgctggagctggcggcgatctgatgtggccccagtgcggcagcggcgacggccgcggcggcggaggttgagcaccccagaacggcgcgccccagaatggtgccgggtaacacggcggcaccgtcggtgggctccagaaaggtcgctgtcccgccgggggatgctgcgcgaacgcaggcgctcccgggaacggcggcggcgccagtggcaccgccgccggcaacggcaggccccacgacagccatggcaccaccgcgggcgacgcgccgaagtgtacgggtcggggaggaagcggcgccaacgtcgggtggccgcaatacggtgggggaggaggaggaagccgcgccaacgtgggctggccgtaataccgtggggga

SEQ ID NO: 26923 - DNA, 9933 bp, Oryza sativa
  unsure (1)..(9933): unsure at all n locations
ggtggcggcaaccactccccatcttccttctccgccacctccatcgacgagccaccgtcgtcgggctcgggcggcctgtgaccgtaggccgagctgcggctccgcttggaccgcgcgcggcgcccggcgagcacgaagtccgcggggcggggatcgggctccaccggctccggcgcgtccccgggcgacgcggccaagacggccacggagccgatggggcactccgtccacccgatggcgtccacgtcggcgctcaccacgtcggcggcgatgacggcgtcggacggcgggccctccgccgcgcggtgcagcgtggagcgccgcggcggctgcaggtccacctgccccaccagccgacgcatgatgtcgccctgctcgcaactccgcctcgtcacacataacgctcgcaacaacgagagagaaaaaaaaagaagaagaagaccgaaacgtatcgagaaggcaaccaaccaaccttgttggagcggtggagcttgacgaagccgtgcatggagatgatctgtgtgccgcccgcccaccgaagtacgtgacatgcatgccgccaacacagaaagatcaagcacaacgaaatcagaagcagcaatctagactaaaaagaacacaacacaagcagacgacggcgtgcgggcgtgcgggcgtgcgggcgtacgtacgtggttgaggtggtcgatggtgaggcgggtgccccatgggtcgacgaagaaacggtggtacctctccagcgtcaggggccctccctgcatctccctccctcgccccctcggcaccatggtaggttcttcctccctcctctgtttctctcctctcctctcctcttctcttccccgacgcaactctgctttcacctctaggagtctcctcctcttgtttctttccgctacctctgctctgctctgctcagcgctgcacaagggaacctggggagcaaaagcttggttgttggtgggtggtggggcccacctgcaggctttcgcacaggagaggaggattggatacattttactcttgaccgggcctgaacaggaggagatgatggaggagccgaggtgggaagtgcgtgacgaatctcgtcagatcattcatgctgcagcagggtggttgcaccaaaagagggattatcaaagccattgctgtgtccggttcgtttcgcgtgttgctcatcagttgatcgacgagaacgataaggtgaaaatacctgcccgggcgacgcggcatgctgccttgccggcagagggctagacagagcagcttttgccttgcctttccttgccggcatgttgccattttcgttcaccaatgtggtggataggtgaacgtgaacactgctgcacacctctgcgtttcactattctttcctggtttcaatgcacccatatctttggtttcaatgcgtaccctgataaatgcaggactgcaggtgcagttccaaagattggaaaagaacgttttaccacctaccatatcatgccacaggacaagaacattgcaacccattcttggacgaaatggatgaggacgagagcattgcaaacatgattcttggaggaaatggatcgaccaatacacgtaataagtgataaccacgaaacagcaaacagctttaattgagtaagcatgttaggtttgatcctttaacacggatggattcatctaagccggtaaaatttacagaccagcggtaaagcaaaatgtaggacgtcaactgaactttaaacaccagagctaagctgagcacaacccaaaacaaacactaatgcaacttagtactggcggtgattagtactactagtaagaaccaaggagaggccatggcgtcgccgccctgcagatggaggagccccgggctccgtcaggcggtggccgccaagttctcgacggacgggagcgtgagcaactgcacgacgcgccgcttcctccccctcatggccgccttcccctggcccttcttgcaccgcttccggatcaccaccgccccggggggcgcgggcgagcaggcgctgagtatgctcggcggggagacgcgctccacggcggtggagccagggcggatggccgcgatcggcatgtgggcggcggagggcgccgcgtcgccgccgccggcgcggatggagaggagggagccgacggggcactcgcgccagccgaggtcctcgatgtcgtccctggcctcgtccatggtgagcagcgcgtccgacggcttggcggcgccgcgcggtggcgcggccgcgttgatgccgacggtggagcggcgcgggcgcatgaggtcgaacttgttgagcgcgtccacgatcaccggctgcgagacacgcgtcacgggtttttgcggaagaaccgaaccgaaatgggggcaaatagaggtggattgggggggtaccttgttctggcggtggaacttgatgaacccgtgcatgaagacgatctgcgcgacgcgaccagcagcagaggaagacgatgagtggagggagaggggggcgggacgggagtcgggagggagggaagagggtgtgggtagtacatgtacctggttgaggtggtccatggtgaggccgtggccggagcgggtggtgaagaagaggatgtagtcctcgagagtcagccgcggtcgctggtccatcggcagcttcggcatcgccgtcgccgctccctccctgtctctccacacgagcacaccaactacgctacacgccctccctccctccctccctccctcccgcgatccggcgaccgtggcacagcgcggaatcgtttataggtgaccgtggcagctttgcgaattttggggggattgggaaaccaagccgggagcgggcaccaaaaagtttccgcgcgctccagccccggcccgtcccccagaacgcaccgccccagccagctgggtctggatggcccacatgtcagtgtctcattttcctcttggacggtaatcaaagccttgcaccgaacacccaacccagagaaaaatttcatattccccgttcgaacctaatgttccagttgtatattagaaatttcatattccccgttcgaacctaatgttccagttgtatattagcggcatgcagctaggtcatacgttggatataaacaacacaaaactttacttatttcgagacggagaaattaacatttaaaaaataaatacattatcaaaatatattaacgttatatttaatgaaaataatttaatgttatagatgtcgttaagtttttcataaatttagtcaacctatgaagtttgactagaaaagaaaagttgtagtttgaaaaaaaagaggttaaaacgatttataatataaaacatattataaacggagaaaatagttgtctagaacagaaaacgggcgtgcacatggttgatggaaggacgttaaacagcgagcaaatggggcatggtcgcatagatatacaacaagcgtgcaagctcaccaggaaattgtatcattcacatcatgtaatctacatgttacagtcaatatatgtttcatcagggcagaagaacaaaaatggagagaattttggtacattgggttcccccaaggcctagcgatcccaccccgacggccgctttctctccctcgtgcgatccctcgagctgcaatccaagagaattttgaccgttggttagcatacacaacatataacaggcgtgtcataagtactaacaaaattaccagggaagcagtactatgcaagggcacgcacctttcagggtttgggttcgcattttcaacagtgttttctgcaggtctggaagcagggacaaaggagggcgcaggcagtactgcccgtgcttggtttgcgtctcctcctatggtgccaccagaaacaaaaccacggagtgccggtctcacaaaggaggaaggagcacctcttgaaggtgcgctgttgcttggtgtatttgatgaagaggcagagacaaagctgctcttaaaattttgcatcatccctgtcttcaatgaatttaatgcagcagatcttggagcaggcaccgatcctgattcagcattgtaccctatgccaaggccaaagtcaaccccacgtacaccacgcccacgaccacgggcaccgctaccgccgccacccccgcctcctccaccttttcctttgccacttttcttcccacctgatgaggataactaattgtcagaacaatctgccacaaaaaagctctatgccatctgttctgcgatgaaataaacaagatataccttttcttgaatcccggtttgctctgaatcttccatcctgcaattcatatcaccaatggatcagaaaaggaaataggttgttcatgcaatagtgactaggagaaagtttagtgatagcatgcacatgttgcaacttttcaatttaaattcactgtgttttaactaaaattgaatgcaaattactctgcatagagagacaatacaaaatgtttgtgcataagcaaaaactcaccttcattgccagatccattagttcatttggcacatcctgtcctgcagcaatcaaacaatgaaccaattcacctgcaaagcgcacctccttctgtgtaatcagagtatatgcagttccatctttatcaccagcacggccagttcttcctatccggtgaatatgcatatccatttcttttgcaatatcgaaattaacaactgttttaatnnnnnnnnnnnnnnnnnnnnnnnnnnnnnnnnnnnntgctactaggacgtgataaaccccggatttgaacttctgcaatgtctccatgcgagaagcttgatccttgtcaccatgaagtgctgcaattctgaaacctctctgatttaactggctctcaatctcatcaactctggccttcttagctgcaaatacaagaacgtctccatcatcaatcatcccaggaagtttttccagaagccaaggcatcttctcagcatcagaagggagtacatttacaacttgcttaatgtcttcattagcactgccaacctgacctactgtaactctaatagggtcagtcaaaatttctctagccaaacgttccactttgtatggcattgttgctgagaaaagcaaggtttgtcggtctggtctaatttgaccaacgatggatcttatctgaggctcaaatccaagatcgaacatgcgatcagcttcatcaagaaccaaataagttgccctaaacatcttcaatgccttcatcttaagcaagtctattaatctccctggggtagcaatgactatttcacagcctgccttcagttctttgaattgatcaaatttggaaacccccccatatacagcagcaactcgaagattgtaaggttgggcaaacttcttagcttcaaggtatatctgatgtgccaattctcttgttggagcacataccacacctattggcccttcttctttctcaagctcaggctgatccataatgtgaacaatcatggggagtacaaaagctgcagttttgccagaaccagttttagcaataccaatgatatctctgcctgaaagtacaattggtaaagcctggcactggattgtagttggtttttcataaccctgcttggcaatggcattcattagttgtacaggaaacccacaatctgcaaagcttttgattggtcttggcacatcaaaacctgaaactcgaattgccaaacttttcatataatcagccacctcttgctcactcatccctacaagagaacagtaaggtttcattcagtacatgactattcatatcacgcagaacgaaaaaaaaaggcataattgtcatgatcaatcgtgtctgtagatgttattaccatatcaaacatgaacaaatatgtgcataactcaaaatttcattgacctgctaatataggaaggtacacagaacaggaaagagacaaccaatgctcaactagctgaaaatgatggtccttcatttggacatacaactaatgtaatgtttaagctggaacagggaaagtaatatttgggcctatgactagtaaaactaaattctctagctagtattctcaaatacaataacaacagaaaaaaatccacaatccaagcgggaaatgttgttacatatggcactaaagaccggaagattctacttgagcacaaatacagagaaaaacgtcccttaggtcatgtgatgcaaatgcaataagagtttgctcatctgtcctttcatcatgagtgtatatctcaacttctatatatatacagttaggtaggccagatcaatcttgctattgagtattgacaatttgacatatgccagggctgcatttatccatttagaacactagcaagtagcttcataagcaagtctagagacagtgccaaagtaattcctgaattcctaatgttgaattaacaaacctattggaatgcattacaatagtacattgtaccattgtcaaaaggggttatggataatgatgtactgaaaaattgcttcattgcgaagtgcacggccacatgcacatagagattgcaaaaagttataagctagcgcatgccttctcaaaataacaaagtggcaacatctattataatctccagtgccaaaccataaacaacgtatcaaattatcaacatagaagaaatcccagaactacaaacagtttccaaatcctatttcatgacgatgattttcatttgacatggttcaagctggtaatttcaccattgagatttcagtatccaaatagaacagtagttggatttcctagctacaggtgagacctaattaacctttgcaccataaaagcagagacccaggttatcataattcataagctcaatgagacatgaaatatgctattatacggggcaatgtgcttcacctgaaaccgagggcttctcctcgtagaaatccttgttgaagggttcatactcgatggtggaatggtcgagcggcggaataggctcgatcttcttcttgtccaccactatggggttgtcgtcggagtcgtactccatcatgccggcgtccacggccttggccgcagcgtagacctcctcgtcggagtcgtacccggcgtgcatggcgtcggcggcgagcgcgagcccggattccttcttggcccggaggaagctctccacggggtcgtcctcgtcgtcggagtccgcgcgccggagcgcctcgggcttgggcgccggcggcggcgcgcgaatctcctcctggatctcggccatgaaggcgtcgagcgggtcgatctcctcctcatcccccgccgccccgcctccccccgcggggggcgcgtccgacggggccgccgcgtcgtcggagaaggcgatgtcgtcgaggtcggggtcgtcggcggggacgtagaggcgctggggaggctgggagcgctcgaagctgtaggaagtggggcgagggatgctgaatcccccgagcttgggccgcttcgacatggccgggcgggcggggggcggtaggtagggagaggcggaggcagcgggcgggggagcgcgcgagctagggtttgcgacgcgaggaagagggaggaagacgatggcaagcgcgcagaatttcggttgggtcgtcgactcgcggctcgcgggcgctggcgggctgggccgtggctgtggtggatctacgacggatggaaaaagtacaccaaaggtacctcaacttatcggagagagagcgctaagcgtcggacgtacggcgccagacgaaaaatcgaacgtctacttctcgtgcgaccgtgcgatgaaccatccatctcatgcagtttgcgtcagccatgcatcatacatgaattaagctagctttaaactattttttctcttaaaatatttatctaaatcatgatccgattgtaccattaaatccgttgtaattaaatctttaaaacaagaccacacattaatataatccaacgaaaaaaaattttagcttattattaaattatttttaaatattgcacgttgttgcactaagtatatcggaattgtttcactaagtagatcgaaaatgtttcatcggacgctatttcaccttatatgaaaataattttcagcgaatagtgaaaggatgtttcaattcactgtgatatttgatccatacatagtgaaatattacgagtacactatgtgaaacattttaaaaattgaaaaaaaatcgtacggtcaaatgttgcagttgatcaacaagtgaaacagaaaaatagcaactgaaatatttaaatattttatgaaacatgatgaaaatacacgtcgaaacatgccgctgtcacatatgaaacaacaagtattaacggtttgaaatatatgtttttcttttatcaaaatataatcatgcaatatcttgttgtaaagatttaattacaacgaatacaacgatgtgatcggatcatagattgaataagtaatttaagagaaaaatcattttgaagcttgctaaaatacatgtatgtatgcatgcatgaggtggagagagtagtagcaggtagtttcaggaattttatgaaacacactgaagacacgtattgaaacatatcactatcatgtatgaaacattttgttttaatggtttgaaacacatgtttttcttttgagataatataattatgtgatatcttgttgtaaagatttaattgcaacgaatacaatggtgtgatcggtttgtatatcggataagtaatttaggagaaaaaatatttaaagagaggaggaaagaatgaaaagaaacggctagacatgtatgttacagtgacaagggttcatccaatccacaggcctgatttgacgtcaacggagaaaaagaagaaattaagtaataaggagtaagctggttgtaggtgttcgatgttttctgtctgatcggatgttcgaagagaagcattttcgcagcttatcatcgagttacaaaatcgtcccccaactgcaaaactagatatatgacatctctcaacttacaaaaccgttcactttaggtcattcggtggttttgaccccggttttatcctacgtggcagctgagtcaacatgggacccacatgggacccacgtgtcaggatgtccacgttagcaccttttcgctttccctcttccttctctctcgcactcttctcgttctcgttgccatcgtggtgctgcatcttggatgcagaggatctcgccctacgcgacggcgagctgcatctgcagctgcgacgcctggttctgcaggaaggagatggcctcgacgtagccgtaaaaaaacggagcggttcattaatgcgtaattaattaagtattagctattaatgcgtaattaattaagtattagctatttttttaaacatgtatcaatatgatttttttaaacaactttcatgtagaaactttttgaaaaaaaacacatcgtttcgtagtttgaaaagcgtacgagcggaacacgaggaagaagggttgggaacacggagcaaggaacacaccctaagatttaaatgtgatgatatgttttcttctttcctcaatccttatttcgtccacgaaagaaggaatgtgcggtacataggagtattattttaaagacaaacaaatgtgataagcatataggtatagtaggctcccagtaatgattgcgttcgtttaagcattttgagtgggctaaacagtcgcacatgaaatgaaaaaagtcactgattaattaagcagtattcgctattataaaatttaaaaataaattaatttgactttttaaaaagaaaatcgtacatagaagatattttataacggaattgctaaccttctttcgacagaaattgcacctccccaaattttgcaatttttggaacatcggatgagctttgagattcgtgctccatgctctcttccaactccggcaacctcctcttcttctccggcgctggcgacaccctagactccggcagaggaccctacgggttagggtcccggggtggggtgggggtgggagggggaggggaagga

SEQ ID NO: 26924 - DNA, 5430 bp, Oryza sativa
cgtctcgccggtgccgttgacgcccttcggacagccggcgaggcgggcggtggcgatgggggatcgggcggagcagagaaaagagcgatgggggcggcagaacaagcgatgtgaggggaacggaaggagaagagctagggttaatgtctttgcacgaatcttaaagcatatccgatggtaaaaaatttgaaagatgggagatttgattttctatcaacagatatatagacagtcccattttataaacaatactcccaccgtttcacaatgtaagactttttagtattacccacatatatataggtgttaatgaatctaaacacatacatatatctaaattcactaacatataaatgaatgtgagtaatgctagaaagtcttaaattataaaacggaggaagtatatctttatccgttcgaataacgtactcagggcaagtactataatgctccataagctgcccctaaatgtgccacattggattgagtgatgaggtggaggagagaagtgaggagagagatggtgaaccacccctaaatgaagaggtaacctccacacaaatttcaagaggggtgtgagagtataagagacattggtatttgtgtactagaggtgacatattgtataggttacctcttaatttatgagtgaatgatgtggataaatttagatgtggcacatctaccataacacttgccctcgtgagaaaataaggaagtggctggcaaaaagctcaaaagaactctaatgaagcatgaatgtagtgggaccgaaggctgcttatatcctgatcaaaccatctctttcgtaggagtaccaggcaagccaattgagatcctctgtagtactgcacgtgcagtactgctcactctgtagtactgcacgtgcagtactgctcactgacatgtgggcccgggcgcggtactgctcactgacatgtgggcccgggcgccagtgctgcagagtacctgcatcccaggcaagcataccgttatctgtcttttctttattaaacaaacaattattatgttctctaaagtttgaggagaaggggattgagaagattgggaagatacgcaaaacgaggtgagccattagcacataattaattgagtattaactattttaaattttaaaaatgaattaatataattttttaaataacttttctataaatttttttttacaaaaaatacaccgtttagtagtttaggaagcgtgcgcgcggaatacgatgggctttctcacccaatccgccatgaacgaacgcaccctagttcaccaattaagcgaccctaggcgctgagaatatctccttttcaccgtgcggaagacggagaaatttccttcatgctgtaacctgtaatgtatcgcctgctttccttcatgcaaagaaatttccatcatttatcctgtctcgtttcaaatggtcctttgctccacgagttaatccatggacctattaaataaagcataaccataaaaagaatccgatgtcctgacaaaacactgaacaacataattcagccatgcatgtaagcgtctggaacgcaccaacctgggtgaccagggactaattaaactactaccaatgtcctaggatgcatcacagtgtcttaatctaatgaatgaacagtaactgtagttactaagtaagctttggatacataaaaaaaagatccttttcgaagtccacaagtttcaactccactgctgctccgtagaccgtaggtctatctattagcaatatttaataggtagtattactaatttagttgtatctgtatatatatccacactataacttttactatcacatcccttttgagataaacatagttttgaaataactacagtcaattcttaaacttttagcaactaatggacggcgtatcatgcgaaatgttttacgattttgatttgtaaaaagaaacacactttggcatgattaactttcaagatcgtgtcaataggaatcgctctttggtttcaacgagacaacgacttaatgatgtgtggcgcattgaatggcctattgaataaatttacatttcagccccttgcatgtttcagcccataagcttaccaataattcaatatacagtacacatttgatttacaaccatgcccctccggacccacttgtcagccactcgaaatcctaatttcctcttatttcacgcccatctcgatctcttcctcccccttttccctcttccccttctctctcccgcgtgccctcctccgccgccggtggatgccccggcgtgcggccgctctccgctcccctgatctccggccaccgagcgccggcaatctctctctcttgccggccttcgccgcctcagccacggcgccaccgacctgcatgcgcggtctctcacccgcttcccaaaaaagccctcgagctgtactgaaattgtgaaaaagcgagtcccgttgggtagagacgggtggtgtgtgtggaaagcgcggggcggggcaggggcaaaggcaaagaaaaaggctgctccaattggccctgccaccgaggcacgtggcctcttctgtccttgcccctctgcgctgcgcctcactcccggcctccctccctccccacccaaatcttcctcccccttccccttcaaggcctgggcctgggtgcttctccggggcggcactctggacggcggcggctgcgaagcgggagtgtggaagggtaacttcactgctgcctcgctctcctgcgggtttgttttttttttctcgttttttttcttgggcggcgacttcagggtggtatgttggtttcgtcggtgagacgaagattgagggtttttttttgggggttgtttttgaggtggatgttgtcgtcggtgcgtcgatttgaagctggggaggcttggagtggcaatgcggccgcctacgagtagtcctcgcgcttcattgcggtggtgtattttggtctgtgtgcttgtgcgtgtgtttttttctgggtttgtgcagatttgggattattgctgcttgtctcgcagtttttaggttttgtttggggggtttagggatgccatgtcttgcccagtgcgcggtgctttccctgttgctgcaacctcgatctagtgccggtggttcaatttgctggtttatggcttcgctaccgccgcatacttttaatttttacttgttctcttggagttcatctcaggccttcattgcctgcaatgagtggtaccttttgatcattgaaccaatttttaggtgctttacttagacgttgtttaagaatcaggatggtgtgcttagcattccttgctattattctaatggtaacccgccgtgcttgctgtttttttaagtgcaaagtttctacctatccattactgacatccaggttcgcattaagtaaaacatgaggctcacctagccaagggtgcaaaactctaataacaaccacaatctttggcagcctatgaacctccacattagaatccatacccttgtgcatgaaatgcatgcttagctgtcatatttcacaaaaacaagtgtgcaacttgccttaaatcatgaactatcctctagatggtatggtgttggactgggctgtgagattcagagactaatgatctggtttgtggatggagtagtggcatgggctgtacataacatagccaagatttctatctcccttcctttctccttgttcttctactcctaatctcctatacctctcttcttcacagatccttgccagtttctcttttgattgctgccaataaattccatgtatattacaaccaaactacacgcatgctagcacattagtcactagtgctattggtgataagcattggagatccataacactttgatgcctttatgcaggttgaggtgtgagaaccaggtggttgctccaacctttggggttcaaggaagatgggtttcatgtcagcgaagctctttccttcgtgtgagagtatgtgcgtgtgctgtccagctctgcgcccaagctcgcggcgccctgtcaagcgttacaagaaactgcttgccgagatattccccaagacgcctgtatgtgtttgcttttcactttatttctgtgcaagtttagattagcaagtcctgtttggacattgttgctgcaactttaatgcattgtgctgtttttgatctataagcagttaatagtccttgttaacctgctctatggagtttgcctatcaaatggttatattctccactgacgacatattcgtggacaatgcaacttcactgtcaagtgtagcgctgctgattttgcagaatttacttgcaggatggccttccaaatgagaggaaaatcatgaagttatgtgaatatgcagcgaagaatcccctgcgcattcctaaggcatgtgctgatatcatattgctaccttttattatactgataaaatactcctgagtatgtggttaatttttttcatgtttccatttaccgttgcttattgcagattgccaagtttctggaacagaggagtcacaaggagctacgttctgctcatgtgaactttatcaaaattatcactgaggcatacagcaagctactcttcatttgcaaggagcaaatgtgagtgtgcaaacttattggctgacccttaggtttcctatatcgaactgttatttgacaggaagagttcttatttcttgttattgtgtgcatgtgatgatatagggcatattttgccattagcctggtgaatgttcttactgagctcctggaaagcaagcaagagaacattcatattcttggatgccaaactttggcgaagtttatttatagccaggtcaggcattgtaaatactaccctttgatcatttgttttctttagtgtatgtatcagaatcattattatggtacattaacaggtggataacacgtatgcacggaatattgaaagcttggttcgcaaagtatgtgtgctctcacggcaacagggagtggagcacagtcttctccgggcagcaagccttcagtgcttatcagcaatggtaatatatgccttttcagatccttttcctgactttctcttgcacgacttagtttcaaagtgtagttctgttaactactatcataatattgtgcagatctggttcatgaaggagcattcgtacatatttgtggattttgatgaggtagcgacaataggttccttgtgggaaccacctatcgttcattccttgtaatctattggaaattaaacctatttgcttgagttcaagataccatactagcacatgaacctgtttactgggttgaggttatccatttgcactaacttagagatgccaatttatccccacatactagagcagttatttttcttgtcatctgtgcaaacacacatatccaactttttagttattgttgttctgacatctacctgatttatcgggccataatacattaacag

SEQ ID NO: 26925 - DNA, 4160 bp, Oryza sativa
ttaataactcttcttagcagctgtttccagaagcactcctccagcagatactgaagtccatggtacatccagatgttgacactcgtgtgggggcacaccacatgttttctgctgttattgttcaaggaccaagccgtcagaggagtgaatcagactttctatatgaaacaaaaaaatggcagtctcggactacatcagtatttgcttcagctactgctctacttgagaagttaaggagagaaaaagaaagtttaggttctgataagacaggaaacatggatgatgagaaggaaaaaagcataagtgaagaggaaaataaacatgtttgggcacgtaaaaactcggcttatttttcaaagctggttttctctttcactgatcgatatgcagcactaactagttctgcagaggtattttttctttcagtgagtttgattgtttgtcctgcttgcagtgacatggcacttctactagtaattgaagcacacatcctttgttcatttcttgctttagtgtcattgtctccgatgtttttttttttgtgtgtcggacgtagtaattgaagcacacatcctttgttcatttcttgctttagtgtcattgtctccgatgtttttttttgtgtcggatggggcatgcatgtatataatcctagagtatggtaatcgtgatatttgaataatcctctctatgtatttcccaggaggctaatattgtcatgctaactgaagatcaaaaaaatcaattgctctccgcgttttgggtacaggcaattcagacagataacactccttttaattatgaggcgattggtcactcgtacagcctcacggttatttcttctcgccttaaggtacgggttgatttgaaaatatataactattactgttattcctgcatgcagtggaagttcacatggtttgtctaagctatatttttttttgccatggaaatattttttttggtgctgcaggattcaaggaacagtaataacattcagttttttcagttgccgctgtcccttcgtagtgtttccttaacctcaaatggtaggacccacacagtgaaatttgtgattgatctcttctgaaccacaaaagtcacttgcctttatgtatgtttttccaggagtcctttccccttcttgccagcggtctatttttaccttggcaacaagcatgctagcttttgctgggaaagtctgtcacattactgaattgtttgatgtgctgaggtgctttacatcttgcaatgtaagtacctaattctaacacagatgctatcttttcacggaatcatgcatatgcatgaaagtgcttcattttggcaatagtttttatttgctgtctagttttttgctcattgcccaattatttgtgtaccaatttttgcttacttttactatttgacaaataaaaatagtttatgtccatgactgtttagtgaaaataactcatgaaatattttgcagatggatccttatctaagaattggtgaagacttgcaactctatgtaaggttgcaatctgatctaggtaactatggttctgatagcgatcaagaaatcgctagatctgtactttctgactgcaggacaaaagtggggattaatgatcagcgagtacttgatgtagttgcttgtgcactgtgtaatttaactgaggtaaaggttgattttgccttctatttgctgttgacactgcacgttgtgttcttattgaggtcacatgctgttgacagcaatggttgagtgcagttatctaatattcttggaattgctattgccagatggacaaggatgtactggtgaaggagctcacagaaatgtttacacctgaagaggtgcccttgtttgggtcaaattcagcatttgactgggccaattttcatgttcaggcattttctgatgaatccctttcttttgatgaggtatgtacattaaaactggcgtctttaatgattcatctggtggaagctcttataaaattctttgatggtgcaatgatccttgtaactgtaccttaccattatgaaaattattgttactttttgtatcttctcagttgtcttctgcattgtaggagtgttcaagaacctcttcagtagatggtgggttgcatgagtcaccaattacaaacaccggtagctcgatatcaaagactacgatgccacaatctgttcctcgtgtcttaggtgttggccagttgcttgaatcggtgagtacttatcagctgcctttgcacatggtttgctagttgctgctactcagctagctctagttgccctaatcttattaattgttaaggtggcatggaaccataacatgttgtgtttgtacccctttctgctgctgtcaaaatagtatttatcacgtggtggattcggctacaaatatattatggagcatttgaatctatgtaacattttctctactgtgaactcatatctttgtaatcaggcgttacatgtagccggccaagttgcgggagcatctgtttcgacctccccgctcccatacggcacaatgaccagtcaatgcgaagccttgggatcaggcactaggaagaagctctcaagctggcttgtcaatggccatgactctacgccagacaatcctgctccaagccttccatctgcgcagcatttcatcattcctaaagtacatgatttgtcctgtctttctcccatgtcattctggaatgttgcctattctgcatctgtgtgtatcatctggccctcacgatcgcaatcgacattcatccaggtaaattcatgcggtttcgagagcagcatccggacgactttggagccttgctcggcagtgaagctcccacccgccagccccttcgacaacttcctgaaggctgcatatcgtgcccagtagcagccatgacaagccttcgagattatgcctaaccatgtttagtagtgctaggatgtagtacctgagcatcagaactagattatcttttgaaagacttggccgatctggcttatcctttattatctgtagcactgttagttgtagtagcttgtgtatcaatgtatggctatgtctgtgtccctccagtaaatgacaatcgtatatgtactatgtagtatgaccatgtagcccactagtaaatgtttgtagggtatgtatgacaatgtatgaccatattgtttttttgagatgtaggattctatttcagactcgagtaatctgtgggggacatgttcgtcgacctccggtgctatttttccttttatcactgcaaggattagatggtttcctgcaatatttgcatgctattcgcgcggatgaaattgtgaagtcatgggtttctcaagtccacaatcattagttcacattattacggcgttcatgaatattacattttggaggatcttatttctatagtttttctatatagctctttgaatcaagaaatgtttttcatgtgatctaatcaaaaggtcatttctatgtttgcaattatctattttacatttacatttctatcaaaatcttttttttgttttttttcctatttatctgttttttttattcctgcgattcaaagtgacgcttaaaatttagggaaaattgcaaaaaccatcctataaatcacttgaaacttgacattccactttataagccattttattgcaaataccacccatctactctgtctaatcgaatcaacatgttttcatgaattatgagctgtcaatgaagcttttaccaaaattaaatatttatatagtacagtcttgacacttttgtattgagtttcgctgtattttaaaaaaaattaattaaacatgaagaataaatctgatacaaaagcacttggacaagattgactcgactagttttaacctgtggtatccctaccccagcgataatgggttgattcggttaaacacgttcgcactagaatggtttttacaaaaaaaaagaactgagtaggggtggacatttacaataaaataacttatgagatgtaatgtgaaatttcaagtgatttatagggttgtttttttttaaattccctagaatttaacgggtgtgtgtctggtggacgtccgtggtgcgcgcgcgcgcgcgagggaatgatcaaaaaccttttcggggcgtcacgtaagcccatgacccgacgtccaaaggcctaccaaca

SEQ ID NO: 26926 - DNA, 1102 bp, Oryza sativa
tgatatcgttaattggcaattgatttgcatttgtgacgctctgcaatttatgcatcttataatgtttaattctttagcattctgttcaattattcaagtaagggtttcagttgatatattatggtcaacatgtaaacatgcacctgtttccagttgtatatcccgcctaattccttctcctttcataatgtgggaagcacaccaaatcattgattgtatcaggcatgttctattcagtataatcagcctcaatctaggattttgggttgactgagatcaaattttgtgctgcgcatgttagcaaagaagctttgtaccctcatacctccttaatcaaaatataatttttcaaactttatgtttgtgagaatccatatggatgttgataacaggagagtttcttcatttcatgtactttatcaatgtttagccaacaatgcaaattcaggagtgcttatcagtattccaggcacacagtttattagtaaaacatgataactgttcagctgcaaatctgtaaccatttctttctcattgtacttttggaatgctctcttttagctatccatcttgccttaagttgcattgatttcggttatgcactcattttcactgttttgtttccctttttggcagtatgggagcttttctgcttagtgctgggacaaaaggtaattgagtgattgttaatgcaagtactacatttattctacaactagactgatctgaatccttgaatactgtacttgtgaatgtaacacagggaagcgatacagcttacctaactcaagaataatgatccatcaacctctcggaggagcccaaggacaagagactgatcttgagatccaggtaaatccacaaagttaaattgtgtttttatcaagatcaggacgacatctcaatagcaaataattaaccatatcattgtttctctcttgccggtatatggttcgatctacatgaaatacatttatttccacaagcgaatagcaactccgctggctttctattgttacttgtatcaccagaagatttttctgtcactgattttccattatttcttttaggctaatgagatgctgcatcacaaggctaacct

SEQ ID NO: 26927 - DNA, 979 bp, Oryza sativa
atcacagcctaatctaggactaacaaggactcatatataacccaaagtgagtagcaatggtactttagtgtctggtattgagtattgacagataaaaggaccattttatctggggattaacaacaatcatccattaaaacaagacaccatatagttcatgtaaaattgtaaatacagtgagcaccactcccttcatcgcctcagtatttttagagtaagcagttcgtaacaaagctttggcagctattggtataggaaataggaattggatgtcggatagcgtcttattcatcattttcaccttgttaggatcgatggcatcgagatatagcagctgggcaacgatgatgttcgccatatcatcctccacgggtccaccacaccggataatcctctgttccacaatcacacagagtcagacagcacacagaaccctccacaaataaacttgtgcaacaatctagtgctcccgtacgtgctggaagagctggctgacgacgctctggaaccgctccatcaccatgggcgatggcccgcgttcctgccccgacgcatactccacagggaagtagggcgacctcggcaccaccaaatcatccctacgaaacacacaacaaccacagcatcatcagctccctcgcatccccacccaaccctcccccaaccagacgatgcagagctacaaatggttcgtcacaaaatcaacccccccccccacctgatcgaccaaatcccgctcctctgatgagcggccccgtggccagcggcggcggcggcggtcgccacggcccgagcgcacctccggctcctgcaagaccgagtcagttagggtagagcgagtggagccacgacagagtaaagtgaggagggagggggaagaggggagtgaacctgaggagcggcagagatctcggggcggggttcgcgttccagctcgggcggaggagaggggcggtgagagaggaggagggggtggtgg

SEQ ID NO: 26928 - DNA, 737 bp, Oryza sativa
aataacagataaacatataataaaaaacaatatttagcaagggctcacaaatagcatggtgagctaacgcagggaaattacagaccgtgagcagcatgaatgatggtggcttaaacggatagtccgatggcagctggatccttccatggtagattcctccctcaaactcactgtctcgtggccccaggatcgcaaattgccactcgaagatgtcctcctacacaaatacatacatttaaatcataaaaaacacatcagcctcgatcagaataccataagtaaatttgtaatccgaaaatatatcatggaaacggcctaagtaatactggaatcccacttgattcacacaccagttaatcgaaatgacgtaatactacccaatatcaagagtcatcctgcatacgatgatctaatcgcaacattgatatacgctaacatcccaacatttcgttattgcacaaactgcacaatcagatcaagaagaaatgcagatgaacccccaaggtcaacgcattaaatcaagcctctaaatttccgcaccctaaaaacgccatcaaaaccagatctcgccccactagcgttcgattcggacacaaccaagaccagatcgggcaggaatgtaaatgcaggatgcagggttaggatcggggacctcgaggggcatggccatgaagtccggggacgggttggactgcattctctttgacctcctgaaggatccccttcaccgcccggtt

SEQ ID NO: 26929 - DNA, 11507 bp, Oryza sativa
  unsure (1)..(11507): unsure at all n locations
tttcattccacattagtgggacaatcataatgctgaatgcaatactccctaatgctgaatgcaatacttctcgtttcgcttctagcaacttttcatttcacattagtgggactgtgggagaatcgtaatgctgaatgcaatacttctcgtttcgcattagttctagcaaattttcattttacattagagaagatacaatagcaggctataagccagctataaatatattttaaagagataaatgaaaagagagaaaaacagcgaactacaaatttgtgtatgacatgtagaatcaggtattaatagtatagtaagtaactattgtattaattgactattacatgggctatatataatttaaagctagtagttgactatattaaacttagttctcgttctcgcaacaaattacatcgactctcgtgaactatatcccgatcatttatcaaagtagcattaacatcattacatcaactttgattaacagtagtgcgtagctgcattaatgaaggctagagaaatgctttgaggtgagaaatgacaagtgtcttgataagacaaactgaatgctagaatggcagcaatctgaaagagagggagtaagaattttcatgcccgtcaagaacaaacggatcgctggccattgcacaacatacgtgcagttgcgcacatcatgtaatatcttgtaatgattttcatgagtaccgcatatacaattgtgcacatcatgtaagaccttagaacgattttcatcaggtgtactgcatatacaataaggtacgggtagtaccaatggaccaattcaacttcgtctataactaaacagccatttacaattcttaggggtttataacttatggtaagcatagcagccgctcagacaccgaatggggtagtatagctcttatcaaatctatgcacaaacctacctaaaacttgccctcaatgtaaccggccagaccattgattttgaagaacttcttgatcacaagggccataatagcaagagtgagtccaaatgcagccaaggtcaataatctgtcatgctttggcttctggattgcaacaacaggattctgtggcgttggagcaactcttggaatgttttctctgctcaagttggcccttgaatggttgctaaccccttctgtccgaccttcaacaatgtgttgtacaatttctgactcagaatcaggccttggaaggtcattattaacagagtctgagttggacccagccgtgttcacgcctccaactgccttgtgtgcatgctcatcagaagcatcagatgcaggcaattggttagtctcctcattagtttcatttgtcagcagctgaggaacagggggagccctactgagcatttgctcatggatctgtcattgcaacagttctttgcatcagaaacagaacaggtgtgcgtttgttcttattaaacaagtgttaggaatttacctcatcaattactttttggcgttctgcagagccaaactttggtggtgtttcacgtgatttgatagctagtgcccgtctatcttcctttttgaagtccaacgaacccaatgccccaccacctggtgttggcatgaatgcaatcaaagctacaagagctgtgcgcactgcaacacaaacaatcgggaaaaaaaggaattggtatcagctggaggatcaatgccataatggtttctaacactaaattggcaatccctcaatgggtaactaatatattatttgcggacatagcacgaatatcctccccaaagaattatgaatctgtacatatatatactcactacctatctaacttactcccaaccatgataaattgcaataaaatcaaaagttccgtattgaggctatgacgctgtcttaaaaacacaaaaagtactactattccttcacagcaaaaagatatgcacaggacagatataaaaagggaaagcacatgtccctcctttggtccagtcatgtgctaaacacttgctacatgacgattcctgaaagaaccaaagaatagtttcatttggcaccatgctcgtatagtacacatagtaaatatttgtatactatgaaaaatggtgcccaccatatgaatggatagaaaaaattacatgccaatccttggttgtattttaagattgaataatttggtgtacaagctttagcatatatctctcattatacaccaactgacaaaaggatatgataagcagcaaattgtaaaaaacaagaacaccatggactgcctattgtatcttagcagcattgaaaggaagctgctgaacacaaagttttgtaagaactgcagggagaagtgcatgtttcttttggcctggtcatagggcaagtactcgcccatgaaaatcacaaagaccaatacaaaaagaaggcattacttttgcaccatgctcgtatagcccacaagaccaaatcaccgtggactatgaaatatggtgctactcattgcattaggtaccccaacgtaagggcttacttgaacaatccctttcgaaacaaaatgctactcagtactcaccactccatgatggttgccagtgctcagggtggtaattggatatgctcaaacaaatcttcttttgaatctcaaatcttccacttggctgaataacagataaacatataataaaaaacaatatttagcaagggctcacaaatagcatggtgagctaacgcagggaaattacagaccgtgagcagcatgaatgatggtggcttaaacggatagtccgatggcagctggatccttccatggtagattcctccctcaaactcactgtctcgtggccccaggatcgcaaattgccactcgaagatgtcctcctacacaaatacatacatttaaatcataaaaaacacatcagcctcgatcagaataccataagtaaatttgtaatccgaaaatatatcatggaaacggcctaagtaatactggaatcccacttgattcacacaccagttaatcgaaatgacgtaatactacccaatatcaagagtcatcctgcatacgatgatctaatcgcaacattgatatacgctaacatcccaacatttcgttattgcacaaactgcacaatcagatcaagaagaaatgcagatgaacccccaaggtcaacgcattaaatcaagcctctaaatttccgcaccctaaaaacgccatcaaaaccagatctcgccccactagcgttcgattcggacacaaccaagaccagatcgggcaggaatgtaaatgcaggatgcagggttaggatcggggacctcgaggggcatggccatgaagtccggggacgggttggactgcatctccttgacctcctgaaggatccgcttcaccgccgggttgccccggttgtacttcgccgtggcctccatctccgccggctccgcggaagggaaccctctcgcctcgtcgccgccgccgccgccgcttgccggtgcaggcttggcctccgaattggggaatcgggagaggggaggaaggagcggaggagtgggaacggtgggtggattaaaaaggaggaagagctggttctggtctttccctggctcgtgggaccggttactatgttgggcccacgtgtcggcgagggcagagtgggagggggggcgacgtggatgggctaacgtggcacgtcgctattggttttataggtcgtgcggtgagtgaatggaatattccgattggtttggtgcgttgggccagctgggcggctgggccttaaatgttgggcctaagaagcttctataatagaggtggttgtttcccttcaatttatgtcatccatcaacaaattaagagctatcatctatccataaattcatttagtttggacaaattcaaaattgtaaaaaatggaaaaaaagatcatataggtagtacctaatttatagtactagtttgtgaaaaataaaatctaacaccatattttgcagacaagccgaaattgaaacttaaaatagaaaaaaaaacaaaaaggctaggccaatagtgagcactgttcattaagtccattaggctcacttgagggggaaatggatttctactttgttcaatgtccataatatagcaaatatcatgccaaaactttctacatgattcatattcttttacatttttctgattttcctctacattttctaaaattatctacaatttttatttttttaaatagttttctagggagagatgggggacgaagccatcgcggcaatgcggcagtggaggcctgaatcaccatatgcttagacacccgaggcatttcaggtgaatcacaccagtaatctctccagaggagcaaactcatctctgaaatgatgaaaaccgtgaagcatccctattccctaaccagaatcagtctctgtgtcaccttggatatgaacttgggtggcgttgtggcactccaggcacaccctaagattcttgattatcctgatttcagatctcggttctgtgctgagaaatccgaaggcaattgccagcttttcactgtgcactttcaaacatatgctccttctcttcctcctcaacatcgtacaatgctagctctgtctcaggtcgatacctagcgtcaaatcgtctttgaagttaagattttccaagtatggcctcacactgtggatgggcacagtcgccggccatgaggaagtttggcttgtcaactatctcgattagtttaaccagcttcctgccttttgccgctgcttcagagatttgcttcttgactacaagtaaattagagagcagaacatagtagccgctgttttctgggggtgcaatttgtgcaagatcgctatccttatggaccatgcaagcaccannnnnnnnnnnnnnnnnnnnnnnnncggtcttggggaattcagaaatgagcttaaaaacctccttgagctggccagctcagccaaggaggtccatcatgcatgtgcatgctcaatacttggaattattgcaaaatgatcggtcattgactggaagactttgcgcccttcctcagccaaccttatgtggctgcatgcatagagtaccaacaggaaggtagcgtttgttggaataaggtttgcatccagcatgtccttgtagagcttcaaagcctcagcaccttggcccatgaaggccatatccagctaattgcattccatgagaccacattcttgctatccatactgttgaagtgaagatgctccgagcttcggaaatgcttccacactatgcatacatgtcaatgagcactgtcatgacataaacattgggccccaagtcctcctcagcgataatcctatgcagccactttcccagggacaaagctccaagctgtgcacacgctgaaagagagctagaaatgatgattggatttggtcacacgctaagtaccagcatttgctcaaagagggcaattgccatctccgtccagccattctaggcataccctggtattattgctttccatgattccgattccgtggtcttctatggcatcgcattgaaggccttccttgcagactccatatcatttaacctacagtacaatatggtaattgctgtcgacactggagaattcgcagtaaatccagacttgagaggaccatgtaagcattgatcaagcagttcattcccaaacagactatacgggatcagtgccagtgctcgagtttggcttcaattccaaggccatcaacccaataaacagattaactgatgaaccaaccatgcaattcgccgagcaaacatagattaagcattgtaggcaaccaaatctggattctccatcaagtcaaagagacgccatgcagaattccacatccccgctgtatacaccgagatcaaccggtcagaacatgctcatactccgccaaccctctcttcagaacatgctcatactccgccaaccctctcttctctgcaagaggcatcctccccaattccccattgttatatctgttgctggtaagaccgttgccagcgtggttgtgtcagaccgaacagactctgcactcgccatcctcacgaacgactccagggcctccgaaccaggaagcccggccggccatcagcgtgttccacataacggtatccggcgactgcacagtgtcgaacaccttgcgtgcgtggtcacctctggacagcatgaagcgtacaggctacagcttggccaatgcggacgccacgaacgtgtcggcggcgtaacccgcgcgtgcagcgcgccgcgcgcgggctgcggagtcggttggagacgacacgccgccgccatgagagcaatgagcgaggtggcggcgaaggcgaaggagaagtagtcgaggcaagcggaagagaaggcggcagcggagaaagcgatcggggcggcggaggaggtgggtgggagggagggacgcgtagcggaggtcggaggaggagggagctgaggtttccggggcgggggtcgagagggtagtgtacggaggcgagggacacggcgaggatctggtcgaggtagcgcagtgtgaaggaaagcgcgatgaggcggagggcgccggcgaagagcggcgcggcggatagcgggaggaggcggcgccggcggggtctcatccgattggaaacagattgggaagggggagggggtaggaatacgtggcgtcggcagtattaggtagagagagaaaccctttccatcctttgtctcttagccccgaaggagagagaaaaatcagaaaaaaaaaaccctccgcgtgtgggggaagcagagctccggacgctggcgccgctcgcgccaccgcacccgcaccgccatggcgtcgtcctcgtccaaggcctccgattcctcttcccaacgccccaaggtgcgcgccctcgcctcagtctcgactccccgcgcccgattccccactccgatctccttccccaatctgatcggcctcgctgtgcagcggccggatcaagggccgtcgggcaaggacgcggccggcctcgtcgcgctgcacgggaagctggcgcagctgaagcgtcaggtccaatccacccgcctcgccgcgatcaaggcaagcgcccgcccgccgatcacgcatctctacagtttcagctcgcagggggaagtgtgagtagtcggttggattttgctcaatctggcgtggattggtttggtttgtggtttttgagcaggagagggtggaggcgaacaggaaggcgctgcaggtgcacacgtgcgctctgttcgacgtcgccgcggcggcggaggtggcgtcgcggggcgccgagggcggcaacgcgctgtcgcggggcgcggcggaggggcaccgcaggttcgtggggtgggactcggcgagcgggccgggggagagggagttggtgcatgtgcaggaggagaatctggtcgccgggacgctcgtgctctcgagctctggtggtagcggcgcctcgcataggaccgtcgtgcagcttgtgaagctgcctgtggtcgacaagattccgccctacaccacgtggatcttcctggacaagtataatgcttctacacgctcattgttccaatcagatcacttgtcgctaggttcttgaacttgcagtttaagttttacaagagttcaggagaagttggtatattgccatgtaatacttcttaaataaaaagtagggtatgccatgtaatgcacctagatatgatattgtggaaaatatactactcaaaattcacttatgatgcatgaagcaaaattgaactatttacccatacaagccatagaaaccagacaacattttcagacagatattgcaaacttgggactagtagaaatatttggaatataagtgttagctcaaacattacactcaggtagtggtgttcatgtgtttttatgtttgctgatgagcgagagcactagtttgtgttaggatgatggtcagtttgaaaagattcagctacttgaacgatgtgtcatgctacttatcttcagtttatttgcttgattaattccaaagtggtatttattttctcatatacgtgctgcattggtgtaacaaagaatacttgatccctgttgtattcgatattttactctggtttaaacaacacagcgcagaaaccaaagaatggccgatgatcagtcagttggtaggaggagaatttactacgacccaattgtcaatgaggctctgatctgcagtgaaagtgacgatgatgttccagagccagaggaagagaaacatgttttcacagaaggagaagatcagctaatatggtaaaaacctggacattcaagaattctctctttttttttcattgaatatgctgtgatttttcccaatcatgatatctttctgttgcattttcttttcaataaaatgattcagatctaagttaaacatggaagaaggcccagagccatgaacttacattaacataacaaaccatccgtgcaaagttagttgcgctgtgcagttgttttactcagtctgcatgattaatccacctgttttctaccttaaggatcgtgcatactctaagagcttccaaccttcatgtaccctgttaattctgaaatgtaggtggaaggtaatgtgttgtattaaatcatctttttaggatggatcaacggatgccattttaatttaaccaatgcattattggtgaaatactggctggtttgactttacacttccagttgtgacaataatctgtaacccaagggcacccttcttttatttaccttttacacaatataatcagaataacaatttctattataaattatactggtaaaaatcggtaatcatcccaatactatccgctaccttcagaataaataaacatttttatatgtaaatttatgtctatctgatcttgcttaactatacaggaaagctactcaagatcatgggttaagtcgagaggttttaaatgtcctctgccagtttgttgatgcaactccttcagaaattgaggttgcccatttctcttttatgaacattttagttcgtcattactattttttttaactctgcagctgttttttattatcctacaatgtgatcatgactcttattccgatcaaaatactaggaaagatcagaagttctttttgagaaatatgagaagcagtctcaatcttcttacaagacagatttgcaacttttcttgacaagnaaannccccccaaaaatttggngaatgtggnctttagattcttttgataatctcttctgtcggagatgtttggtatattatacttctggcattctgttgcttacagttcttttttgaattccatgttttaaacccctttgttcaactacattcgcaaggtctgaattacttgttgatatctatttattcaggtttttgattgccgtctccatgggtgctcccagaacttggtattccctgtaagtcataagttatttcctgttggactcttgtaaagttttgatctttctactttgctcatcctatcaatgaatggaggatgttgtcctgccatttggtccaaagtgagaattaaaaaaataccgctaactactaaccttttgcttaccagagcgagaagcaaccatatggtcatgaacttgatgaaaacaagagaccgtgtggcgatcagtgctaccttcgagtatgtgccccctcaagttttgcagttatatcaattaataaagttgtttatgattcctgaatttgcataatttgccagtccccccctgtgggaatctaagtttcactggtgtggaatattgagattgtattaaaaaaacttcgccaagatgtgtagttaatataagttttgccatcccagcagtgttgttcaaagaaatttcatagcctaggctttggttaaccgggtgtgagccttgaccagacctacatatacttctacaatattaaagcaatagaattaggagtatattatttttctaatgaaaaatctaattaactttatgttgaagatatactattagatctgttgtcttgcttgttggacttcaggacccaaaagtagaccctccatacagtacatacactgttatgaactatggatcgtacaagtggcatcagagctaacaccatggcttctgtgggaagtactttttaaactatggtatcatttttctcctaaactccttcactcccattcggccatgctatctgatgtaacttttagtccgtatgcttatcaacattttcattgacccttttaatgggtttgattgatgcaacttctttagtttatttgtctattgaagcgagcctatgaattattctgagaattgcagcaattgctgcattgttgctaagactgattttgattaaaaaattcacagaggagagaagtatatcaagatacgtgcaatgatgaccgaaatgcttgtacaacatataatatggattcaagatcttcctcactcaaagatagtgctaccatattgtctgaatcagaagattcaaacagagatgaagataacatcaaatccacttctattgttgaaaccagcagatcaaaaataactaattctgaatatgctgacaaaagtgtgacaccacctcctggagatgcttctgaaactgaaaatgtgtcccctgacatgcccctaagaactttaggcaggcgtaagatttcaaagcatgcctccaagtttaacgatcattcacctgatgtaaggcagaagatatataactcaccgattgccttttgcaatgagtgtactgaacaagcaatcggttccagaaattggtgagacatgtccagattccatagaatctgcagttgatcaacttccaagtctggatgaccctaacaagaaaatttctaccaaagatatgtgtgctggaagcacaactaacactactgaaaatacattacgagataataataataatttgttcatctccaacaaggagcactctatttctcattggagtgctttagagagagatttgtacttgaagggaattgagatatttgggaaaaacaggtaattcttttatatttcccatgctatttgaaaatattgtttattgaaaaacgtaatttaattttaagttcataatggtatgccacagttgtctcatagctagaaacctattgtctggcctgaagacctgcatggaagtggccagctacatgtacaacaatggtgcggcaatggcaaagagacctctatctggtaaatccattttaggtgactttgcagaggctgaacaaggttacatggtacgtattgactggcctcgttaggttatgcttttatccagatcaaagaagtcaaaagaatctataactttggctagtctatttttttctgaatgttttcagcacgtctgcattatagtggctgtatttggttgttgttcatcctcctgatattcagttctgtagtcgctatattatattaaatttctttcggcacccacaattaagatggacatggatctttttttggaaacaagcgtattgttcctaaaactggctagtgctagaattgtaggttgtctcatgttttcatatattaggcggttaggggaaattatatt

SEQ ID NO: 26930 - DNA, 1479 bp, Oryza sativa
tgggatagtcttttaacagaaactaacaaaaatattgattggctatcatgtgctaatttattcagatttattttgtttaattaattacacgttacacgcatggcgtttattctcttcagctgcggagatggctcactaggtgagccactggcaagaggtgatggctatcagtgtggaaacatgaaactcctcttaaaacaacaacaacgtgtgagagctctagtcttgtattgcttgtttatctttccacatcattgtgctgtactatcttaactgcgttgtttgttgatcatggatcagatattgcttggaaaatctgatgttgcgggttggggtgcattcattaaggttagatcaatgaaaaagcacctttggatatgatgcattttgcattttggctaattccttttttttctttctttcttgcaacatgtagaacccagtaaatagaaatgattaccttggtgaatacactggcgaattgatttctcatagagaagcagataagcgtggcaaaatatatgatcgagcaaattcatcgttcctatttgatttaaatgagcaggtgtgaactaggtcttcatttctggccagttggagtgtcctgggtttgttaaaagtgaaacaggtaacctttatttgatgtgttcttgcagtatgtactggatgcttatcgcaagggggataaactgaagtttgcaaatcactcgtcgaatcctaactgctatgcgaaggtaatgacttatttttactgaatattcatcatgctctgttgcctttctcgttctgattccgtctgcccgtccaggttatgttggtggctggcgatcatcgagttggtatctatgcaaaggaccgcattgaggctagcgaggaactcttttatgattaccgctatggacctgaccaagccccagcttgggctaggagaccggaagggtcaaaaaaggatgaagcatctgtctctcaccaccgagcgcacaaagttgctagatagtccaacagcagctccagatgataatatcaactgtaaattataccgtcattgaaacacatagttcaatcctagtccattatacggccaatcgttggcataataagcatattctatattccttagttccttggtaaataaactgagatatcgagtatgcgaataaaagaaaaataaggcactgtaagtttatttgtacaaagtttggaatttatgctatgtatagttttgcctgtactctgacattgattctactccctccgtctccatattataaggaattttgggtaactactagaatatgtcacatctacccaaaatcccttataatatgggatatgtcacatccacccaaaatcccttataatatggatccacccaaaatcccttataatatggaacagagggagtacaatattaggcatatgaatctttatattctgaatgggtgtattttattttccagctattattgtattcttgta

SEQ ID NO: 26931 - DNA, 2747 bp, Oryza sativa
aatgtcgaaacgaccctgttctcaaaattgtatatagacccttttgttgtgaggataccagatggtagaacagcagctcattccatgtatctagcttgttacacccttttgttgtgaggataccagatggtagaacagcagctcattccatgtatctggcactccaggaaggcaccagtggctgcaatcctgaacgctcgatgctgtcaaacctaccactgccttcctcccatacacagatggatgcccatctatcctgagcccagatagattggtaatgttcagaattgtcacagaagtcttcatttgctgtgctacttgctccaagatcatgtttatctcaggcaccggccttacacgagtgtcactgagaggcagtgtgctctctctgcagtgtccccctgaattccactccccgccgctgaactcatggataagacaataagttgctatgttaccgcatcaagtttctagtgctacaattgaacagatgaggaagcaaacctgaaatgcgacggggatgagcttcggaagaacactcgagttttccttggattgatgtaatggtcgacccatgatgcccatgtggttagtgctttaaggtaagctgtggaagcatcgagatggggatatacatgatcaccttcttgatagtagttcactctgaaaatgaaatgcagctgtaagaggctatcattaagctgctacatctatataataacatggcctaaaaaaaatgtcaatagctgcatttaccgatcaatttggttgtaccacggtaaggggtgaatgattcattattgcccctatttataaacactcacccagcttttgttttgtgatgcgaccaccaatgagcagtgttgaacacaagaacatcagcacctctccattttgacgaggtgcgatcaacagtatcgatccatagtgtcctcgtgcgctttgagccaattcttgctttgccttcatgcaccaagaaatgcgtcacatggtactccacactgcaattgtaatcctgcggcaaccttaccgagataaatattgtgtaccgaattcaaacaccgaacatattccaacagtagaaattagatcatacaaaccaaaaacttgaagttgtaatctcctctctccttagtaatcctgcggcctcgagcttcatgaatccttgcaggatctgagactgcccctctcagcaagcacatcatggattcccactgatttctgttaatggagtctccgacaaacactagccgttttcctcgcaacatctcaagcattttcctagcatcaaacctaaaatttcattgcattccaaagtcagcaaatgttgagctcaataacctaagcaatcgataaactgcacgaatgcaccgtaacgcagcacctcggtatactgcaatgagttggctgccacctccacttcctgtagcttccatccattcttccatttgcttcgcagctgaatccttcatctatgaacgggcaagaatcactcgtgtaaagtggatagctctcatcgaacacccaccttccatcatagacattgcatagtgccgcatcgcttctcgccgcatccaccttgctatccaccgtttcctgaaccaggtcagtcttttgcttgcttgaactgagtggagctgctccagagctgttcctcactgtcgaatgagctgaatgttccccttgatccactcgttgagaagtatgtgctcctgcagaggaatttccactttctccctgcaagaattcaccgttcgacccgaggtctgaatctcccatggaggaatcgacatcttgcacagacttgggtttcttcggttcctctgctggagcggctgcttcttgcgaagcggatgcattgctaacaagtaggttcgtctccatcgccgaatcggcaacttctttggtggtattctcgccttctgcggagttgccatccccacctccagcaggagctccttccgcccccatggccgaaccggaatcaccattggcaggagctccgccgttttcgcttcccagtgccgcctctttcacctccattgcggaacccacgcctcccgcggacggaaaacctccggcatccgagcggcgggctgcttcccccaagctcccgctcctgcccctgcccggaagaacatccaccgccgcgccgctcgtggagcggcccccaccacctgcagcaagaaccgggccccgcgcaatggcggaggcgttcccggcgagggaggaggaggcgacgaaggggaggtggagcgggcggccgaagcggagggcgaagagggagaagaggaaggagaagaggagggaggaggaggcgaaggagaggaggatgaggcccttggggctcacgacgccgtagtgcgaggtggacgacgagccactgctcctctgcctgtccattcctgcgcggcctacggctaccgtagcggcgccgcggcggacggcggcggcgatgacgccgagcgagccgcgtaggtgaggtaattaaggcggcagcgaggcgtggcgaggcaggagagaatacgaagctggcgttaataacaagtttaatactagtatagtcaattattatctccaaatcatctataactaatgtaatagctaatttatacaatagttgtttattatactagtattaatatctggtttcacctgactatagatctgtagcatgttgctcttatctcttttgttttatctttttaacatatgtttatagctggcttagagcaggtacaatagca

SEQ ID NO: 26932 - DNA, 10770 bp, Oryza sativa
tttgttttatataataaaaaagaggatgactgtactagaagttagcaattgtaaattgtttgtatcaagtacgattgcacccactaataaggaccacaaatgaacagctaactgaaagtgccttcggaaatcggaaatatatttggtttatgattctgaactttctgatggaatcattgaagcgtatcatggatgtagcaccggacacacggcacgcttcggtctccagaagcatcacctaaattactagtaatataccgtactaacggaggtgtcataacatttttcttaataagttattaaaattcgactgcaatgaaaataatgttcctagaatctgtccatttaagcttttagtccaaggtcatatataaaaaattattataatataacttaaaattatttattcaagataatataacttaaaattatatctaatcaattcaatatacactatacgaggacaatgcatatccataccaaaaagaatggttgagttattcctcaagaaatcaagatagataagtatgaatctttttctggtaagtatgcaccatgaacgacccaaccgattactgcaaaaaccattgacttcgggtaaaatatggttgaattttgtcaaaaatttaaagtcagtttgaatttttaaacttgccaaaaaatcaaaaccaaacatttttgttatcaagccagtctaacaagtttgattttttcgtaaaccttgccggagagtaaacatcaaatatttataagaggatgtatttacaacaaaatatacaactcttcttctcattacttcttttgcatgtcttaaatcaatatcctttactgaaacatatattgtcttttcattatttgatttgcattatcaaatactgccgtgactataatactcttttggttatcactgattcaagcattcaagctaagtatttgtcagcaagctgcaagccattcctgatgtatgtttctgctttccaacggcatacatccttcccagagccaaaagttcaatcaaagccatctgaagaataaatagccagccacatcctttgattatagttgagttatcatgtgtaaaaaaaaaacaaatacagtattacctcagattatctttctactgctacaactttattaattttaatatagtttgcttcgtcgtagcatccgccactttggcacaaccttcatttaacatgtcaaggttgtcagcctacatgctacatcacggcctcaaccctggttccatgcatagacaagctctcttccaatgccatttttggccttaaccctgcttccatgcttagacaagctctcttcactcttctaagaaatatatccttttaatataaagagctaatgagtttcagcattattatatatctcttctatataggaaatatgttgttaatcaaaacaatgcaacccttatcagcaagaggcaaagataaacataccatccagtattattacatatctcctttttttagatacatactagtatctcttatgtacaggacatatgttaattaaaataatgcaaccctaatcagcaagagacaaagataaacatgctatcactgaatatgaggaatagattttctggaagttgcgccaaccctgatatcatcaactctaaaaagtctctccagtgtaatttgatcaggattaggaaccaacatgaactcctctgataattccaaaagatcagctatatcaacctcagcacatccaagcaaagaaataagtccagtggccgccccagaattagcaacagcaagaagagttcctctgctaccgttgcaaaccagacttgccaaagcttgtgcagcaaagtacctgtatctgtatgcttgttcatctgacctgaacaagtttgagagcacaggaattgagtgcaatgctgcattagatcgatttatctccctttcttgaaatagcaaagcaagaagtaaggcacagacccatgcagtgctatcttcttcacgctgaaaatatgatcatacatttaagcaatcgcagctatcaaaagaatttggcaagatatataaatagtatgtaaaaagcaacaaagttaaaaaaaatatctgagtagatatctacagtcaaaattagatattatcacatgagaatgaagaatttacggaatcacacaaagtccaatattctgaatactgaactagaacaacaggaatgcacagcattcctgtttcctatatgttgttatttgttgcaatttaaacttgatgtgattataagaatattgttattgaatatttgagtttgtgttcaggaaaccaaccccaacactgggacaaatgttttgttccagataccctacttgtggcatcaaagaatgtgtagcaactacagcagggttgctagtgcaagatagacgatgggtctctagctctctgctgactagaagcaaaaagcttcaataccaaagtaacagatagaactagagataaatggatcgagaatagatacaaaagaaggatgattgaacacacttactgtgtaaatgcacaggtgatgattgtgcacaaggactatattaatccttgagacttcaatctattcacatcaaccccaagaattcaacaatacgcattaacaaacgactattcaatggaaaagtataaatttgttatagggctctgatggtggcaaagggatggaatcctttgaggagttaaattattcactctagcaataaactttaacctggtctcttagctgggttctccaacaacctgttcaatctagctccccactgctttctatatgcgactgttgcctagactttatgcataactaccaaattgacataaagttttcttttccttaaaacaatgaaaaccctggttccaattctcattacaaaagagaaatcagataaaccaaaagaataattaacggaactacgctgcctacgtttattttagaactagcatgatgttaaaatactaaagtgcacaagagatactagcattcacgtaccacatataggaatgcattttgagaaatcttctccataagcatttcgactgctccagcttctagaatttcagcccttgttttgctgtcatggcgtgcaaaaacagcaagcagccatagcggaatcatgttacctgagattacagcagtgcggcacacagtttcatcgctgttgttattttctttggagtgtctagaaattttaatgtctgatatgttttcaccactcccattttcagaaggcaagtttgtcatatgaatcatactgactagagaatggattagttgaatgtataagcttgagtcactgagaatctctatctgcttctgacaatgctctttcgctgcacaaacaagaagagaacatccaccaactttaactttaagcatgttggacccaatgactcgccgtgcaactgatgatatgcagcctgggatttctgaaaccaaaccacccacaatatcatgttgatcagaacagagcctcgataaaacttctatggccttgtcttgcaatgaaggtgctgcatccgctacacatgacacaagaggaagtatggtgtggggattttctgcaagaactgtccatggagctttggtatgcccacttgacacctttggtagttttgataatagcaccagcgcatcaacaacttctgatgttgcggcagcttcaccattcgcagcttccaaaagcccagctagagcaaggacagcacctgaccggttaatagtatctgaaagaggttggttaattggccggcactgtaaaaggcgagctattgctgctgctgcatgagttcttccatcaatagatccctctctaagcacatgtgctatggggaagataatttcttcaaaagatacttgcagagataattcatgatcaagaaaaaggtttgccaaaggtcgcttgttctgctacttctagaactgtagaatttgcaagtgagacaagtggagctaatgcatcccgcccaattgcagcaacatccttattttgcttgattgacagaaaaatggcagcaaggcaagatgaggccgccattagtattttatctgtctgcccatcaatcagcttcatgactgaccaaagtgtcttcactgcaatatgagtttctcgcaagtccctgcgacaatgaaacagtccagcaagagcagatgctgatttagcctgagtttcttctttaggtgagttgagaattttgatcatagtctcaactgcatcatttgcagcacttccttcatgcagaatatcattaaggggtgccacagaaagcaagcttttcaaagcatcaggacatgaacttttgattcaggttgttcactagttaaaagagcagacaactgactaatagttcctgtatctgatttgtgaatgagatgattcagtgttttagatgctatctcctttccgtgtcactttcatttttcagaagccatagtaaagcgggcacagcatcagcactttcaacacatgcccgtatgtcttcactgtggttgcacaaattgccaaggatggttgctgaatcttctttagctttgaatatgtcacatgatgaatgatgaatgagtaaaaccatttgttcaactatagggtagatatgaaacactggcaaatggaatcaacttggactgttatacaagtcaccaatcaaaatacctgttgacaaaataattgcattcttgcgaaatttactctcctacaattgaaactgaaatagtaggactagttcatagtcatacttctattgacaatcaagtgtgcactcttcgcatattaatctggtatttgcacaaaaataacacgtgcaattgcaagcagagattgttctaatttctaaacaaactggcaatggattgcaaaaaaggacgttggacgagcatatgcatagatgcataatcctcaggcataaaacaatcaatctgtcaccgaagtaacacgagatcaaagaaccttgaagcataatcctcaggcgtcaacaatcagtccgccagcgcctacaaaggcgcgaacgccgccttggagatgacatgcgtcttcttgccgagcccgaacccgatgatgtggttgatgtacacgtcgccatccttcaccgtcgccgacgagccgatccggtgagccgggccgacgtaccggccggtgacgacggcggtctcccagtcgtcgtcgctctcgaccagccggctcaccaggccggcggcgaccagcctcgtcggggacagcagcgccagcccgtcgccggtcttcagcgagcccttcaccttgacgacgtgcacgctccccgtcttcgggcagaccttgaagaggtcgccgccggaggtgtggatgacgaggaggtagccgttggggtggtagacgatgccgttcaggccgacgaagttgttgatccaccctggcctctggaagaaggtggcgttcttgatgacggacagcggctcgccgtccgggctcaccttccagatcttgttgcccttggcgtccgtcacgtacgcgttgccttcctcgtcgacggccacgtcgtcggcgagcgttgaatcacctacaaaattatataaaaatccattcatattctcgaaatttcttgaatttcaaattgaatttactacaaactaggaaaatataataatcgttgtaatttgctcagaagagagtaaataaacaatagattggtggctccctttccagtgaacaatgctcgaaatggacgcctagaagctacaaatccatggcggccatagatggcgcggactcacggacgcacctggccggtcgaggcggacgaggaaaaggcggcgccaggagccgagctcgtaggcggccacggcggcgtacccgaaccacggcgccaagtcggtgtacaccacgagcaggcgccgtctcggcgcgtccaaggtgagccccgtcgccgacctcccggccgccccggggtccgccacgaccacccgcgcctccaccttcccctcccccgcacccgcgccgccgccgccgggcacctccacgacgcggccatcggtcatggtggtgaccaggaaccgcccgccctcggcgtcccacctgacgccgtcgtggaaccacccgtcgcccacgtaggacacgcccctcgccgtcccctccaggaacgcgaccaccgcggccgccgccagcgccgcgacggccagcgacgcggtcccgcgacccccgccgccggcgccggccccgccgcggcggcggcagcatccaccgcacatgacacagccactacaagatctggggcgcctcgcgtaattcgggtggttgagtagcgcgcgtggcgtaattgctgctgtcactgttagagctcccaagtgcgccgtggggttaagaggaggtttggccccaccgcgcgctccttgagggacacccatgaccagggcggtgtcaggcctctcacagtggcagtacccttagtttagaaagttggcacaaagaacacccccacctaattggatggagagacaagtaaaggaaacgaagctcacagtgagcgtgacctagccaccaaatccacaacttaatttcccaactacccctctctctgtgttcggccgtctctttttcttctccccggtgcgcaccgcatcccctcccgcatctcgcttgcatcgccaccgcttcgactcccctcctccctccaccgacggccggcgccggatctcctccctccgccgccggcaccggctctgcttctcctctcctccctccggcgccggcagccgcggttgccggctcgcgcggcgaccgacgcgcgcgggaggcgccggatctcctccctccgccgccgccgccggctctgcttctcttctcctccctccggtgccggcagccacgattgccggctcgcgcggcgaccgacgtgcgcgggaagcgtcctcgggaggctccggcgccagcggaagacgatgcgccgatgggatgtggtggccgcggcggcggatgtggtggtcgacgccagatctcctctccccgccgccgccgccgcgaggaggaggaggtagtgttagtcaaggaggacgagcagaagcagaagcactgcggccgcgttctttgatcttttttcccaactcgattcgatcgatcacatcacttgctaataacaagatgggattagctgttcttatctttgcatgttctgttctctaattcttgatgaaaaaaaatcaagaactgctctcgcttcttatctttgcttgtcatgctgatgtttcaagacccagagagatccttcacgtggtgaccgcttctttttgatttttttgcctcttttttctttttcatttcttcaatttttcgttgtttaacctacaaacgatctcttccaatccccaagattttcttgccttttcttgactcggtgacgggaggagatttgctgcggtgccgaggcgggagaaatcagtggaccggaataatgggtggcgggaggagatttgctgcggcgggagtggttttttggagggcaatacggggatttcgcgataagatttctgggcgagggcacgcaagggcgagcaacgccgcccacagtggttttttggagggcaatacggggatacgccgctcacgccctcgaactgacgaggtttcgcgtggctttgtttggtgacgagcttcctagctaaggcacggttgcacgcgacacgttagcaaaattccgacgtggcacacgaggttccccctccagctaggagcactgtgagaggcctcagtggggacgtgctcccgtgaccgcggatggagctagcagagttgcagctcgtgcctcactgcctcggccttggtggtagtatgatcggatctctgcgtctgcgagcagaagagacgggaaactatgggccgggcctcttggttgcctggtttgcctagaagggtagaacttggcagtggagacgacgggcattgtcccgtggaaatttgatgatttgccgcttttagcggctgtgtaaagagtgaaaaatcatcatcaagataactcatctgtgttcgattgcaccatggaatcgcgcctctattctcgtggtaagaggagaagcaattcgctaccaagcctcctctgtcccctcccaagtacgaagtaccaatcacttatcactcactcgttgcttcatgtacatcctccagtacttaagcacatggcgtcctcgtagtcgtaaagatgagtcgcgggaccacaaatagatgcatctaaatcggcaagattaacttcgatggcggcggacagagaagaaattccggtgttccttgcaacatgagcgtcacattggtcaagtgattaggggatggcatgtattgacagcgaaatggagtggatgcccaggccggtctgtgtcatgagatgaggagcaagggaggcttcgtacatcctagagatcaaggggaagaggcagccaacgcgcgagcagtcggtgttactgttaggccaggaaaaaagccacttctggattactaataacttgagtgtgaactcgcagcttctcctcattggtttttggttgattttagtagtatgcgacaatgcgaaaacgagaggacggggagtccagaagtgttcagttcagtcagtaaaactttcgttagatgtaaactggagtagcgaaagatggaagttggtgtttggtgaccaacaatgaaggagacggcatggtcgggtaaggaaaggaaaggaaaagaagcttctgacttttagtggatctaaatggcaaatctagttgggttttaggcctgaaaatatgctgctgctcttcatatctctcttgtcccagagaacccaaacagaagtgcaaccaaccaccattatattcttcatactacctgcgaagatctccattcatggacgttccctacgaattaaatgcacacgagcaaaccatgcagccacagcgaatctgtccccatgtcatactgtaccttctcgtggaaggcttttcgccttttcggcgccgtcaaataccaaggccccaccgatcagttaaaaaaaaatactcacacgatcacacgatgagtccatggaggaggtaaaggtaaagatcgtgatcgatcacgcacctggtccgtcgaggcgggtgaggaagaggcggcgccacgaggcgaggtcgtacgcggcgacggcggagtacgcgaaccgcggcaaccggtcggcgtagacgatgagcaggcgccccctcggcgcgtcgacggtgagacccagcgcgaccctcccggcgacgtcgggatccgccaggaccacgcgctcctcctccttctccttccctttcgcctcggcgcggagctcggacacgccggcgccgaagaagttggacacgagcagccgccgtccgtcggcgtcccacttggcgcactcgtggagccacccgtcgcccacgtaggagacaccgccggcggtgccctccaggacggcgaccgccgcggcggccgccagcgccacgagggcgagcgccgtccccgcgcacccccgcttcctcccgccgccggcgccggccgcccccgcctcggcggctcccccggcaccgcggccgcagcagtcaccacacatggtgcagcgattgggtagcctacagcagcggcgagatttgagtagccaacagcagcggcgagatttgggtagcctacagcagcggcgacgaaggggaggaggatttggcccgatccgatttggtcaatgtagggcgagctggtttgggtcttcccgctattaaaaatgtatagtactgatttagtgaggattttggtgagctggtgtgttttagcgagtattttggtggcattttgacgaccggcgtgggccgcgggggagcggaatctttcagtttgtccctatccatccatccaactccaacgctggttgatctgcgtgagttttatgggacaagtttgagtgcggacggggtaggaacgcgcgctgtgaccgcgagtggcggcgagccgagccggcgagtgcatggagttgacggcttttggcaaggctggctagtggctggctttggaggaaagcaccggaagtcaaagccgtctgtgcgactttttgcctcgtattttgcttccggggggtcacggctttgcgaggtcatggtgtcacacggctcacggggcagggtgatcggtgtaccgaaaagttgaatgctttttgcggtgtaaccctcttaagtacgagaaatcaggtagaactccgtagagaggactcaacgagagtgatttatgcgtagggttggcaacaaggcaggttggaccagagcgcccccgcccctgctccccggccccacagagatggtcgggtgaaaaccatcacccgtcaagtcgctgcaaggacccgtgggtgcgtggggccaggcaccacccggctgacgattgacgagcgaggagccgaggagcagcgacgaagccaacgccaacgagggacaacgacagacaggtggctgaggactgggcgtcactgccaccgccgctgcggatgcgcctccctggccgccgccgccgtggatgcggtgctagcccttgccattgccgtcgcggatgcgccgctaacgccaacacggatggtcgtgcccctggtcgtcgacgccgcgactcacaagaagccgccaccgcctgctgcttccgctgtccgcgcgtgtccaccgtcgatggcttgccacccatccgtgcgttttccgctgtccgcgtgtgatggctgggtggggtgggagggaaatgaggataaggttaaggaagggaatatattaggaattaaggttagagtaaatgggcccttttgg

SEQ ID NO: 26933 - DNA, 10546 bp, Oryza sativa
  unsure (1)..(10546): unsure at all n locations
tcccacaatatattgtgtgtaaatgaccgatgggttccacatatatttttttaattcgaatgctacgtaagcaccacgtgagacgaaggctaggccaacatcgacacgtcagcgccacatcagcaaaaccgtcctccaaaaccgctgagggagtcaaattgcactggttttaatagttcggggagtcgtcttatccggttttgtagttgagggtcacgaattagattccgccgagaattaagggagtcaaagtgaactttttcctttgttgaatagggtagatagggtagattatgaggagagacaaggccgtcccatcctggtagactaacgagtcgtcggtatttgtgggccttgcatacggccttcaggcccgtctgctctatgaatctaaattggaaaaagtccattttaattcccttcaatatatgccgaatatgattcgcatcaatcgatcgtagaaccgggtacgtcgatactttcaacttttaccgtgtaaaatgactcattcaactgttttaagagcggtattcaactgttttaagagcggtttagactgacgtgacgtccacgtgacaacctggtcattaaataaattaaaaaattgggtcgtgtttagttcgtgtgccaatttttttttaagtatacggatacacatttgaaaaattaaacgtagactaataacaaaacaaattacagatttcgcctataaactgcgagacgaatttattaagtctatttaatccgtcattagcaaatgtttactatagcatcacattgttaaatcaagacgtaattaggctcaaaagatttgtctcataatttacatgtaaactgtgtaattgttttttttcacatttaatgcttcatacatgtgtataaatatttgacgtgatggaatttttggaagtttgaagggaactaaatattgccttagttttttttctaacgtgcctttggatggctacgggacgttcgttagtttgtatccaacggagtatattcagttctctacttaaaaaataatttttcatggcgtcacctataattttcgctggcggttatacgtgaaaaccgctactaaaaatgtaacaaggggtgaggggttacagaccgccagcgaaaatcggttttcactggcggccacgctaagaggtccgccattaaaaattaaaaatagctttattttcgctggcggctactctaagaggcccgccataaaaaattgggttttcgctggcggccgattttcgctggcggcagctaacttgcacctactgtgaaaaaaatattccctctagtaaaatctcctccaatgttatcccttcccattcacctctcccattccttctcttcctcctgcagcctctccacctcctgtcctccagcctctcctcctccttctcctccaccacctcctcctcctgtcggcgtaggaaacacagcggattagcgacggtgactacggcgaccgggaggggccgggaggggtgccgtgatccacggccgggaagggcacgggcgcaggtgcaggcgtggcggatccggccaccgcagagccgcgggcggcggatccggccgccggaggaccgcgggcggcggatccggccgccggagggccgcggggagcggatccgggcgcgggcggcggcgcgcggctgatccgggcacgggcggccgctctcggacgccggcggcggtgcgcggcggatccaggcgcgggcggcggctatcaggcgctggcggggaggctagatctgccgccgccagatcggcggcgcctggctggtggtcaccggggagctgcatgctagctgcagagaggaggcacgaccgcacgagaggatcctctcttcagttcatgcgttttgttctgatctgtttgcacgtggtggggttcaactgctcattatgtttgacgtttctggatcatcattttcttctgttcacgtgctcattttcttccttcgaattccagaaaccatttctgcagcgggctgcggtggaggctgcggcggggctctgtgcagcggcggtggaggccggcggggctcggcagcggcgtcgtcgaggcggaggcagtggaggcttgaatgcttgaatttttttatgcttgaatgcttgggggaatagaaatttttgactgtaaatttaaattgtgcttgtgtgaattgaattttttgactgtaatttctgcttgggtgaatggaaatttctgtggatttttgaatggtggagcgtcgacggaggcagacggagcggtgtcgctccgtctattattttttttaaacttggccacgattaacactggcgggtgacacagtgttactcgtattttcgctggctggccagggaaaatgtgtctttgctggcggttgggcttaagacgactgacagcgaaaataaattatcgctggtggccaaaaaccgctagcgaagatagtgattttcattggtttttgttttttggcggctcaaaattctgtcagcgaaaatccaaaatggccgctatgaaagatggttttcgtagcagtggttatactacacactgtaaggcgtgtataaatctgtgaaaggataaaattggcaataaattagatgtcactagagtaaattagtaggtccaatcaaccttaatctaataacgttagcacatatggcccgccctaaacttttgtttgtgtcaaatcgaaggccatgccagttcaggtagacgattcatcgtccgccatggacacttaggccgtgtttacttctttggctaattatttttaaagtataccgacacacatttgaaatattaaacgtagactaataacaaaacaaattatagattccgcctgtaaattacgagacgaatttatcaagcctaattaatctgtcattagcaattgtttaccctagcatcacattgtcaagtcatggtgcaattatgcttataaaattcgtctcgtaatttacatataaattgtgcaattattttttttcgtccacatttaatactctatacatgtgtctaaatatttgatacgatattttttgtcaataatttttgggatctaaatacacccagatctatggatagttgcaagttgggcaatttgtcatttattttatcaatatacacgcgatcttcaggaaggcaaagtggtgcccaccggccaccgtccacttcagcaccatccgggagtgaccatacgcgagaagcatgaaatcggccttgccaagcgctacggaagcgtgaagcgcgccttattagcacgcgccgcttgcagcctcctctgtccagggctccaggtgttctaccggacgcagaatgcatccaacctaagctacccaacacacctgacgacttgctataagtatcccctttacagccactccatagctcatcaagcagttcgaacactccatttggttgtcattttcaactataatccaccacaactcgtgcaacatcagctcactcgtgttcccaaccgcgacaaagcttcacagatggaggctcagaaccaagaggtcgctgccctggtcgagaagatcgccggcctccacgccgccatctccaagctgccgtcgctgagcccatccgccgaggtggacgcgctcttcaccgacctcgtcacggcgtgcgtcccggcgagccccgtcgacgtggccaagctcggcccggaggcgcaggcgatgcgggaggagctcatccgcctctgctccgccgccgagggccacctcgaggcgcactacgccgacatgctcgccgccttcgacaacccgctcgaccacctcgcccgcttcccgtactacggcaactacgtcaacctgagcagnnncttcgtctttctggggcgctacgggcgcggcattgcccccacccgcgtcgccttcgtcgggtcnggcccgctgccgntcagctccctcntgctcgccgcgcaccacctgccggacgcggtgttcgacaactacgacccggtgcggcgcggccaacgagcgggcaagaaggctgttccgcggcgccaacgagggcctcggcgcgcgcatggcgttccacaccgccgacgtggcgcccctgacgggggagctcggcgcgtacgacgtcgtgttcctgccggcgctcgtgggcatggcggccgaggagaaggccggggtgatcgcgcacctgggcgcgcacatggcggacggcgcggcgctcgtcgtgcggagcgcgcacggggcgcgcgggttcctgtacccgatcgtcgatcccgaggacgtcaggcgtggcgggttcgacgttctggcggtgtgccacccggaggacgaggtgatcaactccgtcatcgtcgcccgcaaggtcggtgccgccgccgccgccgccgcggcgcgcagagacgagctcgcggactcgcgcggcgtggttctgccggtggtcgggccgccgtccacgtgctgcaaggtggaggcgagcgcggttgagaaggcagaagagtttgccgccaacaaggagctgtccgtctaacagccggacgatcgaaaggcgcactatattatggcaataaatcatttgattatacttatgctgcatttgcgaagctaaggtatactatgcaagccatatgtttgtgttcgtacgtgttgtttgggacgtacagttgtgttgttgtacgtcgtgaagtactgaagtgttcacagtagatcacaagttcacagcaatcaatgaggaccctgtaagccagtgtaaacgaggaacatgccatctgtgtatgacagtgagaaattatataagaaaaacattttgtgacaaaagtaatcagggctacctttttaaagtgctgttctggcagcccttcgctttttctttggatttttagagtgttcatttatcttgtgctgaaaataaatggtgtagcaaaaggtacagatttaaaataggaaaaataatatattttactccctcaaactatttcaccggagcacttagcctcctaaattattttttttggctcattttacatcccgaactactgaaaacgatataccttatcccttacattgtttctctttgtgtaagtcaaattttccactaacgtttttgtaggatgatatatgaattacaactatcgtctcaacatttttataatttttttctcactgtttacataggatgaaaacacctaaaactaattttatcatcaacattttaaagttcaattaaatagtaatgaaaaaaattgatttttttttgaacttagataatggcgtcatctatgattgtaaaaattttcagcttagaatacaacttgtataaagcgtaacataaataaaaatattactattaggtaataaagtaaactattttcaatagtttaggtttaaaatgaggaaaaaaaatagtttaagggttaagtaatcccatgaattagttcgggggagtaaggtggattttctttttatttaaaagtctgacgccaacgatgtcgagtggcgctgagacgacgcggcgctgcagattgccttggtgacacgttatttagctaaccagtgcatgcaatgttgtatagtaaattctctaaaaatatttatatgtcagaagtatgcaaaaagttcccacatattaatgacaaaaggggattatatctttgagctcctttagagcacaagattaaaaaaaactaggaatatgatagagattggtgtgtaaatcagaggattaaaatacagagaaattttatcgaatagaagtatgtgtttggatagagcataggaaaaacatagaattctttgtaagctttcgggcaaaggaaaccgaaaggagagctcggagtggattgttattgtcctgtggaatcagtagcttaggaaatgttctttggttttccgttgttttcccaatgagcaatttttctgatccaaaggacactatagtaacttaattcatagaaatacaaatcctctaattttttattccctttgtttttcctccgatcaaaggaggcagggagctctcccaaaaagaggaatatctataccattaactaacgagggtccatattatatatagaaaatccaatttatttttttcaatgggtaacagtctatcttcactgtgcgtgaaattcgggtagttttaattagagtaaatttcacaaaactattgatacttttactacaaatatttaagatggtatatcaaaaatttagtaacaaagttatagaaaaaatacaaattaatgccaatatagcattagtgcaaagaatttaaaatctaaaaaatatattttgtaaaagctttttatactattttttatgatgctctgttttaaatatgtagcttcgtgataaatttgatgttaaatagtttcatgatgtaccgccttaaatctctagctttgaatagtttgatagttttgtaaaatttatttacaaaaattatgggtcttgaagtggtaccacacgggtacctactcaagactgtcgtgatcgaagttcacgtagataacccttttacattattatttcagacggtgacaaacacctcttgctttctcagcaccttactcgtcgttgtcccctagagttgcaccgaaacacggaatgcattggcacggatcaatgcccaggcgcctagcatcatccacacaacaagaacaagaaccccacagaagcacaaacacaaaccgataccaataatgtttcagccggccgatgtcacggacagcgagacacagccaggattactatgcacgcactcagacggatagcctcttggcggcgaactcttccgccttctggaacgcgccggcggccgcctccatcttgcagcacttgcacggcgggctcaccactggaaccgcgccgcgtgcgccggcgagcccgccgccgcgacgcgggtcggccttgcgagcgacgatgacggagttgatcacctcgtcgtcggggtggtacacggccagcacgtcgaacccgccccgccggatgtcctcgagatcgacgatcgggtacaggaacccgcgcgccccgtgcgcgctccgcacgacgagcgccgcgccgtccgccatgtgcgcgcccaggtgcgcgatcaccccggccttctcctcggccgccatgcccacgagcgccgccaggaacacgacgtcgtacgcgccgagctcccccgtcagggtcgccacgtcggcggtgtggaacgccatgcgcgcgccgaggccctcgtcggcgccgcggaacagcctcctcgcccgctcgttggccgcgccgcaccggtcgtagttgtcgaacaccgcgtccggcaggtggtgcgcggcgagcacgagggagctgaacggcagcgggcccgacccgacgaaggcgacgcgggtgggggcaatgccggggacgtagcggacgaggaggtcgtactccagcttgctcaggttgacgtagttgccgtagtacgggaagcgggcgaggtggtcgagcgggttgtcgaaggcggcgagcatgtcggcgtagtgcgcctcgaggtggccctcggcggcggagcagaggcggatgagctcctcccgcatcgcctgcgcctccgggccgagcttggccacgtcgacggggctcgccgggacgcacgccgtgacgaggtcggtgaagagcgcgtccacctcggcggatgggctcagcgacggcagcttggagatggcggcgtggaggccggcgatcttctcgaccagggcagtgacctcttggttctgagcctccatctgtgaagctttgtcgcggttgggaacacgagctgatcagctaatgttgcacgagcacttgagctgtcagtggaaaacggcaagcttgtggaatgcttgagctgcttgatgagctttgaaatgggaaagaatggggcaatatatagcaggagaattgcctcaaagattggctaaaagcgtagtcgaagaatgtggaacgcattatgcatgcatggaaaattggcaaccttcttcatgcgtgcatacccaatgaggcttgtttcatgcctctgcgcacccctggctggtgttgaagaggacgacattttcctttgcttattttgtcttctttagatcgcatatgctttttaaaaaaaaaaatcttatgattgtgctagatgtttgtgaaacgtgatcgatttatcccgggccccggtttagaagctaaaatcttgcaaggtttgggattgcaacggtaagtgaattggattcatgtgggtaggcaatggtgagtggttagatttaaatttccatgatctttttcaccttttacagtagtttgatccgattagctaaaacaaggtttgaagaaattgaagagatcatacttccatgcccccaatgaacgagaggtgagcttctattaataagttgtaagaccatcttccctacaattctacataccggccaaaaatgattgtttgtcaatatggtatgatccattattaattatgttgctgtcaaacaatagcacactgcatactgatgcaagcataaagctgactaacaagttcaagacaagtggatccatcgtctatagtcctagtaggcactagtttatatatacttggacagactacagagccattattaggtgagaatatttttagatttaactggtttctataccaacagaaaacaattgagtaaaatcaatcagggtgcaatatccatcatcaataaggcctttccatcactggaatggcaaccttcagcaaaaatccaatcgaatactccataatgtagtgactccttgccacttgcagcaagaagaaccagttctggttcaagcacaaaactgcatttatgatcctttcaggcttgtacaaactgtccaatgatgagctcacaaacagccaaccgaaaccacttcatctgtgtgaattcaagagaatatgtcagtcattttcttggttaaagcatcaatgtttatatagagtattggacaaaaaaaaacagggttcacatagccaaagcaaggcgatattctgaagactgatgcagcataaataaagtataaaacagaagagagtatagaatgaattctcattataacagtatcaaaacgatttttgctatttctaagttgcctaatttttctgtctttggcctcggtatacggattgatttctcatttcaatccaataatttagaaaattaacttatatcgtgaaaactcattttcccatcttcaatagctatcctgttattaaataatattattcatcaccaccaaaatgttaggctgctactagatcagatggcatacatttctgctgcttaagacagcactgttccacctctgcttcatgagaaaacaccaggataggtaaagagccacagtaagcaacaaataattgtattctctcccatgagaaaagcggaaataaaagagaagttaccacagaagcgatctttgcattgatgagaacccctcggcctcaggaccttcacatggtgctccaccaccactagcggacactgtcttgttttcggtgtcagctactgaatctgaatcggttttactactaccgcttaagcagtacttctgcagccatctatcagtctcccacagaacatgcatgatgctctccctcgcagaatacccatggctttcaaaagggagtatcaccaaacgagatagtgcgccatggcctttcaaggcattgaagaatcggtctgactgtaagaaaaatatcactgatataattagataatattaaaccattagccaatcactggaatcataatctacgaatgatccactaacaatgaagtaagacggtatcctggatagagatgatgtgacgaggtcattccaggggttgctagaccataaaattcgtaccacaataaccatgtaagcactaaggtgctgaaaaacagtcgacctaatttcatatatgcaaaattacggccctgctacagtgcatgtttagtactccctccgtcccagaatataagaagttttagagttggacacggttattaagaaagtaggtagaagtaaatggtagagggttgtgattggatgagtagtggaggtaggtgggaaaagtgaatggtggagggttgtgattggttgggaagagaatgttgatggagaagttgttatattttgggacaaatcttgagagctaaaagttgttatattttgggtcggagggagtatttgcattttctaattctatcatactattgtaaaggttttggatgcttgtaatactttcaaatgggatactaatacatttactaagataaactatgtacatgcataaataatttttgggggcagaactgtaaaaagtccaaacttctgaggggcaaaatattaaaggtgacacaactcttctgcagatctaggtaatatgttttaccgcataagagtaaatcagttacatgggactttacctgcatcgtaagtgttccagagttgttgtcctgctctccatgaataagcaaaattggtttcttgatcttgttggccgacatgaaagggctcatctcgacataggtgttagtcgcctcccatagagttctgtcctcattctacagaaaatgcaagttgttaataagggctg

SEQ ID NO: 26934 - DNA, 4693 bp, Oryza sativa
catacctgtatcacatcagaatccctttgtcttggaggccacatatctgctgatggaagacgttcatgcataccaccttcaacatggattgctctaccctttggctatatgaacaatacaagttagctatggcagatagcacataaagaataaattgatccattcactccaaaatatgacttcataataccttagcaatcccatttccttctttcaatacagaataaatctctgactttggcactgatttactcaatccaagattgtaatggaactcctgaatgcagagatatgtaaacaattcttttttctggcaaatagaatgattgaatgaaatttcaggttatctcacctgttgcaatcctgacaattcatttgcaagtgttctggttccatgcctgaagtgttcctacaggagagaaaaaggggctctattatcatctattggactaaaaaattataacataaatgtgaacaaaataatgagtcaacaaaacattaaagcctaccatgtcaaaacaatattttctccagctttcttcatccagaccgaaattgaagtagtccgtgagatccacaccatgctgtctccagggcttctcttgaaatgcttcaatgtctacgtcaaaaactgtcctgaagtaacataccataacgtccaaatcagaggtcaagtgcaattgcacattctagttatggtatgcatatagacagaaaggccaacttatgcagctagtaggcataactaataactctgcagttagcaggaatatcttttaatgtctattggccaaattaagatcataactatcatgtcagagagatcatgactttaaacgttgaatattccagaaaactacgacgagaattacaagaatcagttgtttgttcttgggccaaagacagaatggcacctgttccttggtaagaaaaaattgaattccttttgaaatgcatgctggtggcttcgatcaccttgtcctgtgatcggtgctgttgttttctcgaaaagccccttccggtgaagctcaccaagctggaacacggaacaccacataaaaaaacaaatgtcaatagaattgctcccagcaaaatcaaatacataactcaatgtgatattgtgatataccattcatcctaattagtaacagaaaagagatagaaaatacttgcaaataatacgatggaaatgaaatctgttaggccttgttcagttaatccccaagaggtagggatcgaggggattaattcacaccttattcccctccaaatccctctcaattcccttgtggggtgggattaactgaagaagtgagctgtgccacagactaatgacagacgattctggaacttcccctgcactttcgatttccaatactgtctacaatttctacgaaattttaccctacgggttattcgccaattcgtgaagcataccttgccccgaccgccatcagtagacaggcctttcacacagctacccgaaacctccccttcctcgctcccctcctcgcatcggccagcaggaggaggaggcggcggcgcggcgccatcctcgttgagcacgatatggaggtcatcctcgctctcctcgtcgctgctgatgtagcccgcagtcccgtcgcccaagtccaccgcctcgttcgcgtcggcctccgtgtggtgggctcccggcgcctcggcctcggcctcgccgtcggtggccgggttggagcctccgctctccccggcggcggcaagcgcggccgccacctggtcgtcgaggtccgcgtagaggtcctccacgtcgtcttcattcccggcggcggcggcggcggcggcgtcctctgggtcggccatggggtaaagcagatggattacgagcgacgccggagtggtgagagcttgattgctgctaagccattggtgatgccggctgccgcgaaaacctttgccacgctgctgctacagaagctaaaaccctaagcccatggagacgcgctggttggtgaatggtgatgatggatggggcttgcaactgcaggttgttgcttccgggttctcatatcatgggcctccactgctgcatcggttcggtttcctttgggcctcaaatcaaccataccggtaatgggtattgtcaaatttcagtacatttttacgtggaactgcctgacaaatcctatccttttgcgggtgatttctaaaagaacttagatttttttacctttagatttacatccaacagactacaaaagaaaataacaaatatatatttgcttacacaacatttttatcaaaattacagtacacttacatgttatatcaattgaatttatgttatatcaattgaatttacgaatgtatttacaaatgtattttaagttataggactgtaattttatattttaaataaattaactaatacatatttacttacacaatattttttatcaaaattatagtgcacttgcatgtcataggagtgtaattttatattttatttcttcaatctcttcacctagccgcatcgacgtgcaatgtgtgtactcatcaatactgtgccaagctagatgttgctgacctcatgcgtgcgtgggaaagaaacgcatcacagccgctaactaaataatgcagagactaatccaagggaagcaaatccgagtgatttcgggccaaaaatttgtcgccagatgtttacaaaatcggttttatgtttacaaaaatttgatagtgctagatacgttctttttgtagccttatcatttttattttcgaaacataatataaacgtagacacccacgtacgtgcgtacactcaccctttatcaaattttggtagtgtttatatgtaagaacttctaaactactaaattttggtagagtaacaatggtaagagtatgtttggtttgttaataacaaactgagcatgtccactctttcccgttcagtttaagaacaagtaaatcaattaaatgagtaaagagggaataattgtcttttgaatggtaaaagaaccatgctgtaggaaaagaaactttgttcagccatcacatgaagcacttcaacatttgtatgaaaatcatctgtgctcaaatttaagaacgtaaaagtgtaagttctagatgtgcatgtagccgacatacatcatttacagaaaatgaaccgtacaggtataaaaccaaaatctagtctgaaattctgaatcgtatgtattttcagtgtcctacactagattacaaagatgcaacacagcaatccctcgacgtagaagtgttatgtaggatcatgaaagtgcatcagcaacagatgaaatagcgtcccttgtcgcatcacaaataatgaaactcgagaccatcaaattcttttctccagcaaacgaactagatctgctcaagtggtgtaaattggacgctgctcctgttcttagaagccccgtagcccacaaaaacggatatacagattgctactaccgaaagaagcaaggcaaaggcagttgcagcatcccatgaacgatttggagctgggcggtaatgtgcagcttccatggatggttgaatatcaagaaccaaccagtcgcagctggccgaataatgctcggacttgctccatggtttgccatcgtttgggtaccagaaagccacagccatactgttgggcccacctatcgtgaactgtgcatcctgcatggccaaaggaacatttaagcgcaaaatctagtaaaacaaatttggtaatgcaaccataccaaaagctattccatcccgtgggagcgattttcaggttgggtaaaaagatgtcactcgctagtagtgggctgagcctgaaagcatgggttaagggcttaattcccgaaccacagggggcggcatccccatgtatgaggggggccggcttctgtgacctttcttggctgggctccggttgagctcttctttgtgaaataccatggggggcaatctttcccccaccagccaagttttttactcaattcaaccttagataccaagtaatcaaagctatcatatgagtatatgaccaaataatcgataatactactagacaactatcctgtgtcacaaaaaaaactggcatgtatcatcctaatctgaccaccttgcaaatgcctggttgtacaagtaacctgaataatcacgtggttaaaacaattactatactcatacgcaaagaggttacatgttaggtcaagtagagcagtgtttagaaccttgctaacggatcataataaggtgcacgcgtcttagtaagaagaggatgagcaggatggccacccaactatggcaatgttatttagacacaatcacagttgcaatactggaaaattgcagacctagctgtcggtacattagaaatataatgtataactatttgttggtaacttcatatatgcatttatgcacatgtctctaggcatgctggtgctcatggaatattgggaagaattgaaacaatagtagataactacctgctgtaatcgatccattgttcttaggggccttgaaaactcaaaataatatgtgcccttctcatcttgttttccgtaaggactgtcatcatccacaaagcctggagaggaagaacacatgatagtcagacaatataattttatttgggtagatttcccttttccatcaaagcttatgcaatgataaaaaaatgtttatttgttgactgtctgaatggtcttaagat

SEQ ID NO: 26935 - DNA, 1043 bp, Oryza sativa
acttttccttgtcactttgccatatcctctctttacttcagtatttctgcaataacaaaggtgtcaactaggatcgggcacatattgttcaaacatatacttataaggcatataactattgatggatatagacatacatatcaaacaaatcaaggaacggaacatttccttctggtgtggcacccatcccattcagcaagatgtaggtattttcatcttgcttcttaacttttgcaataacatatgtccccatggcagttcttcgtagcattggtgagccaggatcagaatatacatcttcagaagatctatcgaataagatgcgtggactgacatcttttttatctggggagataacccatgttcttgttttccgtgttttgtaccaagattcatacactaatgcaagagattcatcacaccaagaggtccctctgcatcaacagaatataacaggagattaattatctgatagagttagttaagaaggcaaataaatcgtcacaaaggattagcataactaacattctaaaaggaagtgtcatttaatcatatctgagcaccaaatatagataattttgatgtaagagacttatactatatatatggtttattggtaggaagctttgtattaatgtccttgtttatgggaagtttcctaccagtagtattgaactatgccagatgcagaaagcttaaccatgatgcaaatgcagtgaacataatttactgatcctactaaagtaggctaacacatcgctcaaaatacatacgcatatcggaggtcaagtttatgcagaatctctggttgttcaccatttataggctcagcattttccatgtaaactatgtcacgaggtgacacctctacttttgcatctccaccatcctgtgtctccaccctgacaaaaacaaaaatatataaactattttgcatgcaccacttaattatatgatacttttgcctggcaattcatttagatagaattacgagtagctaagccaagtaggaaaatgaactctttctatatgctcataatatg

SEQ ID NO: 26936 - DNA, 9865 bp, Oryza sativa
tctgatacgcatttgtttttattttgcttgggaactgttcttattctaatacacattcttttttattttctcagagtttttttttttcaaacaaggtgaaatagaacattaccatgtctatttacatcaaataacatttttcagtaaaaccaatagagtaaaagttgtaacattcaaagcttcgaaacccacatactaaataatagtcccaacaaaagggcaaataaaaaatttacagctgcgataaaagtttgcattattgtctcatgtaaccttaagttctcaacctgctatcctcttgatgaaaggatagactctaaggaacaatccaagcaactagtgtctgatcagattggatgggcctccttccagatctgctcctattttgatatgtatctactccttcgcttattattacttaattcaattgaacgctactatcacttgtacaaacacaaatagaacggtttaagtttgaaacaaccacataatacacaatttaggatgtctgagacatgaaagctactttttggcatatgggaattaaattgtctgatgaatgttattttttcagatgtgaattaatggtgtggtctgtgttaaatttgttttcagatgtggatttcatgcatacataaattagtagctagcctgaactgaaaatattgtctgtcagtaaaaaaaaaaaaactgcacttaaaaaaactgatgattgaaattctgttctacataccagtacagcatcgcaggtttatctggcctccagtagattgaacgctttcccttgcggacactgcttgttgctattggaatgtcctcagcaaggggcaaatcacaaagttccctaatgaattctccatctacagtccataattcaactttcttcggaaaccttccacaaggtacaatataggaatatggacggtgaatagaagaaatcattaagtatttgtcatctggtgatgggtcaatagatgtatatacagcaggagggccaattggctttactgttccatcaaaagaggccaatacaagctgcgaggtcgcataataatcaaacagatcggcatcatattcatctttcaaaagatcctggaaagttctcacttggaccacatttgatgtctcattggactgaattttcggaccagatggaactgagggcttctgcggtggagctccacgtgacagagggatagtgcagacaagcaaagtagaattgttaacccatacaaagctgcaacagcaaaacaaaagttctttagaagtaggacaggagaaaacagcagaaattgatattcaatttcacctgtcaaaaatagcatttaagtatatctcaggagatttaaaaagtggtcttgcttctccagattccacatctgcaatccacaaacgtagcttgccgcttgtgttgtcctcctaattgaatccacactagagttcattatatctaatcatttgaacaaatcacatccatttttcaaaggcagccaaccaattacctcatcaactctaacgctgaatgataaatggcgtccgtcttgtgacctaggtcaaatggttcagtgcatagagttaggaataaagtaatccataatacaagtaaaaatcatttctgaaacagctaaaactggaagcaaggcaattaagaaccagaaaaaaaaatccttgaagttccttgatggaaggtccagaaaattaccaggtgacaaaattaatccttgcgccttcaggatatccatggaccactttctctggacccaaagtcccatcatccatcagcttatggatacctattccagtgtagaaagacctacaaattatgtatatcagatttccaatcataacatgtcttggacatagtactaaacttgtcacagataaaaacgattagttagacaatgaaaatttacccaaattatttattgtacttacattctgcttctagtattagaatagccatcaattctcacaccagcaagtttctcttcaggctttgcgagatccgacaatggtggcagtgctcggcgcttcaggaataaaatcttgtccttgcttggcgagaatgatagcacgggtagcggtggtgcatcaacgatgtcttgtatttcttttggaggaaggcggtagcccatcatcgctgatgaaaggtctgcagagcaattaaatgcatcaattgttggctgtaccactggtctacattatcttttctcgttgacaaaaaagccaggacagaatctgctcatacagaaattaaaatagatgttcaccaggcatatacgttaactatgtcaactaagacaatctatcattgaacaagccaagcaagacaaactaacctatatgcagctctaacaggtctgtcaaacctaaaaaaataagatgccaatcaacttcttttgatctttttgaaacatgagaagctaagcgctatggccttcaccaatctatctagcgttaaactcataccacgaacaaaacctaaacaaatttgaagcactcaaaatcaccactaaaaaaatccacgatctcttcacgaaccgatcccctaaccaaagactagtgctccaatctcgtctccatcaaaaccactcaaaatccgctcaacccacagcctccccgcgattccactcactacaaaagcaaaaaaagatcacgcaatcaacgaagtcagcacgaaccatcgtcctcttgggcaagaccggacgctgcagccgccgccgccggcggctcgctggactccccggccgcaccaccggcggcggcgacgatgtgggacagccttgacgccgcggaggaggacatggcgctccggcgaggcaggccgagagggcggcgaggaggacgaagaggagcacgcagaggcgggactgggagcagagcgaagcggaggcacgccctctggaggaggatggtgagggaagacatgatttttaggtctctacctttcttctatagatagcattacaatagtggggatggtgggtactcgtggtcgtgggattgatggaaccgggaaaaagatatttctgctgttttgatatattcaactgattttctttctatgcttgaaaattgaatttcgagtataaaagtttttttttttggcttttgtcgcaaacatagatgatgtactccatccgtctcgtaatataataatctatgataggatgggatatttcatagtcgaatgaacgtagacaggaggcaggtacagatttgttgtactatgaatcgttttgttatattatgggatggatggattattactagtagtagttttaaatttcaaataattttggtttcttattggcctaaattttgacacttttattgagtgtgatgtaaaatttaagtgtgtcaatgaatgtacgccgaattagtactcccttcgtcctctgaaaaacaaatctagaactggatatgaatctggatagagatatgtttagattgatagtacatggaagagctatttggcaaagtctcagagcccctgtgaatcgcagggtagaaaaaacggagtaataggaaaaacacaggattctgacaggaattgaagtgtaaaacagaggattgcaaaacacaggaatggtcgtttgattggagcgcagaaaaaatacacgaatcggatgagagagatagactcaaagaaaattttccaagaggttggagctcttgctaaatttcctccaaaatccacatgcaatgtgtcattccataggaatttcataggatttggaaagctacaatcatttgaatcaaagggccaaatagaaaaattttctatgaaatttctatataaattctttgattcaaagttgaccctcgtaatggatctatcagacatggtctatttatctcttcgatgagggtcatggagaggataccgatgtatttggcagctagcgtgtgagacatttcagactgtttatgtggcgatatcgcactgccgcctgagcaattaccggatgactggctagaagatccccgtttatttttctcccctgctttattcgcattccactacagatcgtccagtcctagtgcgtgtgtttctggaacgcgacctgcaacgaaccgcccgccgttagcaaagcttgaaggcttgaagtctgtccagctttcaggtactagtacagtttttatccgtccctgtccctgccatatagtagaacaatatcttgtcagattatctgaaatctaaacgagtctagaaggctgagatctaaacttcaactgcaaactataacttcctcgtttttcattagcatgttttctgatacattttgtgtaaaagaaaaatgtatacaagtgtttaattttgcatatttataacaattaatttataattaaccatgcgctaatgaatcaccatgttttgtgttttgtgtgctgcaaatatactactccaatataaagtttcaaacaggcctaaaacttcatattgatggtaaaaaaaatggaaccagctgaggagtgaggactggagctcagaaagtcacaattctgctgctctaatcaaaatcttcagtaactgagaagtcaaaaaaaaaatcttcagtaactgaaatgcttggcatttgctcaactttgtcaaattggaaactatctttgaagtggaacaggaatacataaacaggaaacaaacgttggagacatatgctccctaaaacatatctgaatatgatatacatccctatgttattctgtagacgttcaacatcactgctatctttttaccatttggcaggaccgcaagggtttttatatacagtggctgaaacaagaattacatagaagaatcatatcctcacttaaaaataccaaaaaaaaacctaaacgtgttactcaaaaggagacatgctatgctagtatcaaagtttgcagtctcagaacaaactgaacccctgcgattcctcctgattctcttctgatgtctcataatatgttggctcctctctttccccacttctataactatatgcatactctgtactctcttttgaataatatgctgatgcttcatactctggcttgacaaactgaagcatatacttcaagccatttatgacatcgtaaatcatcaatccaattcttccaccaacccaactgcccagatggcttcctgtaagataaccaaacctccccagcctctcctcaccatggaacccacctacataggttccaaatagggtgccggtacctcggagaaaaccttcagtcatgcttccaccgaagtacatggcttcaaagaagtcccaaccagaagaaattatcggccccaatatcctcttggcttgacgagctgccacttttgcggctttcgcaccaaccttctgagcttgctttgctgcctcagcggcagacaggccttctgtcacagcatcagccaatgctttctcaatggcccggtgcctcaccctttccgtatgtgcagtttggaggttgtagacatacaacttgatgccctccttcactgcgcacgcaaggctgcctgagcccatatcaaaacagttcatgaacgtaaactggccactctttgatgcttcctccttcccgacaagttccctgaacttctcagctgtaaaatgcaaattttcagagttcaaaaaaaaaaaatcaaaacatcaacagctaacagctatcaacatagaactactactaatttttttcatgttcttatcctggtgtacccacttatcacaagctgtgttttcaagtcgtccgattagtcgtccttatagctaccctgacctcgatcaggaacttcgaagtgattagttcgaccagaaaacttattgtccgactaatcacgactagtcacgattagtcgatcaaattagtcgtggacgactagtctgttagggctaaaaatatgtgttagactttacacttcagtggcaggccttttgcccagcccaagaaggcctttacccctcatctaaccgactaaccctgaccagacatctagatctagtcacgagagagaggggagaaaagatgaaggacttattgcaactaggacaggtaaatgatttaacttttaagaccttaagtcaagtgtgaactgtcaactgtgaaaatctgattatccttagtttgtactatactatactagtatactatggtaattcgtacttataatcatctatatattatcctgggcacccctagcctatagtcaccgactaatctcaactagtcggtgcccttacgactagtcccgactagacgacttgaaatcactgatcacaagatcaagggattggttggcagggctcccaacttagcttcttaacaagacttcaccattaaaaattgatatataacacatggatttagtatttaaactatgaaaaagaagaacttgatatatgatgaaatgtctgcaaagtgtgcaccataatatcataacacacgtacaccgcggtcggccacaatatacaagggtaggcaagatacacctaacaatcataattggttcagctgatagacaattttaagaatataactgaatatattggcagttggcatccccagttcgtcacagtggtaatattctaaccttcaataccaagattatatacttgtactgcttgttcaatgttccacccatccttcctatcttaattacattgaatgacctccttcggtcattccagcaaaaacatccgtacgcattaataattaaataattataccaatttagtaccaatttcaaccaaatttacgccttcctaaattatggccaaaagaattatgaaaacaaggactacattggcagagcatctttttaataggcactcaaagttcgggctgaggactctatcctagctggaccaaatgaactaggctcgacctaagggcacgataattattagtttttgtttacctctaattcgaaattaatacaggtaccaatcattttcagttgactaccttattctgcaatctccacaactacaatgacgtcattagttttgcaaacgagacggtaagaaaaccatatcatttggagtgcctcctaaagctatggccttcactcttcgaagcaattaccaatcgcccaaaagcccatcactaaaattctctccactcaaaaaaatcaaccaaacaacacccaatcctgcttgacaagaacagcgccctccttgtcccacccaacaacaatacgcgaattacaggatgaaacgaaaaaagcagacatggaaattgcacatcaggacgtccccaatcgacgattaacctactctccacgaggccgtacaaatccacagatcaagaacgggaactaaccggtcatgctgagcgcgaggacgcccacgatgaacagcagcagctggacgcgtcgcttctggatgtccagcatcttcgccctcctcctacgccccttgcctcagacgctgcggagatcgattgccctcgcggatcgcatccaccggaggaggaggaggaggagggaggaagggaaaaaagaaagaataaataaaaaagaatggtcgcagcgtcaactccgcggttgccgcgtgttactctagaaacgaagaagacgatgcgcgtccagctcactggcacgtggggtcgtgggccccagatgtaggaaaagcttggaggactgcgacgtcacggggctaaaagctcgagggcctaagtgaaaaaacttcggggtattgagctgatcagctgaacagaactgcccccaagacttgtggagttgtagcgaagctgcaagagtgacgcggcggcggcgatggacggcggcggggtcgaggcggcgatggacggcggcggggtcgaggcggcgacgacggcggcgtggatggcgcggcaccgggggatgtacgagcgggccacgaggcacccgttcaccgtctccatccgcgacggcaccgtcgacctgtccgccttcagacgctggctggtcagttcctcctctcggtctccaaaattcccccatcgcttattaggcagacaaaagatctattgtaattctcgtagaaatatcaaagttctaaatggtctgaagtgacaccgttcaattgttccttctggttagcaaaagtcctagttggtattagctgattagccaagattggaagggaggcacgatgaaggttcattgttagaatttgcagtaaaaactgtgagctgcgagaacattgttggattcagtaattgaccctattgtgttatcttgagtgttggatacttagaagatgttggtacctggccagtccagtaatagcttcaggccctagcatttctttcaattatgagcatctgactcattcttaatattgtatgaaaaatgaaaaaaaaaaagctttattccaacgactgaacaaaaaaacaaatagataaaggtggttcctaaatgggggaacatatcctatgcacactcacttcccatgcacatcaactaataaatatcacggaaaattttagaaaaaaactgatatgtactcttaatagtattacacgtatctacaaaatcttatattcaaattgattatattttaactgtaacaaaaaggtgaaaaatctaacagttttaagagtaaaaatctatcagaattttgtcttttttacgactaaaatataatgaatttgaacataatatttcatagataggtgtaatactatttaaagtatgtgtccaattttttctataattttttggacatttgttagttagtgtgtacggaaaacttgtgtgcataggatatgttcccaatggatgaacggaatacaataatcacattttcatgccttactcagggccaggactacatgtttgtgaaggaatttgttgcgtttctagctagtgtactgctcaagtgttgcagacagtcagatggctcggacatggaaataatactcggtggcttagcttcccttagtgatgagctctcttggttcaagaaggaagctgaaaaatggagtgttaatctagctgaagtttctcctctgaaatccaatacagaatactgcaggttcacgcctatcaaacttttgcataactttacagctatagcaacctgaagaattatttctgtggttctaatcaggtttctccaaagcttcagcgagccagagatcagctacgttgttgccataactaccttttggataattgaaaccgtgtaccaggatagctttgctttctgtatagaagaaggcaacaagacgccacctgaactcctggggacctgccagagatggggaagccctgagttcaagcagtactgccagtctctgcagagaattgcagatcgctgcctcgcagaagcgtcagctgatgctgcgaggagtgctgaagaggccttccttcgggtgcttgagctggaaattggtttctgggacatgagctcttctcgatcatgaacggcaacagcatctcgatcatgaactacttgggagaaataatcgaataatggtgcagccggttccataccgaaccctgcagtgtactactgtgttttcctcttccttttatccccatttctctccttactcccatgaacattgatgtatcatcgtaactatgaaataaatgaaataatgccgtttcctcctaatcaaaatcatcgtcgaatttcaagttcctggatagaactcatatatcagtatcaccgccggttgatctgcctgagacagctttgacactgctgaatgctgatcatcatcaattgacagaattccatttcaacgtggcaaatatacgatggaacatgtattccaaaagcacatcgtctcatgcacatgctcctaaaatgtcaagccagagtatgaatttgtattccaaaggatcgcttgtcctgcaatcgcggttactgaatactccctccgtattttaatgtatgac

SEQ ID NO: 26937 - DNA, 15530 bp, Oryza sativa
ggcgtcatacattaaaatacggagggagtatttgtttttgtaattaacaaataaaaaacctcgcattattgcagactaagacaaattaacgatcaaacttacacgcccaagaggcaaagtgtacaccccagtatgccatgctgctctagcttgcttagagctgaaatgtgtaacacagtaacagcaatggcgaaagccatggatgaactggtggcgctcgtgtgggctcagtcttcgtaggtgcggcactcgtcggtctccgggttgtccttgcagtactcctcgagcgggtcgctgtccttcttgcggtcgcgcgcgtggctggcggcggcgctgagctcctccacctcgtcccacgccgccgcgcactcgccgccctccgggtcgcccgcgcacgtctcctccgcctgcttgatgctctccgacaccttctgcgccagctccggcggcgtcggcgagcccgccgcgaccaccaccgccagccttcccagcgcgcgcccctgccggcggccggcgaacgacacgacgttccggcgaaccggtagcgtaggagccaggggccccgggagggtcgtcggagcctggaaggtggccatggcggccacggcgaggatggttgccatggctctggctgcctgcaccccgaagagtgttgcagtgaggaaggagaagaagaaggaggttttgggttggggtttggttgtttgggctaatgctgtttttatggctgcatttatcttatctctatgtggccaatagcgttgtgacaaatcagccttgccagatttcctttctagaaggcatcgtccgttttcgatcgaacgatcgagcagcacgcagttcgtgcacaaatgcttagtactagccccattagattaacacgaattaatacaatgttgaagatatcgcaaaatgtacactcgctagctgccaaattcgtagccgtaatactgtgagtaagatctcgttgaaaccggcagttattagctctggatttcctgaactactggccgtgtattaccggtgggtcacatcaacgagagaatagtggcccgactggccgtatgtgcttatgtggcgagcgcgcggccggcacggcacgcgtacaccgtagagagccatagacaccggccgtggaggcggggaagacgacgactcgatcgacgaattctatggccgtacgtggtggcggtagtagccagaagcagatggtttcccacagccaggaccggcgttacgtgccgccgctgatttcgatcgacgtacgtacgccgcgagggaatcactgctcgtcgccgtcgccgtcgcgccacgcggaattaagtcgccaccaccgccaacacgtactacgtacgtgtagagcggccggaccgtgaccgtgaccgtgaccgcgcggtgccgtgcgcggccgatggatggatggatggcttagctactggtggtggctgcgggttccgcggtgggtgatgacgcatgcgcgcggccggcgggtcgtcgggatgcgcgcatgccccgcccgccgacggcgcgcgacggtacgtacgtccacgtcggcgtcgttcgcgtcaggtgaccgagctggcctcgtctgagtcgtctctctcctttgtttatttcctttcttttctgcagcgcaccgagcgacccgggttaattcacaggatctttttgccgaccgcgcaacatatatgtgctgggtgtcaccgtgtccatgtcaggtgccttctttttttaattacacaaaatacgaacacgcaccaccgcaagtgtgctctaatacatgttcaaagagacgaattaagaacagtgacacatcacaacctctattaaaaccctattaaaagtactactgtgcatgtattatttgggagcatcagggttttgaactatagtagacgaaggctgtgttctttcccccactttaccaactcacatatctcgttttccacgtgcaagcttttcaaatggctaaacggtgcgtttttttataaaaaatttcaatatgaaagttgctttaaaaaatcaaattaattcattttttaaaaaaaatgctaatacttaattaatcacacgctaatgtaccgctctgttttccgtgtgaaggagatgggttcctaacccaaaggagcgaacacagccgaagtcatgttcccaaaactctaccataccatagtagcataatttaatcttcttgagctacgttcggcagtagaacaaagtaagaaagtttgtttcgttttccgcgcgcacgtttcccaaactacttaacagtatatttttagcaaaaaaatttttatagaaaagttgctttaaaaaatcatatcaatccatttttgaaatttaaaataattaatactcaattaatcatgcactaatagctcacctcgtttttcatatcttcccaattttctctatccacttcttctcaaactcattacttctgagagcaggtacaatagtagattataaaccagctataaacatattttaaagagataaaagaagagagagaagagaagtgggctacagatctatagccagctgcagcacggactccaagacgtaatgtgtgtatgacaggtgggaccatgtattaataatgtagtaagcaactattgtatgaattgactattaagctgactaaagataatttagagctagtagttggctatactattaaacttgctatgagaaagatcacatgcgattgtcaggcatttcggattcttatttctcttgggatttgggataaaaaagagtacacttaacggttaaacttgtagaaaacttattataaaactatatttttttacaactttaaccataatttatgattgttctgaaattttctttaaaaaaacaagtcttaagttttgtaatatgttcaaacgtggagcgtacagttcgtttgaaagtaaatgtataactgatgtacaactcttatttttattcagtactactctatttcatattacctgtagtaatcaatataaactgttatagcaacttaaaagtcattcgaaatagctttttttatttccatcaatgtttgtacagggcttttggttccgatccacaattcatattgctccatttcttcctcttattatatgatagctcacttcagcaagcttatgcctctgtgaccataatagacattaaggttttatatcatggtctcttgtaagagttaaccatggtctctaattttatataacaaaaactcatgtagctgtggtggattgggtgcatcaatgcaacgaggtaaccatttgggagacaataatcgaatggttatgaggcagcaagaggaagtgcaagtgaattaaagggcacttagtgagctcttggagaagacgatgaggaccacatggctattttatgggggacatgcaatttgaaatttaaaagttattgctagtgcatagaggctgtcaagacatagttgccaccctattatgttgagcatgtggtggtatttgttggatgtaagatgtggagataggttaagtttagggcattacaaagttgaggggaacctagatggttggatcttactccaatgataagaaaccagtattggggtatcactattatagaacatgcatgcatcgctattatttggagagacatcaattagaagtttttgaaaaagttggtcacttttcccattacttgcactattgaaaaggttaaacaataaactacgctaacctaaacacaaaaataaattgataactagtaaatacaatcatagaattacaagtaaaagtatccaaagttagatagagaacaacataaaaccatatacaatgataaagctttagttaaaatgggctaaaactgcagattgcatagctctgattttaggcttggaaatgtttagttttagatgactgttaaattactctctttattttatattataagtcgctttgattttttttctaattaaacttaaatacgtttgattaagtttatagaaatactcagtagcatattcagcataaaagaaatatattatcaaaatatatctaatgttagattcaatgaaataaatttggtgttctagatattgttaaatttttctataagcttgattaaacatcaaaatattttactaataaaaagttaaaagcgatttataatataatatgaaatgaagggtgtatcaaatcaaataccacgagaacacattacacaatctaagctaactgaagtttatacaatgttcacacactttatttatttctccactcttgtacctcgcaacaagctatactttttactacacaatcaaaacaggaatatggatcgtaaaatcaacaacagtattaacgtacagtagctagatcagaccatacaaaccgaagacacgcatgtggcaacaatcataagtcaagtactttatgtagagtttcatatgttttcgtagccctgcagcatactgaccggatccatgaccgagtctggctggaagtacagcatctcgatctgtggcggcagcggcggcagcagcggcggtggcgagagcggcgtcatccccaggtcgccgccgtagagctgcacgaggtggtcggcgacgtcgggcacgtcgaggggcacgcctgccacctccccgagcaggcggagctgcgaggcgcggagctggagcgcgctgcacagctcgcgcgcgtgcgcggcgagcacccggttctcctgctcgaccaggcggcaccgctgcagcacggcgccggcgccggcgcgcatggcgtcgttctcccgccggagctgctccgcctccacggccagcccgtccacgtactgctgcttctttatgcgggacctctgcgccgacagccggttcgacctcttccggttgcgctgccgctcctcctcctccgccgccgccgccgccgccgagcggcgtgcggacccttccgtcgccggcgcaactgacatcttgaatgtatcacagagcacaaagagaaactaacactcaccgtggaacaccgatcgaacacgtactaggcagaaatatttcgtgctccaagttgggcaatcgcgtgcaggaacaaggcgatactaggaaaggaacaagctagaacacatttagtagaatatatatttttttggatcaaacaaagcttcagtttttggtccttagtttcagcgaagatggatcgtgcacgaagctttgtttgatcaggtttggagaggaagcggatgaggcgaatcaggaaatcacgtagaagaagtagaggaacacgacggagagcgagtggaggtagcagaagtggaggctagcctccgtgatcgacatggatgcggctgaacccggcgaacaagaagccacagggagttcgtcgtcgatccttcaaatcaagaactacacggagtgaaaggatcgaagaagaagcaaccaagatcggttgatcgatcgagaagctcagctagctgaatcgatcgagccaaccgggaggagaataattcatggtgctatgtaatctataacctgaccaaagaggctagctagagctaggaggacgaacagatcgaaagggagggaggaatggggaagcagaagagtagtagtggtgcttaggtttgcgaagttgattgtggttttgcggatacacaagattgtgtgggggagaggggatgatcaatgaatacttatatatgtgcattgactagtactggagctagtactgtctaatatagttcaattacgtgtgcaccgactagtatcttttggaaaaaaaaagttcatcttttgctctaatcaactcggttggttaagtgaaatgaaggttttattgattttaccgcgcagatctgaaatttccagagatgagaaagaagattcgagtgaaatttccataacacaacaagagaggggcttcgttttcctccccttatgatgtgttttcacggctgctctgagatattcttttttcgatccacaaacggacaaggcatcatgcacataggttagtaattaactccagcaatggcagcaaagacgtattaagggaagcattgccacattgacactctcttcttcttttgttgtctgaccagaagcgagccggcagctgcgcagcttaaccagcagcgtcagcacgcatgctttcagcaggatgaagattgcagagtttcagaaagagacagacagcgctggcatattcagaaaaataaattcagaattcagaacgcgtttcctcctgtgccgatcgatcgatgacttcgtcgcggtgaagttagccccgattggtcgctctagcttctgggaagcagcccagggcaaaagatccaaggagtatgacgaatcaattaacggctaatctagcacttatttgtcatttttcactctctctctctctctctctctctctccgacgtagcaatgttaggacaggtggccactgcgtttgctccaacctgaatattcggttgtgagattcagatgtcctagttgcttctgttaattagagtatggcgtcaccgccacgagataacattaacaaaactgcgtggccaatgcccaaatagtttttacctgaagggtgaggaaagaaacagtacatgtcattttcgattagtagggcaccacttcgccgtgacatggctggcaagttgcttatgtgctaagggaaacagaagtaccaaatgtttgtacttatgcatgtacagttgaagaccctgattagccaaaaaaaagtgtgtaatttgagatcgattagctgaaggtaattgcttgctaatgtgtaatcatgttgcctcatgtgatcgactcgtgtcttctgctcctggtagcctggacgctgatgctgttggggatgaaaggttgagctctgattgaagcttttggaggctcaattcgtgcgaccttgtcggagcaaatatgttcttctaagagaaagtgaagtgtaactttgtttatgatccactgaactttgtctagttgatgtgtgctttggctgcatgcttgcagatattaaaggtctctctcgctgacgaattagctgactttggagctaatttactcatgaccatgcatatatagcatatcagtgtgtacctttcagtttccttctacttaattggttccaacaaagcagaggtgattagatgacctataaatttatctcttctttttccaagatgacatgaacttcacctttgccccagcacttgtttaccgaactaccgtgacgtcgcgaatgatgtaaattggcatccttgcgtggattcgtatgatcttattaatacttatattacacagtaaaacatctcactgtcaatgaggggcccaaggagaagcagaagaagattctttctaaactactagttgggtgttcattgtaacggaaaaaaccacgtcgagtgaaatgatgttaaataagtgtaaattgactgtataaaaaccttaatatagtactaataataattatataacatatttataattttcacatctttatagtattaacatgttagtaccatataagtagtaatagctaaatgcacgtgctttgttatggataaaagaaaacatataaatgtgttgcctatcttttttttttgttatagggaatattcatcgtactctaattttttaatgtgactatccatttagatttgatcttttttaatattaaaaaaattagggttaacttttaaaatttacaatggaagtacgtagggtgttactcttgctaccatcaggatagatctgtccccttcctcggtttccccccacatatgggatattttaagaaataaacgtctttcttcatagcagggtcgggggaaagaatggaaaagacgatttcactatatttcttaccgggaacagggcctatcacaagaatatttttttattgggacgataactctgaaaagagagatttcctgtcttttctttcaactcaggagaaatacggtcgggcggcgctaattcgaatccctcgggcaaaaaaactacagttaccgccatagacaatgattcatttgtgaatgctaaatagtagttgcccataagaagatccattattgggtgaatggagaatggatccaaggggctcgccaaatcagttactggtcctaaagaatttgtgctttccgcatctgataaataatttggtctctcataggtcacagcatcagccaataaatcctgtgtcaacggcttaggttggtttaccgatgagcccgacaggagagcctttcactccccactgggcttgggctccctgcgtcattcccattggctggggcaggtccatctccctctttctctaaaagctctacagcgcgaataagccctatgtatgggctctgcgctattgtatccagatttttacttgcgaaaaaatcctctatttcctgctctatacttttatcaaactggagtcccatagcaaatacatatttttatgctccctctacttcaatgaaagctcctcctactactcccccttatccttctcactcgtcgtttcattggtcttttatatacccattttcattccatttggacccctagcaaattcgaactttcgttgaaattgtctctattcatatgtatgaaatacatatatgaaatacgtatgtggagttcccgagaatttcatgtgatttagtaaacaaaatatagattccataattgctagatcgatctgtagggattgatgaagagtgagctgataatggaatttttcttcgataaacaggaaacttaagattaagatgctccggaatggaaatgagggaatgtccacaatacccggatttagtcagatccaattcgagggattttgtaggttcattaatcaaggtttggcagaagaacttgagaagtttccaacaattaaagatccagatcacggaatggatacgaaatctagaggcggcaggtaaactagggaaacagaaactattgtttttggtgaattatcagtgtgcagatgaatttcatccactgctattgaagaagcttttagagggatatcttgtcttgtcgggctaagagctcttatctctttcttttcccacggtaactagagattgaataatagaagccagattcaataatagaagccagattcaatatcataagaaaatagagattgtagcgtagagtcaggctatcccatgtttgcaataacagctttgggatctttcctgttaatgatgaatagcttgcctcaacagagaatcagaattctttttattcggtataacaaccttaaaaacgaatcgatctagatgccccgctcttgccatctttgatggaattgaatcatcaactgacttacttgaggaataaaaaaatatgcagctttcgattcttgtctatcggattctattgagaagaagggacaaccatccatcctccccgaaactagtttagtgcctgaacgagattggtggcacttatgacgagaaaacaaactctttcttctgttcaaaagctagtagtgccatagtgccaatctactccgaagaacaagcttctttgcaaaactactttcttctacggagctacctccgtctcactcttgtaccgaatgctacctggcataacatccttacttaaatatcttccgctctccagacttcaacagtgccatcttccagtaggaagagaatcttttcatcctcccacccaaccaagtaggtttcttttctataagaaatgctgtcaatatttcctgctaaatcctgcttatccaataagtttcggatatctatatcctggagtaagaaggattcaccttctttttagtggtgttcctttagaaaatttgttaacgttagggcccccaatgaatgttttcactaacacttgtgataaactcatcatcaaaagtaaatcctcttgttctttgagccaatacacagctatccctaccggattattattttcaatcaactcttccagccctagatatcctctatcacactccatatgaactagcttatacatgaaagcaggaaaagccaattcatttattctctaataataaattaccgataaagggtagttgtttcgtagggataatacccttattaattgatccttacagaatggaagtaagccccttcttcataagatcaagaaagtacgagcgtctttcgaagattggaaaatctaagtcgtatcgaacactatgtcctaatagtaagggatttctttcaacccggtggtaagccggtggtacccggagaaaacgttgcccgaaggaagggactaaacccatctgttcaattagtagccaagtagtaccgaaggagtatctccgagttaaggagtaccgaagggaaggcagaaaaaccaagtgaaagaaagagatcgcaatggtctaagatatagtcagtactgtgatgggccgcaaacgtaagttggttgttagcgccaactgaactgcgtaaccaaagcgattccccttattggaagatagggttaacctatgtcagttcgactccggcgagtcgccccccattattagtttggcgtgctgtcagttccacgggcctaatatatgatatttagcatatacgagtgctgctacaacctcctcttctattcaattgtatctttatacctatccttcgataaggggtaggtaattagaggggagaatgttattaaacataggaaaaagtttacatcgtgatgtgcctcgagatggccgtctcctgtctccctgctcgtggggaatccgctcctggggcgtcgctctgctgcgtctggcccgtcctctaggcacctttggggggcagggagtgtgacaacgtacacgcttccctttactccatagggccttttcctcagttgcagggtttggtggcccgaaattgacttggcttcgccaaaaggcctcatctccaaagcctggctcgcgaggcgtccctctcgctgtagggcggagccccctcgccttgctcttgtgacatgctatgtttcccttcttccattctcaagtcaagggtgagtcccatgcgtcagtttgtggatcgcggtctcacgcactaatctctacaggtgcccatagtaggccggccgccctacctaaaccaatcatcatatcggtccctaggccccattgctggaaaggctcggcttcaaaaccgtacgtggagcttctgcctcatacgactcctcggctggtcaaactataggattaccattcacttagtcaacttattggatagacgggtcatccacttgaccgaggagagtaaggttcgtcaccacagtcccgagaagaatggaacgctgcttcgctctgctggatgcgtcggatcccatataagaagctcgctctttacccgatcattcaaacattttgtgggcggcgcgcctgctctattgttgcgtagcaatagaagcctgcttatgctgcttcggcggatagattcactgccaccactactacaatgttcttctaaaagagtttctaaaagagtatagatatatctttctcagttccgagggggtgagccggtgagtacttcatcttcatgtattagtccatctggtttgatgggctccgagatgggccaaatctcacctcaatctctccaggcccaagctcaagacaacacatgacaagaggctccatgtcattgctggcctgacccgtttccaagtgagattaggcagtgcccgttttctcgtaccgatcgatgttcagacttcagagtcgagataatcacaagagaagaatcagctgatatgtctgattctttttttacgatttttttggattctctaaaaagggaaacaattttggagctgtccgtggtcttaagaaaagaaaggttcttacaaaaatttgggcctgtcgaccagaatgttgtaccactactgcatgccagaagaacctgacgatgtcttgctgagttgctctatcttgaaatcaagggaaagtacgaatgcctttgcctcgtgcttctcttttgcatctatccctttctttctttgtgatttttatttttctttttgaacgaagctatcccttactttgtccaaatgacaaaaaaaaggctttgttggaccatttcaagttctcggtaatcttccgagaaatccaatttcacaagagactacatccagaatcacactagtgtatatatatataactcaaatgcataatttggagcacagtaatttgctagaaaaaactgtcaaatcgctctaaacaatctgaagaaatcaacccgcgcgcggatacagagatcaacggccggcaaaaaggtttctcgtcgacgaaaccgccgcggccgccccgaagctatcgggcggcaccgccgcaatgctgcgcgccgcggccgccaccaccgccgggttcctcccgccgcgtctggccgccgagacggcgcccgcggcaagggttgtggcggcggcgggtgccgaggtgaggtcgtcgccgctcctcagggctctaggggtgccgagaggcggcgccggcattgggagcgccacgccggggaggaggatgtacttcgcctccggctccgactcctccggaagcgccgccgacagcgactcggaggcgtcgtccgccgctggcgctggggaggaggagagcgagggcaacaggtcgtcctccgctgtcgctcccgccattatccgacccgaggactgccacacggtgcgctctctctctctcgctaaaaatttgatcagcattgtgttgttctggtgtctgttcggattatttgctaaggagtttgtggggtttgaacttagcctaagcctggaagtagcttaatgggaattcaaccagattagattatcctttgaaacttctcgcgttctagtgctgaaaaaggtatttggaaaacagtatgtttttagtggggtatggagggaatgaggagctggctgtccagagaaaccttctggatcctttctattctatctatgagcactaatgctctgggaattggaaacatcagaattcagaacatgtatgtattgctattgagtgagttttaccaaatttctattgtgccatttgggtgaaatgtgtagtgagattttcagctttgatgtgatgttgtgactttaagcataacttatatttttgcacatttgcactaatttttttaataagattaatgttcaaacgtcatgtccaaaaaacaacagtgtcatatattttaaaatggagggggtatttgtttaggggttgttgctgtgaacttgctcaattcgcatggcattcagctcacatgggtggaggtctagcaacaagatttgtacaaattgaactttgatgtttatttaactcgttgagaacttgttgctatttttaaatttttatctctgttccacctggtatgggtctattctaataatgcgacgttgagattaggctttgtgcgtctttgacacaactgccggtttatccattatcttaaaacttaactcaatttgcatgccgagaacagagagtggcaacttgcctctctaaaaggctcaggaagttgaagccctacctacaacaaatattattttttgtagcaacatgttactatatctagaaggatcttttttcccctatacaatggataattcgtcgcctgcttattttagatcattcgcattacttcatttcttcaagttgtcacttttggtttcagatgagtatatttagtttagcctgtcatttaacataaaaatgcaatatatatactcacactgatgaacatactattcatgtgagatccatttagtatgatgtgactcggttaatcatctaggtctctctctctctctctctctctctctctctctggtgattcagttaatcatctacttcccaactacaggtcatagctttgcctttgccacatcagccactatttccaggattttttatggcaatgtctgtaaaggtatcttaccgaactatttacaatcactcaatgagcatatcactttcccaattttatttgctttagtgctgcgatttttgttcctttctgctactaataatttatcatattttccccctcaggatccgaagttgttgaaagctttagttgaaaaccacaaaagatctttcccatatgctggggcctttcttgtcaagaatgaggaagatactgacagtaacactgtcacacgttcagatccaaagaaaagcattcatggtctgaaagggaaagaattattgaagcatcttcatgaaattggcactcttgctaaggtatttagctatttacctgggcttgggggtagcatagaaactttcattgcatcaatctcaaactgttctgtctgtcattccatgtagataacaagcattcaaggagatcaggtgttgctacttggtcactgccgtttacggataactgaaatggttagataccttggactgcatgctattcagtttctcttgaatcttttgaatttttttttgagtttttttgtcaaagaatgcaggttgaggaggacccacttacagttaaagttgaccatctaaaggtacatatgccatcactattattttcttctctgtctgtcttccactgtacatatttcaatcctaccaaacccctgccaaactccttccctctcaaaacaggattttatttcattgtgtgcctgtgtttaaattacaataatataccataaaaggttgaacatatgtcacatttgctttcttgaagtgtaagaggaaatgatcttttagttcaataattcttatttctgttgaagttggaaatatcagctgcttccagaaacaatacaagtattacagtctagtaaaaagtggttgcatttattttctaacttttggcttgatttgattttaagccactgtgtaataacttttcatacctgaactgcagcacacatttcagattatatgactttaactaaattgaatacattttgcaaatcttgtccttgatttataccacctttcagtaccagctgaaaatatttagtgtacaattgctttgcactgttgagaagcctttgattatgatctcttcatactagcggagcttctgcaggaaaagccttacgataaagacaatgattccataaaggcaatatatttcgaacttctatcgactttaagggatgttctaaaaacaagttccctttggaaggatcatgctcaaatctacacccaggttgccttactatttttaactcctttagtgtacatctgaatctttcttatctatttgcatgtaaactctgtttgaaatctacttaaatatttctactgtaatgattaattttacaccatctattcactgaacttaaaactttgtgtttcagcgtggtatatcattgtgttatcatttactttgggtacatgtcacttgcaattcttaacgtcattattccatcattaagttctgaatgtgcaaacaatatttgatcagcacctactatagcttttttatccatcaatccgatggcaaaggggcattttttccacactcattcccttactaacctacttatcatggccggtctatgaattataccaacatgactctataccatgatc

SEQ ID NO: 26938 - DNA, 716 bp, Oryza sativa
tgatgaagatcactatggtctaactgatgtaaaagaaagaatattggagtttatagcagttggaaaattaagaggaagctcacaaggttccataattctatcctgtttttattttctgtgtattttctatgtattatttatgtgtgtatgggaggcctttagcaagccattaacatcgatgcaattgggtcttcaaatgcatagtatgctatttttaagcaatattgccgtggcatagatatgaacacattaataattcgaattttgcacctaaatgtcatgtgcagtcctgttagagtaaggagaggtcggggcatatgtattgttcacaatttgtactgaattttgtagccagcatggctcttgcagtattcctttacctgcttttgcatgttacctgtgattaatccatttccctatcattatcaggtaaaattatatgtctctgtggaccacctggcgttggtaaaactagtattggacgatcagttgcacgtgcattaaaccggaagttctacagattttctgttgggggtttgtctgatatagcagaaatcaaggtgcaacgctactatattcactatatgctgttttttggacaacaacgattgtatctacacaggaattcaacctgattagcattttgaaacaaccctagggtcatcgacggacctatgttggggcaatgccagggaagatggttcagtgtctgaaat

SEQ ID NO: 26939 - DNA, 805 bp, Oryza sativa
agcaagcttctgaacacaaatgtgtgcccatacttctggagattcacgctcctccctgcattgacgattacatcacttggttaagcataagggaacagataagatgcttcaaatatttatgtagcacaaagtatgactagaagaagtgtgttaaaaatatagatcggtaactatcgcaagaaatgcacttatgaaatcaagtccacattcatttattgattggtgaatcaatcagcaagataactctgctattcttccgaggggaattttttagatggggaatgcattcaatatccttctaccttaactgatagataacttctggcatgctcttcttataaatcttcatacgcaacactacttactttagacaaacaacattaaataatagttgaaatacatatacagcttaaagtgtgtcagttttccaattatagaatgtatatatccttcaaaataggaaggataaagacatgatttattgcattgacaacaaacaagactgaaataaaatgaaggactggggtatcacaataattacacttttctgcacagagattaggaaacgagagtgcagaaacacttattatctacaaagtatacaatttcagcacaaagtttaggaaattgtgtagcaagcacataataaagatacttcacctggtcagggctgaagaatccctagctgatcgcagtctaatagctgtactgttgcaatttacatcattaccaccacctaagccagctctcccctcacgtcttactatttcatcaacccaattatgctgcggtgcatgtctttctt

SEQ ID NO: 26940 - DNA, 584 bp, Oryza sativa
tgccactcttacaaactagttcatgaataacatggggaaaaaatcaaagatactatatgtatgaagggctccatgaacaaaggtagaaaagctcacccctctcctaacaacttcctcagctgcagcctcagcactagttactagctgctccacgtacctacaaggtagtttgcaatactaaaataataaataccatggtacaactgtagcatagattggaagtttctaaccacaaaagaatggagttaagtataaaaaacaaacctgtcattggcctcttcatcgccttctccaataatcgggatggttggacctgataaaatagcaaacctggcaacggaagtgatgacttgttaagtgacaacacgcaacagaaacaaaaaataataattttgtgataaatgcatcaacaatttgaaggtgagaagaagatgttgtccttgagaaacagcagtaggaaatgtggtatgcatattcttgaatagaacgaaaaataataccctctagccaaccaaagcagtggggatgtagcaccaatccctggaaactcattaggtgagccacgcacttgtccagcagcattc

SEQ ID NO: 26941 - DNA, 5867 bp, Oryza sativa
taccaagtggtctttaccaatgtgggggtatctacaaaatgagcagcataaacaaaagtatgtgaaatgctcagtgtcatgtgatcattgagaaaataaagcagataataactggtctgccacggcaagggacagttgtatgtgtttgttcatctgttatgctcaaattatatcctaacacattaacaaactagcagcagtttaagaaacataaagcttcatcagttcaatatttgtcccaaaaatacgaaaacgttgtatgttcaccttctatgttatacaatgcaacctttgcagaatacaggtttgagaacataaagtttaatcaactctaggtaagttacacaaacactgaaaaacatactagtattctttctgttcactcccattgtgaaatgttatatatgtaataccattacaaaaaatctgacgtttcagaaatagtatgattcatcagctctagaatctagactagcacaccagggaagagtgatgaagtatgaactccacaggagaagacaaatggatacaataccagatatttttcaattgtttcccaattttactctaagaaactgagaagcatctccagttcactacaggcataatattatttttatgtgctccgagcagaatgaacctctagtttcttgcgtcataaaaatccttaattaacaataattaatataatagcacaaaactggtctggaaattttcactttgaattccagacctcaacatcctgatgatctttcagaaccaacattggaatgaacggataaatagttacctctcaactaactttaggtatcccaaagggagtgatatgccatcatcattttcttcaccgctatgaaaaccacctcgtgaataccaagcatgatatcttctaggtagcagctgatgttcaaggagctcattgcagagttctccaacagtccgcttaaatggaccatgtgataaaaaatgcatgatgagaaagtaaacttccctcatatcaacatcaacatcagcctcaggtggaacatctgttgctaccactggattgacagaattaaccttctcaagttcctgacttggaaaatccaggggcaccatactaatggaggccgcattaccagaaggttggtgttttctaagagccatgtatacagcaccaactgaagtgggaaataataacaaataagcatatacaagctttaattactgaacaattatgaaaatccacatgtcagaaaggagcttaacaaataaagaggtaatgaaaatgtaagaatatattgaaggacatgaaacatggagaaataagacttctaaatattacaccaataacatgttttagaccgatacagctgaattaacttttctagtgaagtaatatgattgaacttagttactagcaataggttcagatgcagccactcaacagatccaataagggttttagctttgagggatcatggtataacccaattataatgtttagttggggaccctgacgctcttttcctttttcgattagccttgcgttggtgatggatcaaaatctatctattccacgaagtgtggagttagatctgatggcacaatcatcctctagttcctcatcaagccatacacactattagttctctcatcactaaaaccctaagttccagagcatcagaaaaccaagcagatacaacattcaaaccaggcaatcatgtatatcatccaccaaagccccaacgactacgaacccaccaaggtcatatccaaaactatgacagcgaacaccccccccccctatacacacacacacacacacaaagtcctcaaccctagccgtagtacccgccaaattcgtcgcaattctctgcaaatcggggttctagaacgtttccgacgaccgccacaaccggcatcaccacatcctccgcacacaaacgagcaacagagagcccttgtgggggaacaaaatcaaaataagccgacattacaacgaacctaatcaaatccgcgactaactgggcggattagggcacctcgagaaggaaggacacgatctcccgcagcgaaaaccacaccagcaacagcaatccaggcaagctacgttagggcatccgtaccagcgccagaggaggaatcagcccggatgcatcgcccgtccgtcctctcccccccacacgccggcccagcggagacgaggagggcggggtcccccgccgcctccgaggtcgccgcggcgtcggtgcccgcgcgcgcgcttcctcctcgggcggtggcgaagggaggtgggctcggcggcgacgggctcgcgcggggggttgggccaaggggaggagaggagagagagggacgagggagatgggagagaaggggggagggggtgcggtgcggaaggggatcccctctctgcgctcggactacagtgttttgtgttacgccggatgcggccctctccaccgtccgatcaagccccaccgcaacatcgaaggctaatagatgcggtgcttttattactgaaatttttacatttggaccctttcgagaaaatttcaggttttctaatggcttgttttagtacggcacaggactatgtcaaatatggtccaagctatatattgggacggagtaaatatgaagtaaactgatataaaatcaataataagtacataccatgtatgtcataatttacatgcttacataataatgggccgaatgagaaaaaataataatgggccgaatgagaaaaaagaatatgatggtatgtgggactaacatggaccgaattgatttcggtatttttacataaatggaataaagtttaaggtataaatatggtcttttaatccttacgaggtgttgcgtagaaataacgatagctattaaatgtaattgattatagggacatagtatttatttgtgtagaatagtggggccacttagaaaatagtggaatggcatgtgatccttaggagtatgcatattagtagttcatgtggtatagtgtttttaagactttataaatatattgaataatattttacaaaatataattttgacgagaataattgttgcatttaaaaaaatgcgagcttttttaaacatgttatgggcatgtttgaaagtgttgatggataatagatgaaactgagttcatggtgattattcgatggtcgaaatgaatgtattaaatattagaaagatgataggttgatttaaaaggatttttctaataaatgttgagagaaagtgtttgcaaaaaccacaccgtttaagattttgggaagtgtgcttgcggtaatatggtgaccataataataaaaaatagtcatatgccttgttggttagttgtaaaaaaaaaagaatcccatggtgctactattccaggttcctttggaagatgggattttgtaggattttcaaaggactaaaatcccatatgaactattcctgcatgctcctttggattgtaggattggactagcaaattttcctatggcaccattcctttcctccaccttttgaagtatttcaaacatgagctcaaaccacatgttttgatttcctttgggaagtcaaggcaccttttctcttcatctattctctcaactctaatctgataatatttctcctctaaaaaatcatgcaagtttcctatggtgtatccaaacaacatgtttgattaattcatttatttttcaattcctataagattgctcgtgtcatgacattcgattcctgcattttttcccattcctaagtatttattagtgatatactgtagatttatattgttgtatgattaagtaaccggtacaaatacatgccttaaaaagattcaagacaaatgttaagcactaaatttgggtaaatccaaatgatggattgctatacatgcaaaatggactaaaggcacattactaatgtcattttagatattgccatgatatgtaataaataataataaaataagaaagtttgactggagacttgttgaaaacaagaagtacttgtgacaaaaggaagtatttattggtataactaattgataccctacgatgtgttgtgcgatacgtggatgaatgcatgttatacataatataaatagtaaatgtatatgtttaaataatgcaaaaatgatgtggagataatgatttgacatcgtttgcatattgagttctaaaaatacaacaaaaatgtaaattatgtgtcatgtttgcatgatatttaaaatactcaagacaataattgctaatgggtgatgatgtggcacacttgtatgtgatttaaaatactcaagataataattactagtgaatgatgatataacacacttacatattgagctttagaagttagtggacaacaattttattgtaagatagaataactgataaatcataaaacccagtaaacatggaggggtgaattgagtgattaacaagtctctgaaataagctagaacaatatagcaaagaacaaaccaaggctacctttcgctgaagaaagtggataccagctagtaggtgaccaaatacaatatgattttcgtactacctccatggctccgtcccatataaattgtatttataggttgtttaacatatattaaggtttaagaaaaaaaatactatgatgtcccttattaaatggtgtataggtgagagtggaagagtagttgaggataaaatacggagaaatttaaataagaagtgattaatgggaccattagtactctattgtgataattattttaggacaaattcaaatcctaaaaatacaattattatgtgagagaggtagtagttttttttttaactacgcaagagagttgtgtgttatttgatcaagtggtggaaaataaagtacaaaaggtcaagatggaagtaagtttgcaagtccttttgcctcagccaagcacccaaggaagccttcacgagagatggatcgcaggactagaactagatagatgctaggtgttgtcccatttaaaacgcaaccaccccttcacccttgcacacgtagttcccatgtaacgagagtgacaagagtatgaaaaccctttctgagtttgtcaagtttgtctgggacttgcttagcagcgccacaccatcaggtagagaaatagcagtatccaggcgagatgtcaacaacacaaaaaccactcaactgataaatgctcccttcgtttcatattataaaactttctagcattactcacattcacatagatgttaatgaatttagacgcatatatatgtttagattcattaacatatatatgaatgtgggcaatgctagaaaatcttataatataaaacggaggaagtatcaattataggcattgacccccccaaaaaagtattgtgtttttcttaaccacattatccttaaatttagctagctcagactttgcataatccatagcaggtccttacagaaatgccagatgctacagcacctttcgttctcaacggcacattgtattcaggagtcatatttatgcaacttaggccaagttaatgtcacagaatgcctgaacttgtgagctccagaatactgaaaagaatgctttatacatgcatcagaccctacacgggtgttctgttcacaattcagagaatgtctaaaataatgcattctcactgtttctgaatttacacatggtagttgactaacagaaaaggagaaaaggaacaatctatagattctgtacaacttgccaagctatatttgggaagtgcgctcttgtgagatattctttctgtagattctgtataatttgccaaaggaattgcaagcgacaacgaatgaactccatattctggtcttcaccctggtcttgatgcaaactgctttgtagagcatgcgttgtcgataca

SEQ ID NO: 26942 - DNA, 1999 bp, Oryza sativa
ttatttggttctttctcatgtaatatagatctgcaaattgtatgtgcaatttgagcactctctttcatgacatctccaagctggcctgtcaccacaagtgcaccttttttttgccgtcctcaacttttgctgtctcaatatacaaggtagaaccacccatagcattccaagctaaacccatgactaccccaacaggagtttgatcgtatatacgctctggttggaatacagccttcccaacaaagttatccagatttgatgcatcaacaactactttctccacagtcttgtctacaagtgcttcatctacaagtgcttccattacttcctctgtgtgttcattggccttcagaaatagcaaacaacagtttattagaactaagccctaagaaacaaagaaacataagtctatgaatttatgctaactaagatatattcatttcaaacttgaaatatccttggtaacaaagtttgtccagggtttagtttacttgacatctttcaaaaactaacaaaaagtcagcaccataaaaaccagcagaaattgtgctatcagcctatgaatcttccttttcttacaggaattatatcataattttaacacaaaaacttgaccatgagaaatgcctaggggtcttccggctagctccataaggtggtgggctagccgacctgggttcgaagcctcaccccttctaattatttgatattaggtcattccctaatattcgtgttttttttaacacaaaaacttgaccacgcaccaatagtaatagtgtcatgaaagatcaattccttctttttctgacttaaagcatcactttcatttaacctgtcacttgcctgtctgatagcaagtttgacttcagtcagtattcagtgcacaacgttgtaacactcaaaaaattcatgggcggccagaggtcagcctggccactgcacatttgtaatagcttctcacgcatttaatatagagacttggggagatttgacatacaagatagttagattacctccattttgcctgatgtattcgttggtgtagctttgtcatctgcagaagtttctttagatactccttttggatgctcatagtggtctacttctgacttggttgttaaggatactacattaatcttctcacaagaaatatcagttggaataacatgcactgaaacatcttctgcaagactgtccctctggctcttgttttccacttctgttgcaatgctaacaccagtaggttgttcacttggttccaccaatgtgatctcccgagctggctcatttgataccccttgacgaacaagttgcagagctatctgcaccagaggcaaaggttgaacagcaaaagctgatcacaagtctatcatggatgaatggatccatatgaacaattctgatcattggtagaataaatgctgcgagataatggaatgcattatttgataaatatgagtcttccaaaagctattttcttgccattttgggggtcttccagaatattaaaatataataaattgcttgccacactaccacattagaaacaacgcctcagtaaaaaacagcagcagtgattgtggagggttagcatggcaggcaagcggtgcttgacaggattggaacagagtgcagaggtaatactggtgtgcacagggaaggcaatagcaagtgcagggcatatggagtgtggaccgaagggtggggagaacaatgggatgcaagaaaggaccagtttgtgcccttatgctgtagaaggacaggacacatcactcaacactcaccgatatgctgttgttagtaaatataatagaccccagtgggagatgataccttaagaaataagaatagaatctacctgcttatcagtcatagacttgtatatactatcaaggtatcaactactggtgagttgcaggtctgtcaagagacttgagacagacaaatagcccccgttcttctccacactaaacattagctacaaatgtcaatattgttt

SEQ ID NO: 26943 - DNA, 6162 bp, Oryza sativa
agagatgacgacccccagaaggctgctgaactagccgggccaacatacttcgcaatcgatgattgcccggaaaagtacgaacatgggaaagcattcttgccggaatgggcactgaaagaaggaccatgggagatgacaaggttacataccttctacatggaggccagcaagaaaggcttgggcaatataacagctcgatcaccggcagattgtttcgacgaagaaggttacgtatggctagatttctcagatctccacgccatatatcgtcgggataagatggacgtcaactacgtcggtgtttggtgcatgtgagtatgagttttaattaattagatgaaaaatatgtataatacaaatccatgtgattgttactaacaaacttcttctgtagaatgcaatacatggatgctaagaagaaaaaagaacacatcggcttcttggatccaactcggatctgccaaacacagcatacgatgaggctagcaccagggtctgaccagctgaagagcaagaatccaaaagagatagcagaatacaagaagggcttgcacaaggagaaattgattactgtcgcacagtacattggacgagccttcttgcactttcaaaataagagagtcgtcatggccgcttataattttaagtaagtctagtacatttatcttgtatacatatgtcttattttagctggtactaactaactatactgttgttaatatgtagcgatcattatatctgtttactcatccaccctaaagacggaaccgtggtagtcttggaccctctcgattacagtcacaagcaatataaagaatttctaataattttacagtagtaagtgattatgacttttgcatttgtatatgaatgtattataaataaatatcctccttactgtgaaacggtacgacatccatacagtgcataccaatactataagttcaagggtggagaacagacccgaataagggagaagctgctagtacgtacctattggccggtaatactccactcacttaatgtattccaattgattcactaattgcaaattttaactacttttttctatgatatgtcctgaagtgtcacaagcaaccgcgaggaacggtcctttgcggatattatgcgtgtgaattccttagggttaatggacggtacaggactaacgcggaggatgtaagtctctatactatgtactagacagcttcacatatttatgatactaatatattgattaacttcaatgcatgcagttgccaagattagaatgtcgaacaagctttgacgatacaggtatcccaaatgtccagcgtgatctgtgtcacttcatccaccatgagtgctgtcatgtgaaagaagatttcttcgacccagagggtgtcccagcgacaagtgacgaattcaaggatcttcgggagtggaacactgctatgccataatgtaactagataacgttatttgaagtgacaatgtaaaaaaatattgtaatatatatattttggcaatacttttgatttatgcaatatatatatatatttctcagtaccaaatgcttgataatcttccaatatatgtacataataatctacctgcaaaaatttctattaaataatttaaaagtaatttacgggcaaattattattaaatttcaatattttctacctatctttgcaggcggaagtttttttttcaggcggccgattcctattttcgtaggcggaccggactagccaatgtccgcctgtgaaaattatcttcacaggcggacggccgcccagcgatcttcacagtcgttggcttacaggcagacggtcgccccgcctgcgaagacccttttcgaccgcttgcgataatgcttttcctagtagtgtactctatgctcatcatttaatcctgatcccaacattttatttttcatatttatccgtaccaaactcttgacgtcacttgcaacatgtaccgtacgtgcatgcaatgtacgtacacaccaaacgttttattcgttattactttgtttattattcagtcctgatcgatgagccgcgcagcatgtgtgcatgtaactcaacagtaaaggttgccacccgggtcaacgccgaattggcggcagtagtctttgtagtagtttacccttgcgttgacggcgccggggttcttgccgttgcactcgagcgcaccgttgatggcccggatggtggcgccgaacccctgcaacatcacctggtgcacgttgttcatccagaaccagagcgccgtcttgaaggagatcgtcgggtcctgcgccaccctgtccgggtccctcagcccgtcgaacccgatgttctgccccgcaggcccgtagttgtagttccacgagatctgcagcggcccgcgcccgtagtacttcttccccggctggcacggccactgcttgttgttcttgtcgcagtagtccatgctcgccccgtttatctcgttgatgtagcacatatctgcgagtgcattatcatttatcatcctcattagttacatgcatatatgtacaaataccaggagtatgtaattaaatattttccttacgtccggtctcatgagtgacgtgggcaaagaaggcagcgatctcacgcttggagtcatcgttggtgcggtccctggcgaagcccgagtaggagtgggcagcgttaagaaacgactgtcgtgtgtaaaagttcttgccggcgcaaccgttcggggcctggttcttgatcccattgaagaacgcctcggtgaccacgctctctacagacacgccgctgcctccgcctccgcctccaccacctccgcctcctcctcctccaccgccgccgccgccgtagcacgggccagagcggcacccatctccgcagtagtccttgcccgtgccgcagtacccccatttgctgcagcacatgttcgactggcagccgcagttctgcgcgctcgcctggccggtggcggagaggaggagcgctagcccaagagccaggaacgccagcattgtcggcgtcggtgagttcgccattataggatatggtgtgaaagaggtgatggttgattagatatcatgatcaccagcccggcttttataaaacgagcgccagcgtcttctctacatacgagacatccgtcgtgtacttgtggtgtacttgtgcgacttgccaaactaatcgagaattttagcatatcccaatacttgtggagtcctaggacactagcgtgcgcgctgcggttgctgcggcagaagggaaccgcgcgtgcgccgccataatggagagaggttgaaagtctgcgacccggtaccttcctatccggtggaattccacgcgaagccgcggtttaatgccactatccgctcgctgtatattggccatatgaatcacagtgtgtcagcaagctagcatgtgaagatttatggtggccttcgtattcaacaatcgactagaacgatcagtccagaaacaagacttccacgttcaattgacaaaaaaaaaccacaagaagacgtactacgtacgtgatcgttgagaggttggtttgcggcatacaacgttccaaacttggacgaactcatgaacgtcggaaaaccagaggaatgtctggggatctctgaaaagtttgaactctgaagttcattatggatcagctccgtgaatttgggccttgagctgtcacggcatgatagggcatatcgcctctcttacccgagtctgattcacacccctgaatcacaaaactagatatagaagctccctaaactattaaaactggcttatttttgctctccgcgggatggtttgaataggttttgtcctatatggtccttacatgatattatagtcaacgttttttttttctgacgtggcatgttaacttggttaacctgtattgacgtagtgctaaaaagaattaagagaagtttgtgggggcccatatgctagtaacatggaaaaaaaaggagatgacggtagcccacatgtcagagagtaggggtcggtgagctcgagatcgagagggctgaaacttgctatcgtccgaagataagagaaagtggtcgcaatgggaggccaccacgccagatagttgctgcccatccctctgccgccgaagtgttcgtgtttatcagccaaatctgtccaaactcatgcccgtcgtccgagctctgtagttccagaggagtgtggaaaatattgaatataggagcaaccgtaataatatgctctattccattgtattatactagaaaaaatattcgtgcgttgcaacggattaaaaacaatttcaattatatatagactgtggtggataaatagttgaatatggcatttgtttctgtttttctttatccactctaaaatgtatacgtattggttatgagccttattcctatcctctccacacggtcaacctttttacctcatctatctttagtcctctctacagatctacacacggagttgtacggcggcgagcggcagcgtgaatgcaaagcaactaaggttatgttcgggaggaggggccctcctatccagtacacaaaacgaagcatacattagcgcatgattaattaagtattagttaaaaaacttttaacataaattaatattattttgttaaaacaatttcctttcatattttttttaaaaaaataccgtttagctgtttgagcgtgcgcccgaaaaataagagagataaagttatgaacaatgaatcccgaacatcgaaccttgggttcgtaactaattcctcccgcacgaaaaacaatgtggctcattagcgcatgagtaattaagtattatcctaaaaacctgaaaaaatgtattatttcgatttttttaaaaaatatatagattctttttaaaaagcatcatttaataaaatgcattattacgatttttttcttaaaaaattctatagactttctaaaaaaatacagtgtttaattgatcggggaacgtgcgcggaaaaactgaacaacataagttttgagaaaggagagtgttgaacgcaggctacggaggccaggagtgtttgagaggggagagtgtttgagaggggaggaaaagagaagattgacaagatacgtaaaatgatgtgagtcattagcacatgattagttgagtattaactattttaaagttaaaaatggattaatataattttttaaagtaacttttctatagaaaaattttgcaaacaacacaccgtttaatagtttgggaagcgtgcgtgcgaaaaacgaggtgttttctccctcaattgtgtagatcgaacgcacccgtccaacaaaaaactggacgtttcaccgccccagcactgtaaaaaaaagtgtcattttagcaatttacaaagaagtggtggggccagtttattttggtggaaccagaacataccgagtttttttcccaaccgtgatggcgtctcgtggatggatgagccacacgcgtccggtctctctctcttcttatcgcttccttctcttctctccctctccatctccactgctctgaaatttttacaatttggtcctttttgaaaacttattttacaaatagacccctggaaaaacttaaaccggaaatggtcttttttggggcgccagagtgtctggcgccgtaccccaacatggcgacgccagccacactggcgccgtgcctgtgccaccgtggcactagggctgtcgtggaggtgctgactgggcagaaagggggcgccagccacactggcgccgcccctcataccacggcgccagcatagctggcgcgcccctcctctgtgggccgacccttaaaccccgtgggccccaccacctttctcctccccactcccattttcgccattcccagcccgagcagcgagctgctgttcttctccctctctctccccctcacctctccacctcaaatccactcaatttgaagccgtttttcgcgggattttttgtggaaatcgaagagaaaggtagactctttcattcccccctcttttttttcgtttttattggttgaatttgtagatcggtgggtaaccctagaacccactttttacccaaatttgtaatttttagcatttgttcttaggattggcttgttgtagtgctacatgtttgcaatgtactcattggtgtcatgatttttttaaccatatatgtggtaatgttaattt

SEQ ID NO: 26944 - DNA, 56201 bp, Oryza sativa
gcattcatatcatcatatgtgaccacagagtttcaaaaaatattcaatactacaaatcaaaaatgaaatcatatctgcaatccttatgttcccaaccccaggttatcattgaactcaaccctaaatgcagtttcaatttcattagatttatgagattcaaatatgttatgccatactcattgaatcagtatatataacatgaactactacttaatcaagatcaatttctgttgcattcatatgtgaccacagagtttcagaaaatattcagtactacaaatcggggatgaggggagggctgcaatccttctgttccccaaccctatgtctcacatatggagtatgtaccatgttaattgctgttaaaatcagatccatgaaggcaccaaaaacggtaggaaaaacatatttttcgttttcttcctcagcaatgcataccaatcgcatgaacttaaaataaaaccaatcatcataaaagcaggggccttggtagatttgtaagagcacgcctcatggaccaacaacaataatttccaagataagataaaacaaggagacaactcagatggaactttcagctcacctgttgatcattgcaggcacattctcagaagaaatgatcacaactggtatgtccttcaatgaagatgacacttgtacccccaaaatgaggagcaaaaggagcaaattttactccacttacagcaacaaaggacccaagatttatgaatgctcacaggataagaataaattcaatgcaaacaaaacttaccttcaccctcttcagtagatcatactgtcatgccaggcatgtagtagtcagtgattatcacgttgacatcaatctccagtacaacagttcaaaaaaccacaggattgatttcctggatagcaagcacagcataagagaattctaaaggaacacgaaacaaataaagaacaagatttcattcactgacctgatggtcaggtgaggaggaagaaggggaagaagaggagacgttgctctcatccctcgatccatgcagctccaaggccttgctcccagaatcaaaacatgcaagagcaacaaaggttcacaacaagcacaatttggtgctgaaaagtacagaatggtctacatatttgcactgtcacatggaatgcaaaaggtgagcaaatgcctaaaagatcactgtaatgcattaggagtgattagatgaattggtgtttacagtgagaattcagcaataatacacctaatactaccttaaactagacttaagtactaggttactacacctaatgatttaaaagcatgtactgaatttagtcatcaaacttttcaccaaacaagtgggttgatggtctgattaatgataggaaatgttaaataatatagctagggacctggccctgtttttcctaggccgacataatttgtgtgcacacttttaaacaccttgatcggatatgatccatttgaatggttgtactctagctttacaattaaatctgaccaaccattagagaaccctcttaagcatagcatataatcctataaataggatatttatatatgctgatcactatgtctatgcatgtccaacagctcccaacaagagactacagttcatttttacttttacaggtcgattgatgacgatcacgtcgatttaaaagaaaatccaaaagcacatatggttctccatgatgactactggtgaagcatgctatatatttggcttagattttgtcatttataggtgcgtagatgaagcttatgcacaattagcatcatcatgatctacataccatcacaatatgtaattagtactacttgccacaaagctctaaaagccaaaaagttactaaaagtacatatatagcccagtctggccaacaatatcacacagagaacaattgacagttctcatactgacatgcatccatattcttccaagaaaatgaggaagaaaaaaaataactcctgtgaataatatagcgtactccagtaagcgtatatcaacttccggacatgtttaataattgaaactatacatacacacatactactagctaaagcagtaatcaagcatattgtgtaccagcagttgcgggaggggaagaggtcgccggatctaaccctctcgtcgtcgctggcgacggatccgcgcgagaggcgggcggagagaagacgggacacgtgcgggaggggaagaggtcgccggatctgcccctaccgtcgccgccgacggtggatccacgtgagagggggccgaagagtggacggtatccgtgcgggaggggaagagtcgccggatccgcccctcccgttgccgtcgacggcggatcacgcgagcagaaacgatggcttgaaggctcggcccatcccgtcatcgccggcagcggatccgcgcgagcaggggcagagagacgacgagaggtggagagagaacggcatccggttgaggagggagagagaaagagagactgggagagaggagagagtgggggagagtaaacgagagagagagcctggaagacataggagatactactaggagataacgaggggagagaaaacgaaagagagataaggctggtctctgaacaggcaaaccgatattttctctcctgggtaatctaggtattcggattattttttaaaaaaaatacgactacaacccagttattaattgctgtcaagtttttttacattgtgctaatcctccgaactaatttacacgcacatacgagtgatattattttttaattcttgacatcataaataaaaatattgtcttacgacattaagaaatagatttttacttatgttgtaccactaagaggaagttgttttttctccatctttcgttcttcatacgcgttcaaggaaaatggaatcctcttatatgggaacatgtttgacccactcatccagtcgtgttcaccatcagagcttgtcgttgtcgttttttctctaccgggaacacattgttgtaggctccgttcttgttgtatggttttttcatcgctaacctccaccatatatggatcaatcacatctctaaccttataaaataactataatcattatcataacattagtttttttttctttgcaacacacaggctcttttttagcaataaaaactccccaaaatcaaccggaacttcactgcattttcacatacatacatagtagaacacatgtactccctccgtcctaaaaaatagttaactcattatgttaggcttatttacttaaaagtatatcaatattttcattcgtcaaacaaaattctatatgtggtttcaccatttgttcatcctatgctgcaaccatcgggcccacacgtcaaaagcatcatccacaccccgtaaatataaagcaaatgaattgtcaagaataacacgacttttggtcaccgtacacatcgccgatgcttatgatcatgctttgataaatcattaagaccaaatttcagtcaccccaccatcagccggtgcaacgcacgggcattgtgctagtttactaaaataagaaagtaatgttgtcggtgatatgggcccgggggtatcatgtttagagggaggaggctgcccccaatgccacgtggccctcccccgaggggagtgaggcctgaggtggggtgagggccactctttcccaaagactagacagaggaggctgcccccaatgccacgtggccctccccggaggggggtcgggcccgaggtggggcggcggccactccctcccaaagactagtcggaggagactgcccccaatgccacgtggccctcccctgaggggagtgaggcccgaggtggggtgtcggccactccttcctaaagactagtcggaggaggctgccccccaatgccatgtggccctcccccgaggggggtcgggcccgaggtggggcggcggccactccctcccagagattggacggaggaggatgccccccaatgccacgtggccctcccccgaggggggaacgggcccgaagtcaggcggcgaccgccccctcctgtgactaggggtcgggctcccccgatcccctctctaggtcaccacgtacggtgggttaagtgtccgcctacaggtgcccacctacccgcatttatggcgacccaagcggtcgcgccacgcccgtgcggtgtactcaaccggtctgtgaccggttgaatgaccgatgggactgggtagtgcgcctgtgcgctgctcgtgtgtcaggcggcgtgcagcctgacatgtcccatcaaataatgatggtgagaggttctcatcctcttatcccagccggagtcggtcctcccactctggtcaaagctaggctcccgtttcccagtgtaataggagcccagaagttttcacccattaaatggtgaatgacatgggcgccccccgtgtcaggtggcatggtgtggtaggccccacgaccgaggcgacgtgtatgcggcttccaagttaaggaacaagacatgcatctaatgcaaatattgtaatacttctcgacgaagttagggtgttgggcctatgtggtaaccccttgagatataaaaggaggtccaagcctagtaagaggggggaacttccgagcgaacgggcgcttgagtcttgcaaccccaaacacttgtgttctccactcaatcaatcaaacacaggagtagggtattacgcttctcagcgttccgaacctgtataaatcccttttgtcccatcgtctttgggggattgaaccccctcaagatcacacagctttgctcaccaagccctcgaatctcacccgctgcccccggccgaactctcaaaggggggcctcatggttccctggtggaggagttcattctccgacaaatgcgatgccaaaaaaggaaacaggtagaaggagggaggggaaggtgggagcgaatatgattgctaccccctccctagggcgagcgatcgccaaacagcatttccagttggcagcttggcaccaaaatttgaccagcggcatgtgcagactgaagatacactttgggcgataaaagacgttgaatgcctgatcttttttaattcctccacaaagcactaactagcagcatagaagctgacagccggcaaaccgaaactgacggactacaagtcgtagatgctgccactctagcaaatcagatccacgtgaacactaacctgatcatcgatcaagtaccccccatcaacaataaaaaaccccatctcttaataatcgcaaaaggggaaaaaaaaagcattcatgcacaaacaacatagagccgacacggcaaattaaggacgcacccacttcctgtcttcctctaaacgagaaaaaactaaacaccgacgggggcttaatcccccccgcgccgccacgtaacgccggccgagggaacaggccgaacagaggaatccttccgttgcaacggccatgcgatacggggcatgctgcacgtgatcgcatacatgagccggttgcgttctgccccggttgtttgctactcgcgtccacgcgatcgatcaaacgatcgtcagatcgaatcagggacagtacagtacagggagtcgctagcgtgcccgcacgccgacccggcgcgtcgcgcggcgcccaatctgcccgcggcgaccgaggcatgcatgcatagcccgataggcgatagcccatgggcttcggtttcgctaacgcagtacagcgtcgtcacctataaatgcaaggcaacagcagtacagcacccgtcccggttaagctccgtcccaggtaagagctagcagctcgagagagcgcaaaaaaagaaaaaagaaaaccccaaaactccagagattaatcggcagagctagctgtgaccgaggagaagacagagcagccgaatcgaagatggcgttctataatggcgcgagtgttgtcgcgctgctgttgctggtctccacggctgctcgagctgccggcgatggtgagagcgtcagataatgctgcattatgcacttttacagttttactcctgaaccatattagcttgcttcagtgcttcctatggaatttccgcaagattcctaggagtaatttgccatccactatctaggtggcaattctttgccatgaactagatagtactctgaagagtaatccctgttgttattgtcatgatgttcttacttctcggtcattcagttaagcagctagcctgttagtaaaactatcgaactgtacctgcaaaacttccttgcagataaaaccaaaatgtatgatattttaactgtcttttcgattgactaaggcagcctgaagaagaagaagagttagtaatttctagttgaattggtcccctagctatagcaatggatgataaggtcacttccgtttcattagttctagttcttaatttcaatcaggttttctcccttatctatctaaaaaaatagaacagatgagattttcctttcatttaggaaggcaatgtagggtagttcttatctgaaacattctcattttgctatgataactagaactaagtaatcatttagggaggatgaaccccagcttagaaactagacaatgtatagaaataaggacagcagcttcttattcattgaaatgatatccgtgtgcactcttcttaattagagtatcactaatcccaaaaatgccagcgctgacttgttagttaaggtgacacagaaatcaaatcaaatctctgcattgtcacgtgcgtaggtcttctgttcagacacaaagaactgcaaaatattagaatgagttagagtaatttactgatgtaaagaatctcatcacgtgagacctagatgctacttaatattccataatcctaacatgaaacaagaacgactttcaagtttcaactgccgtctcgtggatcatggtgaaaacatgggaccatgcggccgttacaacttacaagcatgggtaaagcctgaagtagtgataagccagtcatctacacttgcttgctgatgcatgttaatgttttgttaccataacatgttataacttattcgaaatcgtcatgatccactggtttatcatagtatatcagcgcgacttaactggttcagtataaccgtgccaagtactctctgaagagcaacctggcacgatccaaaaactagaatttgcttacacgagtcatgtcactcatgcacaatgcaggcctgctgctcaacggcaacttcgagtaccagccgagcaagtcacagatgaacggcacaagggtgatggcggagtacgcgatcccgtactggaagatcaccgggttcgtggagtacatctcgtccgggcagaagcagggcgacatgctgctgacggtgccagagggcgcgcacgccgtgcggctgggcaacgaggcctccatcgagcagcagatcagcgtgacccggggcatgtactactccatcacattcagcgccgcgcgcacctgcgcccagtccgagaagctgaacgtgtcagtggctcccggcccggagtccggcgagctccccatccagaccgtgtacaccagcagcggctgggactcgtacgcctgggcgttcaaggccaagcgcggcctcgtgtcgctcatcatccacaaccacggcgaggacgacgaccccgcgtgcggcccgctcatcgactccgtcgccatcaagaccctgtaccctcctcaggccacccagagtaagatgcatcgtcgaacatgcggctagctatgatgttcgatccttttgcgattactgacgacggacgaaacttgactggtcgagcagacaacatgctgagaaacggggacttcgaggaggggccgtacatgttcccgaacgcggcgtggggagtgatggtgccgccgatctcagaggacgaccactcgccgctgccggggtggatggtgatgtcggacacgaaggccgtcaagtgcgtcgactccgcgcacttcaccgtgccgcacggcgcgcgcgccgtggagctggtgtccgggctcgagacggcgctgatgcaggaggtgcgcaccgtgccggggaggtcgtacaggctggagttctcggtcggggacgccagcgacggttgcgtgggttccatgcaggtgaaagggtacgcgggtcaggggtgcacgaccgtgacgtacagctcccagggcacgggcgggcacacccgcgcgtcgctggagttcgccgccgtcgcgaacaccacgcgggtggtgttcgtcagctcgacgtacatcaccaagtgggacgggacgctgtgcgggcccgtcgtcgacgacgcctcgctcgtgtgcgtgtcccagcagcagccgcccgctcgccgcctgcttcgtctctgaaatgttgcgctacacggagcagttcgcggccggtcacatgtactcgcatggcgcgttggaatgtgactgtgctgggagtagcagtcgacctttcttcgaatttgtttcattttgtttgagagtgatgttcgaaatatctgttgaaaatttggtcataattcggcatattttaatctaaaataacaagataataaatatgatatttacaatcaacatgagcatagtggtgaatgtaatcaacatgagcatgcttaatgtagaataagcatcaacgtaataacacaatgttgacattgcgatgaacattaacagtaaaacttctaattaaaataatgtaagaaggttataccccaagaatggtcctccgctggagtttgaggctatattgcctccgttggtgttgacgggagcctccttctccttgtatccagtgttgctgttgtctccagtgttcgacatattagtgaaggtgaagtagatgttgacgaacagtgagtagtcacgccttgcgctccccaaaaaactgatcacccgcccgtccgtgcaaacgtcgcagcagcgcgtggtttcggaggcctactctcccaacgcgtgtgcacatacgtcgggatgggattaccgtagcagcaacagcgttggaaaatggatgaaagtgtgtctcacttctctcgcgggagatcaaatccattctcattttataagaggaatggaagatgaagagtaagagtcatggaataggaagaggaatagagtaactaattctcatcaattaagccatcaaccatcctccactacacaaccatcgaccaacaatcaattaggagtaattgatgtaagttaccaatggaataggaagaggaatagagcaactaattgtcatcaactagccatgaaccatcctccactacacaaccatcaaccatccatcaattagaactaattgatataagttaccaattccctaatcaaatggattaattctcaaaactcttcatcccattgatatcccataaaagaatgaatacacatgaattcctagcataatgagacttggaatttatttgatttaattgatttaaatggatcaattacccaattaaatctaacaatccccaccaaattccaaggctcatgagaatgctctttattccatagcagcttttatataccagtgtttcagtgaagactgttaagttgaactttcacctagaaaaggagctacacctgaccacaactgaacaatggactatgccttgaattgtcagtcttgtgcagttaggtttcactcaattccataactgatactaggcaaccgttagtattccctcgggttggagcttataagtcatacttcaggcctttcatgagtatctagagatcacccaaatctcatagactgtgactagcagtcgaactcatatagttgtgttccttctaagatattctgcaggtcaacatctctgcttaatgaaagccactcggaacacattgaggcatacgccatcctaccatacagaatagaagagaagtacatcatgaaaatgagcccatttaagggtctcttctctcggttacacaatagtttgtttcgccatccaaattcacgggatctccgatcacaatggataggtttccactattgtgcaactctaagtgggtctcaagcccatttccctcgatgcactatctatcacattacgtggtagccccttggtaaactgatctgctagatttttagctgtctggacatagtccagtgctatcactctggagtttttctgctttctaatagatttcagtcttctctttacatgcctaaatgacttcatattgtccttcgaactgttcaccttaataatcactgtttgattatcacagttcattaggatagttgtgtcacgcccagaaatttagcccaactttctagactattttgtgtattaaatccctgtccaggaccagccagggtacacaaaacgacaagtaatatacagttccaaacgtaaataaagcgtaaaatacttacagaagagatacttagtcctcacaccgaaacaaaagcagcagcagcggaaaaaggcgatcctagcgaggcttcagctccactccacaggcaaaactcaactggggtctaagccttggtcttctaacttcgtcttcagctcagaagcactacacttctgaaaaggaggaataatagcaaggctgagtacaaccaccgtactcagcaagccacaccaatgatgcagacgtgcaaggggatacaaggatggcttgcggctatttgcataaaggcgattgtaaaacattttattgagcaaaacggtaaaactgttgagtaattaaagtaatattaaatctccactgattaaagctacaccacgttgaacaggcccaaccaacccacctgaactacagtgcattgggtcgatttattaagtgtgagactaatcacggtgattctggtcgatcgcccataaccgcgggcatgactattcgaatagttttactctgcccagaggtgcacaactgtacccacaagacacaatccaccggcatgtcaccgtgcccggccggacacgtcaccatgccgagtgattgtgacaagacacttcatataacccgctctgaccaagcacaccacacctcaggtttcacccccgcccccagcaggtagcgggcaatcccctctcgtgcctaggtaaatccggaagtgacagaggccgtcgcagggcccgccccgctccatcacgccacccttgcctggatgcgtcagccagagaaaagctatacttcaagtcaggcagttacccattcccgcttgtggcaagcgctgtatgtcttccagtgcatcccgcgaaccggtccttacttgccatgggtgcgaccagcaaaatcatgcaaccacagcccaccattcagtcgtattttagttggataattacgaccatgaaacatggccggatgtctcgagcacgcagctcatcatgatactaacatgtctaatactgcaattatcccatctactgagctagtggtaattaagcatggctaagcatatagttctagctaggtcatcaaagtaacacaagctagtcgatttatcacccaagattgacaaaggacagatatcaaataacatggcacaagcgagcagataggtaaaccctattcccatgtaattagcaaaacgaagcatatttatttgcaaacaataaaacatttataaatttggatcaacatgctcaaggggaatgtgtgacttgccttgcttcttcaaacaatcttccgaactcttatcattgcgaccgcgatcttccgaaacgacggattctacacgctggcacacaaaacgaggaaaaactctaataaaaaccaaggaaacagtacatgaaaagtaaacaaatatgtagagctcaattttagatgaattttgcaagttgaatggctcaatttggagctcgaatgaattagatatggattttagaagttttgagagctcgaatgaattagatatggattttagaagttttgagccattttaatgaatttctagaattattatcgatttattgcgcaattaaatcctttatggcatcagccgagaggaagggatggcgccgacaagcgggccctacccgtcggtgactcaagggaggcgggtgcaccgtggaccaagtccacgcacgcgctggtccgcgggcgcaccacgtggcagacacgtggcggccacgacggacgggtgggcggaggtggcgccgacgtggcaccacgagggcacccacgcagggcggcacagggaggccacgtggacggcccagatcggctagggcggccgatcgagaggtcacgggcaggcgcggcgcggcaaaggggccgggcggccgtgggcgagcagggcggcggcgaccgaccggaaagcggcggtgctcgacccgatggtcgccggcagcgggcggcagcggcgctggaggcggcggcacacacgggaggcggcggggaagggagaggggctcaccgagacggcggagacggcgaggcgaaggcgggaaggcggccgacgacgaggattggcggcggcgcttctcgggttggggtcggggacggcgctctgacgactcccgaccgctgcggaggtacggccgagggccagcaggacctggggaaggggatggcgggattaggaaggcacgaggagactcccggcggcgtgaatcaccggccggaagaaagaaaaacagagggtgctcaccggtgtgcgatggaggtggagttccggcaggattcgggcgacagggagcggtggccgaggacctcctcgtccttgcggagccgagggaggcgacggcgtgggttggcgacgaccaaagcagcgggacgacgcagctgcagtcggcacacggaggtggtggctcgggtcgacggtggaggggtggttacggtggcgatttagggaaacgaagcggatgccggtatgtagccaggcacagcgaacctttcggcggtggcggcgcagcgcggtagcgatgggggtggcggtggcgagcgactcgaggcgacgagaggcggctgtgactcgggtgcacggtgaaaccggcgcccgggtggtttattgcggaagcggagcggtggacagggtgcggcaacgcgcggcgaggccggcggcgcaaacggcgcggcgcaggaacggcggcagcggcggcagcagccggctggagggtcgctggtgagcggcgacacttgggctcgcgtggggagagcgggagagagcgcggggagctcaggaaaaatgggaaagtggaagaggggaggccggggatgctttttatagcctcgagagtcgacggggaggccggttggtggcagatttgaaggggaaaaggggcgctggcgacgtgggtgagtgggctcggggtggcggcggttttcacggggagtgggggaagaacggcgcggacgtgggcggagaccgcgcccacgcacgcgcgggaaaaggagccgcgcgggagaggcggcgacgtgggcggcgcgggcggtaatggcggttgccggcggagtgcctggaggaaggagatgacaggtggggccgcgggtcccacctgtcagccagaggaagagaggagaccggttgggggggaatgcagactttgagagagagggccgagcgggccgaggaggaaaaggaggccggcctggccggatggggggggatggaggaaggggtggattgggccgaaaacggcccaaaaggagaggatgaaattttaatttgttttttctttatttaaattgattgaatgaactttgtattattataattatttcttgagctccgaaaattcacgggaaaatttcagagaatatttagggcacaaagaatattgcaaaatattctcggccaatgatttttaagggaaaattttaattatcccattatttcacttgattaaattgctttaatttttatttaatttctagaaaatgcattattaaatgatttttaatcccgaacaaaaatcggggcgttacagctggcacaggtttttcaatcaccggcaaatccatcaggagttcacgaaagccactcggcctcaactgtggcagtatctagtgctgtgagttctgcttccattgttgacctcgttaagatggtctgcttgcaagacttccaggaaacagcaccacctccaagtgtgaacacatatccacttgtggcttttatctcatcagcatcagatatccagtttgagtcactatacccttacagtacttttgggtaactagtatagtgaattccatagctcgttgtatcctttagatagcgcatgaccatttccagagcttgccaatgatcatctcccagattttaaacaaaccggctcagcttgctcacagcaaatgagatgtcaggcctcgttgcactagccaagtacatcaatgaaccaatgatttgggagtatctcaattgatccctttctattcttcggtttttccttaatagcacactggagttataaggagttggagctggcttgcagtcactataaccaaagcgactcaaaaccttgtccacatagtaagattgcacgagtgtaatcccaccctcatctcctctcagtagcttaatgttaagaataacatcagccactcccaaatccttcatttcaaagcttttggacaaaaagtccttaacctcctcaatcacattgaggctggttccaaaaatcaatatgtcatcgacatataaatacaagatcactccctctcccccaccatagtgatagtacaaacatttgtcagcttcgttcacaacaaagccagcagatgtaagtgttgtgtcaaacttctcatgccattgcttaggtgcttgcttaaggctatacaaggatttcaacagtttacacaccattccctcctgaccttctagtacatatccgtctggttgatccatatagatctcctcttctagctctccgtttaggaaagctgtcttaacatccatttgatggacgagaagaccatgagaggcttcaaaagcaagtagtactcgaatcgtggtcaagcgggcaactggtgagtaggtgtcgaaaaaaatcctcgccttctttttgggtataacccttggccacaagccttgccttatacttttcaattgtaccatcaggcctaagctttttcttgaaaacccatttgcatcctacaggcttgcacccatatggacgctcaacgacttcccaagtaccattagacataattgagtccatctcactgcgtaccgcttccttccaatagtcagcgtcaggagatgaatatgcttcttctatggttcttggagtgtcatccacgaggtatacaatgtagtcatctccaaaagactttgcagtcctttgtctcttactctttcgagttgctacaatgttatcctcctcaggattttcctcagccgtttgatcattgtgttctatcggtgcaaaatgctcatggggtaaaacaggttcttgactagacgtgctaagtgtatttttcatgggaaattcattctcaaaaaatgtggcatctctggactcagtaattgtaccaacacgcatgtcgggtactccagagtttactattaagaacctatagcccacgctgtggatagcataaccaaggaacacagtctacggtctttggtccaagtttacgctttttggctataggtatatttaccttggccaagcagccccatgtgcgtaggtatgagagatttaatttcttcctttcccattcttcgaatggtgttactttcttatgcttcactggaattttattcaggacatgacaaacagtcaaaattgcctcaccccaccattccttggaaagtcccgcagtgtctaacatggcattcaccatctcagttagagtgcggttctttctttcggctaccccatttgattggggtgaatagggatgcgtcctctcatgaataattccaaactttttgcaaaaggacgtaaactcattggaaaaatactctccacccctatcagacctcaaccgtttgattttcctttcaagttggttttctacctcagctttatagatcttaaagtaatgcaatgtctcatcctttgttttcaataggtacacatagcaatatctagtgcaatcatctatcagtgtcatgaaatatttctttccccctttagtcaacacaccgttcatttcgcacagatcggaatgaactagttctagtggtgccaaatttctcgcctcagatgccttgtgaggcttgcaaggttgtttcaattgaacacaagtatggcacttggaacctttgaccaaagtgaattttagaattaaactcatgttagccaaagtcacgaatgccacacattggactcatcattctcgctaatatggttcacaacattattattattattacacatgtcatccaaagaaaaacggaacagacctccgttgtcataaccttttccaataaaagttcaatatttagatatgacacatttattgaattcaaacacaagtctaaaaccatctctacacagtagagagccgctaactagattcttctttattgaagggacatgctgcacgttcttcagctatacggtctttcccgaagtaaacttcagatcgaccgtaccaacaccatgaacagccgcaagcgacccgtttcccatcaacaaggaggaacctctcccgacctgataagaagaaaacagggaaatatcagcacacacatgaatattagcaccagtatcaacccaccaatcaggtgaatgaaaaacagagagaactgtaggtaaaaaattgtcgtaccccgatgttcctccgccctcgctaataaccatgttggcagacttcttgtccttgcgatcaggacaattcttggcccaatgcctaggcttaccgcacacaaagcagtcgcccttggcctttcccttgcctttcttcttaaaattggttgtagcctttggtttgacatcagacttgactttcttgttgttgttgttgtgggatgcgtgagggttcttcttttgcaccaaattggcgctagaacctccctcgatatttttgccccggttttcctttgctctcgccttctcctcaacacccaaagagccaatgagatcaataacactgaactcttgcctcttgtgttttagagaagtagcaaagtccgaccaagaaggtggcaatttagcaataatgccacccaccacaaacttgtccggcaactcacagttgttgttctcaagttcatttgccagcatctaaatctcatgatcctgttccactacagaacggttatcgaccatcttgtagtcatagaactgctccatgacatacagctcgttgccggcgtcggaaactctgaacttggcctcaagtgcatcccacatgtccttccctgaaggcatgtgcatgtacacgtccactatattgtcagcgagtacactgatcaatgctccacggaacaagcaatccgaaacctcgaacttagcctcctcctcaggagagagaggcggttcacatcgtttgccccgtgaaacatagaagcatcgctgtcaaccacagtagtgcacgtgctttccatctcttataattagaaccatcaaaagcatgtggtttcagtgttgcagcaaagccaactaccgaaaatgacctatcaggtttttggattgttggaaatttggtcataattcggcatattttaatccaaaataacaagataataaacatgatatttacaatgggatttgatccagtgatagtggtgaatgtaatcaacatgagcatgcttaatgtagaataagccttcaccatcacctaataacaacattgttgacatggcgatgaacattaacagtaaaacttctaattgaaataatgtaagagcgttataccctaagaatggtcctccgctggagtttgaggcatattgcctctgttggtattgacgggaggctccttctccttgtatccagtgttgctgttatctccagtattcgacatattggtgaaggtgaagtagatgttgatgaatagtgagtagtcgcgccttgcgctcctcaaaaaactgatcacccacccgtccgtgcaaacgtcgcagcagcgcgtggtttcggaggcctactctcccaacgcgtgtgcacacactcgtcgggatgggattaccgtagcagcaacagcgttggaaaatggatgaaagtgtgtctcacttctctcgcgggagatcaaatccattctcattttataagaggaatggaagatgaagagtaagagtcatggaataggaagagaaatagagtaactaattctcatcaattagccatcaaccatcttccactacacaaccatcaaccaacaatcaattaggagtaattgatgtaagttaccaatggaataggaaaaggaatagagcaactaattgtcatcaactagccatgaaccatcttccactacacaaccatcaaccatccatcaattaggactaattgatataagttaccaattccctaatcaaatggattaattctcaaaacttttcatcccattgatatcccataaaagaatgaatacacatgaattcctagcataatgagacttagaatttatttgatttaattgatttaaatggatcaattacccaattaaatctaacaatatccatctgaagcagtgaaggtaattattaccatcagttgttatcgttgaaagattttggtgtatatttgtgtaactcattttgttacgttgagttcagacttcagggttcagaggggcaacttattgcagtatggattacattattcccaaactttgctaatgtttgtatcaaagaattttcgagctttagttagtaccaccctacacttcatgccattaattatcatccccaaatcatcagcgccgagaaagcaggggttcggaattttaaactccgaccccttgaacctccgtttttcattgctctttcctactccgcgtgccaattaacttcttgaacctgcacacaacacgtattcgatcccttcatctgtttgtttggtttttttccccatgctattactgttgttttccccattcgatttgatccatcattcctatacactgtatcgttgaactggctagctcggtcatttgtatgtagcctcttcttcagtccaattgtccaaagtgtttggctcttttgaaaggtatgatatgattttaggaaaaaacactagcgcataatattttacagaatatcttttttaagtctttacatgcattgaggatatagaaataaacacttattttttttaaacatagtataaacgcttgtgctcacaacatatgcgcactcacccatataaacgtgcacacgcacaccttatctttatgcataccactaaaaaactaaaccaatacatcttgttgtccacatgaacgtcgcctaccactgaaagaaaaataagtcgcaaatacgagcacccatttcgagtcttgttgacgggggatacccgtagaccggatatagagggtattggggttcgctgatacgaggatctacgtagtacggcatcaagcaaacaaaaaacagggattatactggttcaggccccttgataggtgatagccctaatccagttaatatgggattatatgatgaaaaccacagattacaaagggaatagcagaactcgatgataccgacgagaccgtagtcgagttggttcgattagatcacccggcgacttggctcctgtaggctccgacttcgtaggctgtgttggttgtgttggcggtgagattcgatgctttaggtcctcccggggggtcccttttataccgcaggcaagttaatctccaagtagaactcagagacatcggaccctacacgatacagtgacgacacagttctatccgagtaggactccttccatctgtggactccgtgatgaattttcttaacgtgtacagagaacgtccgtatacgcgcagatataccatatcgatacatgacgtatatccaagggtggagggtataccttatccgtaaccctgacaagtctaatacttgagtatggatgggttggttccaccacaaacaatctaaccagttaagatatactcacttcgcaaaataacagttatttgaatctgtacacatcattagacctaacatatagaaacaatagctattaatctttataatatttcagttaccgtggtaatttcaggaaaacaccattagtgtggtgcagagtcgtggatagcttcacatacaaagtttaatcctggttgcgtaagtgtgttttctataggaatttagtgggactaagatatgatgttggtcttcatctctctgagcttgtgttaggaagcacaatcattggagcgtgtgagtgtggtgcgtggacgtgttgtattttccatgtaatcgaaaaatgacatggtaattttgatgcgtgaacgagagttgtactaaaccaatttggtccaagaaatttatgggccttagccattacccctatgtaatttcggccctgtttttgtgtgctaagatgctacatcgctcctgcgcatatactatccttcgacagccttacgggcgggttagtcgcaccgacggtggcgcgccgcgtcggtcgccgttacgcagcttcccccttctcacaggtgctggtgcgggggacggcggagttttcaaatggcgagcagccatgcgcccatgccgcccatgcaaaagaaacagaatggcaagccaaaccaccatgtgaccccaggcaaacgcagacaacgccttccccggtcgccgcctcgccaagggaccccatttccacggcacctcagaaccgaggagagatgccctgccaacctcctcgatcgtggcggtccgcggatccggcgctcgtttcgctcggtttcctgcagaaaacacgctgtccatctggagttctggacatctggtctgaactctgaacaccgatccgttctctataattaagtgacagcatatcacaatctcctgtacagttctaaacctgtttgctgtccaatcccattgccaccttgcttacaaccaagtaataacaggagcagtacttgctcagagaggtgatgagaagaaaaacagagatgattcagactaccccctgcgtcgcgctgctcttgctcgtcggcgttgcttttgctgctcgatcggcgtcggctatcaccgatggtaagagccttccatagtacatttgccagcttaagatcgtacatgcgatttagacggttaatcagttgcacgataaatttgtgacgctcatttctgcttagatagtactgaaaatgacgaaagatcgctgatatgtcattctgcttgctgcgtgtatttttcaggcctgctgccgaatggcaacttcgaggaggcgccggacaagtcgcagatgaacggcacgagggtgacgggtcgctacgcgatacctcagtgggagatctccgggttcgtggagtacatcgggtcgggccagaagcagggagacatgctcctgccggtgccggagggcgcgtacgccgtgcggctgggcaacgaggcctccatccagcagcggcttaccctgacgcggggaatgcactactccatcacattcagcgcggcgcgcacctgcgcccagtccgagctcctcaacatcacgatcacccccgagtccggcgagatccccatccagacggtgtacaccagcagcggctgggactcctactcctgggccttcaaggccaagcacagcgtcgtgttgttcatcgtccacaaccccggtgtctctgatgacgaagcttgcggccccctcatcgactcgttcgccattaagaccctgaaccctcctcaaagaacgaaaggtaattaattaattgagccgggtgctaacctctccacaaagctgctatcagtgtgcatctctacaaaattgaatacaaggatgtgctcacagtcatgaaacaatcgaacaaaatgaaccaggtaacatgctgaagaatgggggcttcgaggagggcccgtacatcttccccaacacgtcctggggcgtgcttgtgccgcccatggacgaggacgactactcgccgctgtccccgtggacgatcctgtcgaccaccaagtccgtcaagtacatcgacgcggcgcactacgctgtgccgggcggcgcccgcgcggttgagctggtgtccggcatggagacggcgatgctgcaggaggtgagcaccgtgcccgggcggtcgtacaggctggagttctccgtcggggacgccggcgacgggtgctccgggtccctgaccgtgcaggcgtacgcgtcgcgcgggagcgtgaaggtgacgtaccagtcgcagggcacgggcggctacaagcgcgggctgctcgagttcacggccacggagaaacggacgcgggtagtgttcgtcagcatggcctacaccacgaagtccgacggcacgctgtgtggtcccgtcatcgacgacgcgtcgctcgtcagtgtccacagccaccgccggttccttctgtaatattattactatcgtcaaagtcactagaatttaaaatgacttaaagttgtcccatatgaaggaatatctcaattccttttatatgattcttatgccaaaagggtgagatgattttttttaccgaggaaaaaaatgtgagatattatggatgcaattgatagaaaaccgggggtaattacataaccgtacatgcttattcgaatattgaatatgaccaggcccatgtttggatgcaaagaaatgaagtcagtagaaaagatgattgaatttgacttgtctcaactatcaagtcacaagtgtaatgtactcatttatgttagattattggaatcatgttttaaggttgagatcaagctcttcattagtagtcccagaggtaagcttcacgtctactacatctattctaaaataaacaaacatactatatacaatactctctccgtctcataatataaaaaagtaaaataaacaaacatactatatacaatactctctccatctcataatataaaaaagttttagagttatatacggttattaaaaaaatatgtacaaatgaatggtggatggttatgattggatgagtagtaaaggtaggtgtgaaaagtgaatggtggagggttttgattggttgggaagagaatattggttgagaagttatattttgggataaatcatgagaactaaaaattgttatatttttgggacggagagggtattatgaatttagacaaactcttgtctatttgtaaactagaatacatcacatcttgtgctatatttgtatatttgtctattttagaacgaagggagtagtcaagatcattttaaattagactatggaataaacaattattccttctatttaaaaaaacatttctagccctcaaactttattaaacaaaatttcatttctaccttcctacctacttattggttcacaaaatcaagaagtttattctttgcctacaacttatctattatagtactaataactacatttttaattaacaatggacactttggttgtttacactaaccattagtttataaaccgatgattagaaatagagtttttctgggtcggaaataatagacatgttgcaaggtcctttaaaaagtcaaatatatttgtggctagtaaactttttgtcatgtgatatcttggtgcataaaaatctttaaaaatgtaaatccacaccgtttatgtttgcttaacgtaccatcactattccagaaatacaacgtatcatgttagagtataaaataggaaagtgttgttgaacatcctatatttttgcaaatactggacggtgttgcactatattatcacagaatgtttcacatattgcacaccacgatgaaaaatgtttcaacgaaaatgtttcatatgtttcattaattgaggaaaattattacatctttttaactgaaattcttgctttccgtcttgttgcttacaggtcctgcagtatcgtcatgtgtgattagtaatagcaacacaggccattagcatcaaatgaacgcattatagtgtggatctaaccagatttgggccacgacatttgtgtactacccagtgtgatagtgtgtcttaatcggtacggcagaaagtaaaatttttgggctagtgatttcggcctcatgggccagatcggcagaccagaccacgtgtacacccaacacgaggcccgttttctcagccctagtcatccccacttgcccggatcaacgacgggagtcgccgcatcgggcggcgtgcaccagtaactgcagtttgtcacctcctcgcaggtcgccgccacagatgcagggaagggcggagttttgtaatggcaggtggccatgcgaacgagaaagaagggaaaggaatggccatgtgacattgtgaccccaagccaaacaccgcaacacgcagtcgcgccttccccagtcaccaacacgccgaggaactccatttccaccgcatctcaggacggagtgatgccctgccaaccgcctcgatcgtggcggcccgtgcatccggagtgagttttgctcggcttgccgtaggaagcaaggtgcccaacttgccagcactagctccatccaggttcttccgtcaaaaaaagctccatccaggttacatcctctctgagcacgcatctcctctataactacaagtgccaacacagcactgtgatgcagcactacttgtttccattaccaaaattctgcggcaacttgtttacagctgagtatcagatattcagagtatagggagtacttcttgtcccgaaggcagctgatgagaaggaaaacagagatggtgcggagcacctgctgcgtggtgctgctcttgctcctcagcgttgctgctcgatcggcttcggccatcatggacggtgagaacctgcaacaccatgctagcttaaacaattgtttaacacagttgtggtttttcacgataaatttctcatgctcatttctggtcaataatttggcgagtgacacttgatagaaactagctggtgcacgagcgagttcgctgacatgtgtgctctacgctgcgtgttcaggcctgctgccgaatggcaatttcgaggaggcgccggacaagtcgcagctgaacggcacgagggtgatcgggcgctacgcgataccgcagtgggagatctccgggttcgtggagtacatcgggtcgggccagatgcagggtgacatgctcctgccggtgccggagggcgcgtacgccgtgcggctgggcaacgaggcctccatccagcagcggctcaccctgacgcggggaatgcactactccgtcaccttcagcgcggcgcgcacctgcgcccagtccgagctcctcaacatcacggtcaccccggagatcggcgaggtccccatccagaccgtgtacaccagcagcggctgggactcctactcctgggcgttcaaggcgagacgcagcgacgtgtcgctcatcgttcacaaccctggcgtcaccgatgacgcggcctgcggccccctcatcgactcgttcgccatcaagactctgcaatctcctccaagcaccaaaggtaactaaagatcgatgtcactattgaagtttgctctaatgctgtaattgcatccttacgtagtttaatacgttctccgtgaaacaaatcccgtcagataacttgctgaagaatgggggcttcgaggaaggcccgtacatcttccccaacacgtcgtggggcgtgcttgtgccgccgatggacgaggacgactactcgccactgtcgccatggacgatcatgggatacaccaagtccgtcaagtacgtggacgcggcgcactacgccgttccaggcggcgcacgcgcggtggagctggtggccggcatggaggcggcgctggtgcaggaggtgtgcaccgtgcccgggcggtcgtaccggctggagttctccgtcggggacgccggcgacgggtgcgtggggtccatgtccgtgcaggcgtacgtgtcgcacggcagcgtgaaggtgccgtacgagtcgcagggcaggggtgggtacaagcgcggggtgctcgagttcacggcgacggacaagcggacgcgggtggtgttcgtcagcatggcctacaccatgaagcccgacggcacgctctgtgggcccgtcgtcgacgacgcgtcggtcgtcggcgtccacagccatcgccggcttcttctgtaacataggctaacgtcaacgtggcattcattttgtactgcgcctctccggttcgtcggaaattatgtatagttcgatgatacacatatcattgaattgagtttcctgcaccggattttctcagtaggaagacgaacggatttgagattcagatgtagtccttcgcctgtcgagggttaactcagacatctgagcaccagaaaatgttttcgcctgtgctagatttcattacaaattagaagctggatgaatgcattagttttagtagagtgctactgaaaatacactatgttacaccaagatgcattgttttaacattgtactgctatactccatttcagtagtagaaaaaatattgtacttctaacttgttggaaagaaccctttttcacatatattgtaacagagaacagctagtggttgagagattgagccccgaggaccgccacatgaccacaccggccatgggccatggccctgtggaaactggagccgaatcttccattcgtggcggaatgccacgtgagtagctgcggtcactgttccttgcttacagctgcagctttgcaggtcccaagttggcaggacgtggccattcggatcgcctcgaaacagagagccgaggcccgaattcctccggtcctcctcgtgacccacgcaccggcgcgcgcgcgcgtcggtgtcacttgccatgccagtatgccatgcccggcatttaagtggacagtggtagaacggcacggcggctttggcggtctctggctcaccaagcttgtgcatcccatctagctccagagagtcggacgtcgggagcagccgagagctcgcgactcgcgagaagggagccacggtatgactgggagcgcgcgtagcgtcgtggcgctgctcttcttgctcgtcggctcggctgctcgggccgattcagccgtcaccgatggtgagatctcgcagactgctacagcgctcctctgttaaatattttttgagccttttgcatgatttgcacggtgatgatttacgcagttcccatgttctgattgacttcatttcaccatgatctatgctttatcataggcctgttgccaaatggcaacttcgaggacgggccggacaagtcccagctgaacggcacggtggtgacgggtcgatacgccatactgaactgggagatctcggggttcgtggagtacatcgagtccgggcacagggagcaggacatgatcctggcggtgccggagggcgcgcgcgccgtgcgattgggcaacgacgccaccatccggcagaggcttagcgtgacgcggcgcgcttactactccatcactttcagcgcggcgcgcacctgcgcccagaaggagaagctgaacatgtccgtcacaccggagttcggcgtgctcccgatccagacggtttacaccagcagcggctgggactcctactcctgggccttcagggccaaacacagcgtcgtgtggctctccatccacaaccccggcgaggaggaggacccggcgtgcggcccgctcattgactccattgccatcaagaacctctaccctcctccccgcaccaaaggtaacagtcacagatctgttcctactgcttcgccgaacaaaaagtaagttttttgttgagacaatgaactcactcattggcctggcatgtaggaaacatgttgagaaacggagacctggaggaggggccgtacatcttcccggacgcgacgtggggcgtgctggtgccaccgatcttcgaggacgagcactcgccgctgccggggtggatgatcatgtcggacacgaaggtcatcaagtacgtggactcgccgcaccacagggtgccgcagggcgcgcgcgccgtggagcttgtggccggcagggagaccgcgctggtgcaggaggtggcgaccgtgcccgggcggtcgtacaggctgtcgttctccgtcggggacgcgggcaacgggtgcaaggattcgctggccgtggaggcgtacgcggcgcgggccacggccaaggtgccgtacgagtcgcagggcacgggcgggcacaagcgcgcccagctcgagttcgcggcggtcgcgaacctgacgcgcgtggtgttccagagcttcaactaccacacgaagccggacgggacgctgtgcgggcctctcgtcgatgacatctccctcgtcagcgtacgcaagcgcgctgctcgcctgtaacgttaacgttgttgcactacgccgtctgctacccgcgcctccgcggtggctggtgatcgcttgaaaatcgggtgctaatttgtatgaagtgttgacactttgacttagagtcgtcgtcaaattgaagtactagtatggctacagggtctgggtgacctagcgctataatagaagaacgaccgatcccatcaacatattgcacaagcattgaagcaagataaatacgcggacggtatagagtaagagaatgagaatgcgaaatgtgagtatgcgacaaattttcaaagcataaaaccatggcattttttcattaaaaatactgtagctgattcggtaatgtgaaaaggagacaccgcataaagttacatcatataaaactacatacttattgcattattgcagttacatgcaggttacgatgtaattacattacatatttagaattatcttatgtttacgtatgttaattttttagaaaaaaaatatcgacaaatgtatagcaaaactgattgtgagaaaaaaaatatcgacaaatgtatagcaaaactgattgcgaggagaataaaatgtgataccataattatagctagacctttttttttccttttctagtcttctcgttttctcattaagccgctcatcaatcaacggagcccatgggttattgggttgaggcaaagtgcagcccgttacaaaactcatataaaattagacccgattaaaagcatatatcgtgatgcaaatccaacggtaaaaaaattcaactgacatattgaaatttttcaggcgcacgcagaccagcaaagctgataattaaacagtaacttatcccttttgggtttgtttggttcagctgggttgtagctgcacagccactgcgctgcagctcccctagcataatcttgcttgttgagtcttgtagctgtagcgctgctgctgccacagctggctcttccaaactcaccctttattacaaaattgtttaaaaatgctcttttcatcctctcatagtttgaaacataagtttggtttactgctcggttgaaagactgaccagcgattcagaattacagatgcactttgctcctacaatatttgtcctcgttggcgagggatttgaccttgaagatgctatagcgccaactttgaaataagagtaaatttcatagaagcctacattttcaggtatcggtgacacaaaacccaaaatttaaggtattacgatttattttaagtactttatatttgaagctaaaatgtttatttatataaaatacttctattctattattatgtaataaatttttaaaagaaaattcatatttgcatactcaaaatatgcatccatctcgtctactttccctaaaaatgaaatcaatttatttctacgaatatagtacaggctattattaaatatgatacatgcatgcttgtaactgggtttcacaagacattttccattaaatatgggtttctttaaacaaattgtaataccggtgttcgaaaatttgagattacatgcgaaatgagcagatctcaactagttaggtcacttgtgatggaacctatccgtttaggtttaagtcatagacttgcatggatactcgcatttatagcaatttatccttttggtggtagacgatgtactggttgataacgaggtgctcgtaatgactttgttaatattaaaatatgccgcctagtcttttcataactgcccataggaatatggcatgtatgttgtacgtgttcatagggatagtttacgtacgttgtgagcgtccatgtttgtaatttgtttaaaaaaagggagggggtttgtaaaattatttggagttgcaactcgcatttcctctcagaacaaaacaaagttgacaaattgcctccgttagggagacgcagggactgcacagggcaggccgtgagttttaaaaaggaagatgaaaaaagaacggccggcacccggcacccacgacacaggcctgcggagactttgcgcaacacgagacggtgggaatcgcggcgccgagcggccgtagtccgtactcttcgtcgcagcttcgccgaggcgccgaggcgtgcggagaagagatccacgccatctcggctgggacgcatcgttttgtcagagcaaggtgaatagtatagccaactactgctccaaaatatctatagccaatctaatagttcattcatacaatagttaactataaaaatatactacactattaatatacggtcacacctctcacacacacataacatgttggagttcgtgttgcagccagctataaatttatagcccgctttcttctctctcttcttttttcttctcgatatatagttacagctggcttatagcctactattgtacctgctctcatggcacagccccagtgccccaggccccaagctcgaacccccaacccgctgtgcgcggcgacgccgtggccccgagctgggcggcgtgcaaactggagaggaatcttctgtagcagatggtccccaagttgccgtgatgccttccgtacgatccagccggcgcgtctcgcggcgtcccggactcatcctccctgcacagatcacacaagttgtaataagcaacagctcttatatatgtgagctcgcgcactggcccctcgcgaatcggtaaaacgacctactccgattcgatttgtctgtttgcaccaagctccagcgaagttcgagtgctggaccgtgtgacgagagctcatgatcatggtcttggcgaagtgcacgcgctgcctggctcttgtggtggtggtgctcgttggcgtggctgcaccggtggtcttctctgtcaccgatggtgagcactcgtgaacaaatactatcagcttgttaatcagttgccgaaccttctattgttttgtaccacgcgaaacctgccgttgacttatatccatagatcgatcctcacaactgcatatacatgcagcagttagttgtataatcattttttttttgaacgaaagttagttgtataatagatctgtttggtgtgtgaatgtctcttttgatccttcctgcatctacagtattatcacctgagttaaatatcagatagcaatttatgaatgaacttgataaggttgacaatgcatatatagatcaggtgcacaccagagaggattgaggattcaaagctcaaatcttctgctgatcatgacagtgaatttctagaaactaacagccaaagccaatctgcagcgatctgaaccactttcatttttagtcatagtaagtagttacacctggctcgttaattctctccgaactctgaactctgtacagcgtaatactgttcttcattagttcactacttcactgcttaagaaaccactgctttgccctttaatcgctgtaatgtcgaagctcagttctgtttcgagctacataatacagcaaagttgctttgcgttcggactttttctagttcaattttcagttccctataacagagaacccctttcctctgttttcaatatcatttctcactttgtgacagctcgatcatatattgtgcgtacaggccttctaccaaacggcaacttcgagcacgggccggacaagtcccagctgaaccgaactgggagatctctgggttcgtggagtacatcgggtccgggcacaaggagcaggacatgatcctggcggtgccggagggcgcgtacgccgtgcgcctgggcaacgacgcaaccatccggcagcggatcagcgtcacccgtcacatgtactactctgtcacattcagcgccgcgcgcacctgcgcccaggccgagaagctgaacgtgtccgtcacgcttgagttcggcgtgctcccgatccagaccgtgtacaccagcaccggctgggactcctactcctgggccttcaaggccgaacacagcgccgtgtggctctccatccacaaccccggcgtcgaggaggacccggcctgcggcccactcatcgacctcgtcgccatcaagactcttcctcctccccatcacaccaggggtacgtaagctaatccgttgctcaagagaattttcgacatgtcgcaagcaaaacacgttatgacgagttcagaatctattcaactgaactggcaggtggtacaatgctgaggaacggggacttcgaggagggcccgtacatcttcgccgacacgccgtggggtgtcctggtgccgccgatggacgaggacgtgcactcgccgctgcccgggtggatggtcatgtcgaccacgaaggtcgtcaagtacgtggactcggcgcgccacgcggtgccgagcggcgcgcacgccgtggagatggtggccgggagggagtgcgcgctggtgcaggaggtggcgaccgtgcccgggcggcggtacacgctgtcgttctccgtcggggacgccggcaacgggtgcatcgggtcccttgccgtggacgcgtacgcggcgcgggcgacgctgaaggtgtcgtacgagtcgcggggcactggcgggcacgagcgcgccgagctcgtgttcgcggcggtcgccaaccggacgcgcgtggtgttccacagctccaaccaccatatgaagtcggacggcacgctgtgcggtcctgtggtcgatgacgtctccctcgtcagtgtggacaagcacacggttcgccggttgttgatgtagcatccctcgtcgtgtgccgggcggtacttgacctgtagttgcctagttgcacacactgtgttgcaccagaacgtactacctcggctcccaaaataagtgcaaccgtggatatccgtgcccaacgtttgaccgtccgtcttatttaaaaattttatgaaaaatttaaaaatatttagtcacacataaagtactattcatgttttatcatgtaatagcaataaaaatactaatcataaattttttttaaataagacgaacaatcaaatctgaacataaataatacaaaactacacttattttaggacggagggagtgatacggtttgttagtacggtagtagctgcctatgctggagacccggagtagtcgtatggacaatgccagtacaactacccttgtgctcttcaactggaaaagccggcattcgagcccaagctagggctaagttagttacaaactttttcttcaaactttcaactattttatcacatcaaaactttcctacacacataaacttctaactttttcatcacatcattctaatttcaaccaaacttttaattttagcgtgaactaaacacaccctagattgcaatcttgcaacacctcagcccaaattggattgtcctgtgagccacgagctcacaagacgttgattttcttccaaaagtgggaagtattgtatcatggacacttccttgtagtactattttttcgtttcgtaatgtaagactttctaatattgcatatatatatattaataaatctatacacatatttgtctagatttattaacatgtacataaatatggacaatgctagaaaatcttacattgtgaaacggagggaataccgatcaatgtgaaagaagaaacgcgagatgtaggcctggtttagttcccaattttttcttcaaactttcaacttttccatcacatcaaaactttcctacagataaacttttaactttttcgtcatatcgttctaattttaatcaaacttttaattttggtgtgaacaaaacacacccgtaggcatataatattgctgctgtgaaggttttgacttttctagatgcatgaatgatatatttgactccggggcagaaggatagtagtactcctacgttagtacatttgaatggataaaaaatctgaaaaatgccttcaacggtctgccgtgccggccagtgcgatcgacgaaaagttgaaaataaccaatagcaaagcactgcaggtctgcagccgtgccgtactacacgaggtgataaaaaaattaaaaatttacgtatgtagaaaagttttaatgtgatggaaaagttaaaagtttaaagaaaaacttcgatctaactcgggctgagtcggaatctctcctgctactggtagtgccaatgcgttgaacagagcgtgtgccacccaagctccacgtggctgcaggcggtcgctctgcgtctgcagcgtgccacgggcatcgacgaagatgcgtgctgtccctctagtacgtggcgtccggcccgcgagtgtcggcgtggtctcgcggccaaagctggggagctctcgtcggcgtgggagtccatcggcgatcatgacgaagggcgccacgcttttcatggcgctgttcgtgctttgtcgtcggcgcgtctgctcgaccggttgttgatgttgttgacgacgagaactaggtagtccgaacatgtggtacgtgatttgccaaatacgttttcatcttggtcttgcgcgcaatagctcatgtccgactcacaattcgtttgtgttcacgattgcggcacctgattgctttatacaactgggccgggcctactttacatgtataggcctactaccaaacggaaacttctactatgggccagaaaggtcccagtggagcacaaggggccgccatggcactaggagatttcggggttcgtggagtacattggatccggcctccgggcacaagcaaaagtaagtgatagaaacttcacaaattaaggatcactccatcctaacgaagttaatgtggatgattatgcaagaaattatggcatatcttctcgagaggtaaagaaaaccttcaatgtacccatgtgtactatttcaaaacttcagtcaaaaccaacaatattagggtacacatgatttttcaagcatatcttacagcctttaactttcaagatactaatttctgaaaacaaccataaatcatactataggtttttttaggaaacacaatacaagtgcatacatttgtatacacgcacacacactcacctctacgatctttaactgttaaaactgttaacatttcagccttcaaccagatttcgggtggtttggagtgatatggtaatgtagcccagcccaaggaataaaccttttttttagtttttaaaattactacttgaactatagaaaaaggaccacttgacattacgtaccatgtgtctattatgcaaaatgtgtgcaacctgagtaaaaaaattgtgttccatgtaaataagatggttgagttatctcatgaatagatacaatagtatttcatatattcaagagcgtgaccgatatttacttttttttcatcaatttgagaagaaggatgcaaacaactctagcaatggaatttctcttaaaaataagaggtattgcatcctcctcgtaaaaaaaaaatacagaatgatttctctgacggtaaacctacattaattattggctcttcgtttcccatatattgacatccatgcgtacatagattgtccgctagctgttaccgtataggaaactcatttaagccgaaatgttccaggtacattaatgttatatttctcccgttgttattccaacacacatatgtaatggacgagtatcataaaccagtgtacatatatatagcaaatacaggaattgaaggagcatacgtgtataacaacacatcatgcatgcatgcgctcgtgtgtaagcggcggaattatttttaagtaagctataagcgaagacaactactcatgcatatttgtcccagcacagtgtacgtagcactgtacccaacaatcagccatagctagcttagagtacgtaaggatacatcaatgcggcgcgacgtcgacactgccacgctggtgcacacacctacgtacgtacatgcacgcacgcatgagttgttggccgtgtctgtagatctggtctagtggccagggcctctcgggctcggccccgccgtgagctgtgccacccacgccatgagcagagacctcgccctctcgtgcagcgacgtcgccatcgcgtgggccgcgctgtgctgctcgcccggcagccgccgcgccgcctcgacggctgtctgcaggatagtggatgatagggccacgagtagcaagaaaacggcgaggattttgtctctctgggacgacatgatcatcgatcgatcgatcgccgagaggtgagctgcttgtgtactaccactcgatcgatcgatcgagctgtatgttatttggtacgtgatcagggtagctaacctttctcgcgtatatataggctccatttctcaccgttaagctgcacgtacgagagagaattagtttgtctgttgtgtgtcatgtgtgtggttagaagagaaggtcccctggctagctagtcagtagctagcgtgcttaattgcttgtatgcaacgaatctttgatcagtgagtttgccttaattgcggtaggaaaacgaggccgatcggtcgccttctcatgggtgggacagtggacagtttgcactatagaccaacgatcggtcgcctcatgcatagggatggcaatcgggtccgacgggcacgggtagtgcctatccatacccgtgcctataagattatttgtgcccgtggatatacccattactacatgacgggtaaggatggttgtccatgcccatcgcccgcgggcgccttgtgcccgcgggcatgcccgtttacccgccacaacaaaagtagtggaacaaaaagtctacaagcttctaagttcgaattgaacttaaaacatcaaatattctccgcctcggtgtggtgtctcttctctggcggcgatagagtaagggggagagaaataataagggaaataaaaagaaaaccgtagaaaacaaagaacgtggcctatgtattctagtggattttgatcttaacctacatgtaagttagattttacgggtaaacgggcaaagcgggcatggttaatgattacccatacccatgtccatttacccatcaggcatagtttttgacccaataagatacccatggttataaaatggagaacaaacccaactctaatagggtttttatccacggataaacggacaaacgggcacaattgccatccctactcatgcatgatgttcaacgaagttcacatgacagatccaagagcatgcatagtttcaaactgttgatgataaattcttagtataattaagcagacccgtatgtaataatgatctttttttctcataagtattgtacaaaccaccatgcgtggcgcatcctatcaacacgtacgatcaagaaatggaacctcgaaacagatcccaaaatcgtgcaaaaatcctgcttaaacacattaatgtggttacaatgtttaatttaaggatagttttgtcatctttgagaagttactgaaaaatagtatatttttatataaaatttaatatctttattaagtatcttgagctaggttagtgtaacatttagatatcttaaggtattttcttatggatcttaatttgaaccttcctgatagtcttgcataaataaattcattgttacagcaaagctattaatttttagtttattattcttctcatgcaggagtttgtccgccatgagctttatttgattattgttataaccttactctatgtatgcttttgtgtgtatccatgatgcagagaaaccagagatgtaaccatgtaatgctaatttagtttggtatcacattgtgtcctaattaattggtaattttcaatagcatttcttgatgtttcgattggtatcattttttgccaacaccatctcttacgtagcaataaatttagtaatgccaaaagttccataaaattttgcactaccgagatttaggcagggcaccaaattaaccaaactggcccatagttatcttcttttatcttaaagagttgttgaaccgttgatcagctgtaaaatacttgaaaaaggaaactatacataggctacaatacccatgaataactagatatacatttgaactttagacagagctcctggaaccacactcataggcaagatacattcgactagctagtatcactaaaaatgattcacttaattagaatcatcatctgttcacctaattactagtttacccatctaaccagtataaaacaaatgcataacctactcctgaacttcgcgacagtggtacaacgtctaaacaagctaggccacaattaatcgagttgcgtacctgcgttaatcagagctctcggaaatttaggcggtgatggaagtttcgcccggacgcttgatcgatggagcggatttgtttaccctccccaacgcccaccgtcgtgggtgcttgtggttttgacgggcagcggcaagcacaagagcccgcaatctcgcacgtcttgccgcaacgccatatgcgagtgggagctcagagctagcctgagtaccagaattaactggcctactacacggcagtacactgtacacgcctataggtgtgtagtgtatcgaacgctttagatcgcgaaaagcattgaccatacgcatttctatatcagctacatgccggtcggtgatcggtcgaaaggaacatggtgaagctaaagaaaaagatgaaggtactgtaaacagttagcgttgttctacctgcctgccaccggtaggaaacaagagtacgggtcgactagctccccgagaagagctggcaccgttcaattcaaatggaatatagttttacatgatgagtgtaatactcccaccgtcccattttaaagtccagccataattttcagcgtctaactttaatgtccgtcttattttaaaagcttttaaaaaaattaaaaaacataagtcatgagttaagtattattcatgttttattaaaagttagatataaaaatttatgattgtatttaaaatggaacggagggagtacattactaatatttaaggctgagaaaatgctacattatcgatcaatcatttatgtggtaaatgtcatgcaaaaacggccttctgtctctgtgccctttcaaagtaaaaacggtcctctgtagcgagtgtgaagcagccagctctccggccgggccaatgcataactagaggagcccaaaccaaaccatgacaatgggtttgcacttcgcaaacatgccaatatgggccgtttgctaagccgagccctacgaatacaggacgccatcagtcaaaagagttcactttaggtttctcaatttgtcgctgagtctaaaagtcatccctaaacataaataacacagtacttcgtataacctatcctccaactcacaacacccacgtgagccccacatattagcgaacaactcttatccctcctctccctctccctcttctgggaaggggttgttgtgcacgatctccaaccccggcgtgcgcttttctccccataagtgggtgtgtgagtgcggttgtgaggacatcatgtccgacgcctcctccttcacctcccttgttcttctagttgtatagccggcacagtacccaatcatccaactgcatgatcaattcatgcaaaatcatatcagaatgtgattcaattgtagatcgcctttatcgaataatctttgatcgaagcaagaataatttaacttttaaaatagtgaattgaggcttaccctgagagacctcttcttggtgcccgcgatggcgcggccaatgttggcgagctggtactcacataatccaatcggtcttgacccatcacaggcgtagaacacaagcacaagcgccttcttgatgccaagcgtgtgcctttgcggtgcgacgggctttgtcggttggggcatgatttgttggtgtgcttgcggtccggggtggggagggattgaataagtaccactccctagtgccactctgataggtcccacgagttgaaattttacagatccacctccacaatgatcgacaccaggcgcatgggacgggccccacctataaccatgaaacaggcatcgagaggtggtcctacaccgcaagctcgaagggcaacaacttggtgcaaccgaggaacacgacagtgtcgtttcccgatgccgtgggagggtcggtggtggtagggtgggaggaggtggtgatgagcggggagtagggagcaaaaccggaggagagggcagcgtgaatggagggaagaaggagaggaagagtatgaagaaaagttaggcctcgtttagttagcaaaaatttttgttttgggtgtcacatcagatatatggacacacatttgaagtattaaacgttgtctaataacaaaaaaaaatatatattccgctagaaaactacgagatgaaattattaagcctaattaatctgttattagcaaatatttactgtagtaccacattgtcaaatcatggtgcagttaggcttaaaagatttgtctcgcaatttacacacaaactgtgtaattggttttttttccacatttaatactctatacatgtgtccaaacattcgatgtaatgggtgaaaagtttttgttttgggaactaaacaaccccttagccactggcatgtggagctcacgtgagttccacttaccacatctgtcaaaaccggtcactatactgccgagtaaccaaacttgatatagtattgtgagttagagaatatgctacatatagtatttcggttcagaaatgagtttttagaatcgacgataaattaaggtaactaaaacaaagtgttcctcagtgaaatcatatcatatgtgggtaaaagaggaagaaaaatcacaccagcactgaaacccaatctacccccatccaaaacagcgactcgatcagccgtcgccgctcacccactccgacatgggcctcaacccctccaagcgcgtggacgccgcgctccggggcgcgccggcgttcgccgccgcttgcgacgacgccttcggccgctgcctcgccgacgcccagtacgccttcgccggcgtccgcccctaccagctcgccgacgcgtccgcgcacctccactcgtcgctccggggctccctcccgctcgtccgccgctgggtgccctcgccgccgccgcgcgcccgcgtcgactccgcgctgcgcgccgcggggctcgaggacgcggcggtgctctcgaggggccagttcagggagttcgccgccgagctgttcagggaggccgtgctcgccggcgcggcccaggcggctctcgtccgcgccccggcaggcgccgccgggctcgtcggtgttggcctcgcgacccgcgccggggccggggtggtagggaggttggtcgccatctacaccgccggcgttgcggctgctgtttacctcagcttgggctaggtttatcccacagcctgtaaaactaccatttgtaccatgtgattttacctggaatgtcagttccttcgtagtagcaaatatccctatcagaaaattttaatacggttgaattggttgttcttgatcctgatgctttcatcgatggaaaacctcatcaaaacggactgtaatcggtgacggatgaaattgaatcagcaatatgccactgcagaattgatgctgtcacgtaacatcctgcataggcatttccccagtgaattcagcaattagattcggtattcggcaagacagcatcttaaatcttaatgcatttctcgtttctataccaagcagcaaatctgaactctgaattctgcagaccagtgtaatgtggatccctatatgggccgtctgaagcagagacattcttagtccgatgggcctagcggcctatcctctcttcggctctttgcaagtgctaatatgcacgggtcatttttccttttttgggataatgaaatgcccgagtcttagaaaaccaatctgatttgtttggcaacttcgttttcaccaaatcaccatgtgcaacacactgcagagatcacctgaaacattaacccacacagttacagttagcgggcaggcaaaggcaacacgcaccgagccttctccctgttacgccattcgtccggtccattaccctgttgtaacacactaacacctggacgagacgagagctttgtctgggctttcctgtacctgtccgcatgtacattatctatccctatcatggtacgcgccgcgcccgcgcctgcccaaaccaaatgaggtaaggaaggcatatcgcatcgtaatattataccgccacagatgggatgatctggagttgcctgccttgccctcacgcacgtacgcgcgccgagacaaggcaggccgagttggagaatatccctacctccagcgattccgctgtagcgtagcgcggttggtgcgcgcgcgggcggggggccgcgccgtcacatggccgtcgtaacgcaacgtctcccaactcatcgcgcacacagaggcagccaggcagcgtacgttggcgttggggtctccctcctccggtcgtctgacgccaccgcggcggcacatggttaaggccatcaggcagagcctcctctccatcctccggtgatttaattagtcgtcctcggcagatatgctagcgcttgcgaacgcaatttcctcacgcttttatctgttagtggcagatgcttccgactactatcattgaatgtttcacgggtttggacagaagaataatcggctagccatctttcgatgttgtgctgtgctgttgctaattgctgccgattctgccatgctctgtcgccgcctcacgaattcgatactccatgtattccacaggtgtacatttgttcccttcatcaagcttcagctgcagaatatccaaaatttcagggcctctctaagctctcttcctgatacgggcagtaactgcggtgggcgtggcatagtgggcgcgtgtggcctccacgagcagtgcacggttgaaatggtaagaactaagaatcttcaggtagcccccgaggtaagcgaggcaggcaacgtgaaaaactgaaaaggcaacgaaatgctcttcgcttggccttttccgtcgcagttctggcggtgatcttcttttgctcaccctggtggatgtgttctgtgctctgttggctatcatcttccaggcttttctttagcttttatcttcagttcaagaattccagtccatctggacggatggatgagaacgggtgtggacgcaaacactgtcccgtaatgtagctttcccactttattaccaaacgtttcctgtgatatatgattgctgcatccttggttagagaagagaattattgaggtgtcaacttcgggagtgtgccagctaattcagaattcatatcgtttgactaacggcattgattttctctgccaagtaacacgagactatcattcatggcactgcattttaattaggattgttctaccatctttctcatgtgctgtgcgagtgccacactggcaccgtggctgtacgatcagtaatatctgcgagaatgtccatcaactgatcacaacgagaaaaatggagaaccctcttcttttttgcgtatgctgtgctcttcttacgtagtacaatcaactagtgatgaccagatttttttagatacgtaatggaataactagtgacgaccagatgacgtggccagtgaaagtagcatgctgcatctcctccatgaactacactggctcctatattttaggggaagtgacgttaaactcgttcacggaaagatcacaaggaatcaaagatgcaggttcagagaaggagagacaaaccgctcgatgaaacgggaaatggaatggtggagtcgagctgcaacagtatgctccaaagcctttcactttacgatttcatctttgtgctttccgtggcagtatgatggcctgctcgttgaatgtggcgaccaatcgggctcgcgcatgcatgatggtggcctacgcaaggaggacactcgtccatgaaaaccttttgtgaagaaaaaaaaatgtcggatcggtgtaatttgtcaccattaatttggcgtaagcatttccctcttcggagcgatcaaagtgatacgaccgtgctagttggtggagagacaatgacgcgattgagtgacagtaattttcagtacgcaatagccaacacgagtgcatgcatgattaatcgcgcacatgatcgcccatcgggccaattagacgggtggaagcggcttaagttaggtgcagccgtgcaggtctacctaatccatcttggtgctatgaaacggcaccatcacacactcacacacgtacatatcgggaacaaatggaaaccagtgcgacactcgaaattcatgcccatcaaggtaggtgggtgactccgtcagtattagctttttgaaaattttgcgtttgatatgtccaattcgaggtttaattcatacccgattactcgacaaagtactactggtagttcgaggtttaaagtatgactgaaaaagtgagaaggttaaagtatacaactatacccccaacgattagtttagagtaaagtttttaccataattttttccctttctttctggcacctgctctttcggggcagcaagtagagcagtccaacatcgagggtaaaaaagccccgaccgaatcaatgacgcgaagatcctgccaaagtgagctaaagattcaggccagcttccatgttgtctcacagcgtggtagtacgtagtcctacactactactgcaaaccccgcaacgtactgtaccagcacgcaagattacggccgcgcggtctgacggactcgctcgttcgagaccaaaggcaaaaaccaaatcaaaccgagccaagccaaaccaatcgaccgacctacggcaagcggcatgtgcaacctggcatctccctttaaatcccatgagctgtttctccgggccgcaataatcatccaccggggccaagccaacccagacagccatcgcttttccgccttcctccctccccgccggtggacggtggtgctcgcgcgcgcggccggcttttttttcccccacctcctcgatgtggcagctcaggcggcgttggatgtcgtagacgtacgtacgtattctcgccttgttggctttttgtctcgctcatgcgtggcggtgtacgtagaggacaagggacatgttggggggacgttgcccgttgatgggttggggtgtgcaggagaggggggtttcataatggtgtgcactcacaagcaacggccaacgggtcccccccaatctgcttgattggggtttgggtttgggtttggattggaacgtgtaagtattggctgtgcactggtttaccactgtacatacggacacatgtaacaggttgacagagtgcggacctaaagactactagagttttgggcatgcgaatgcacaagtccagtgttaatctttgaaaaccagaagttggaaaaattgtcccgcttcatgaaacggatcacataaatttcgttccttcccattcgtattgttttaagagttaaaactccctaaaactagtaatcaaatgactgatgatagaggtctccaagaaaatatggcaagaaggtgagtgtttggtggccttgcaactcctaatagcaggtacaatagcagctataagccagctgcaaatatattttaaatagataaatgaggagagagaaaggcagcgggctacagatttgtagccagttgcagcacggactccaagacgcagtgtgtgtatgacaggtgggaccagatactaatagtgtagtatgtaactattatataaatgagctattagattggttatagatgaattgaagttagtagttggctatactattaaatttgctctaattggctatctgtacatctgtttgttattctaatcaacaagtggaacgccactgcaaattgcgcctacacggattgctgccatgcatgtgcggcatccctaggtaaaccaccaccagcaccaccatggctctaactacgcacaccaaggacgctgtccacttgacgagatatatacacgctgggacagtactcgatcgggagtgattcgatcagagggaggggagagaggcaagcaacactagcatcctctgacctgccaaactgtcccccgcggctcacatttcttggccatttcttaccttccaagcaccaccaatcttgtccgaggcgagcaagcttagccggtgcttctcagagctaagccaaatcgcgtgccaaatccaagaaaggcacgggaggaagaggaagaagaaggaggggaagaagagcagtcagggcagggggatcagtggcaggctgacacgccaatgggggcagcttcttgttcttcttcttcggcgaagcatctgttcctgctctgcctcctcctcggcttctgcttcgcgttcgcggcgagccagcaggagcagcagcagtcggactcgtgcagtagcgccggcgtcgcggtcgctcatctcgtccccttcaactcctccgccttccgctgcctgaccgtctggaagcaggaggacttcgtcctgcgggtatgtatgctgctgaattttgcagtcctatcaattcttggagttttactgcatactgtaccaattttcatctcggtgatttgtttagtttagatgccattgccaatgcacgcgtgcagtgtgcaaactagccagatatggctggaaaatggaagcttggtagttaaattgattagagtggagtaaatactgcaattagttaaacgagtgttgcttggatgatctggtttggtcctataatgatgaactagcactgtggcagtgtactaattaagcactgatgcttcatgcttggagtatgttcttgcgatagtttgggaggaacaaaatttggtagcatcaatgcaagtagtgtgcatcatagataaaccatcacattttgcatcaaggagtaattaaccgtaagctgaagtgatctgattcaaactgctcgtgtcaccgcagtacaagaacaccggagagagccaatggagcttcatcctctcggcgccggacaagggctcgtacgtggcggtggggttctccggcaaggggctgatggtcggtagcagcgccgtcgtcgcgtggtcgtcgggcgggaagggcacggtgaagcagtactacctcaccggcaagagccccgacgagtgctacccggacaagggccgcctcacgctggtcaagaacaaggccgtcgccgtgtcgcgctccggccggctctacctcgccttccagctcagcaccgacctcccgcagccgcacctgatctacgccgtcggccccgagggcaacctgccgccctccgacgccaccctcccgatgcaccggagcatgcactcccacgccttcaactacacctccggtacaaaatgcttgcacgcatttcgacaaacagatggagcagagggattttgtttttgacctgtttcgtttttttttcagggatggcgtcgagctccggtggctcgggcggcggggggttcccgccggagaggaagcacgggctgctggcgatgatggcgtggggcgtgctgatgccgctcggcatgatggcggcgcgctacttccggcgggtggacccgtactggttctacgcccacatggccatccaggccgtcgcgttcaccgtcggcatcgcgtcggtcgtcctcggcttccgcctcaacgaggacgggctcaagaacgtcgacgtgcaccgggcgctcggcatcgccatcctggccatggcctcgctgcaggtaaattaacttggtctctgaacatgggggagaactagaataattgcagctgagttgaaaaaaaaatgctcaatgatttgcacatgcgccgcaaggccatcatcgatttttctagccatgagtgagtaagttgactgtgaatgatagaattgctaaccaagctacgggaagctcagaatcactctagagaatctgagtactagtaaacgaagactgcaacgtcagctgcatgttctttgagccaactagttccatttctccatgtatccgtcatagccgaattgtttgataaccttatgggaaactattctaaacagttattcaaatactcaaatagctattgtaaacagtttatatgtcactcaaatagttatgaaaacaacgaggacatgttcccttgaaaacaacgaggccgagctcagcagcgcgagcttgtaacccgagcgggggcattaaggtggtgtggacgttgccgtatggctgcgcgcctgggttggcagtgccatagatggcccgcccgttccaagttgcgtagttgggccggcggggcttgggcgaaagctctgggcctcacggttcctagagtggcaggcattgcgtgaggctggcttcataaaatccactctctacccttattcgtggtttgattgatgaattacatgggcaacgcaggtgatggcgttcctggcgcggccggacaagacgtccaaggtgaggcggttctggaactggtaccaccactacatcgggcgggcggcgatcctggtggccatcggcaacatcttcctcggcctgcacatcgcgcaggaggtcagcgcctacatcgtctcctacggcgtcttcgtcgccgtctgggtcatcgccgtcgccgcgttcgagatgaaccgctgctactccgacgacgactgacccgtccctccgtccgtccgtccatctccgatccattctcgatcgatcacggcgatgatgcgtcgtcctcagtctacagaggaacagggactaatgggcacaccgcgttcacgacaagtgatgacacggcatacagcaaaacacagcgattattattcttttttcctagctctcacacggttgttgggttggacagcgcattttgagaggagtgtgtttaattggttgattattattgaattcttttgtcttttggggtataggaggatacgaggccggggctggactgctgtttctttgcctagctggacgctccggtctggttcgtgtttgtacattggtgcatggtgtcgttggcgtggttgttgtaccgttgtggttggtagttcgttcacgtttcccttcccctgtgtattgatcaattaatggcatcatttgctgattcagctacaaagcttctcccgcctagcttcatgtgtgttggacgattttcttcgcggtttggaagttgaaacaacagcagcatgtatcagtgaaggcgacttctatatcattctattcctgcagcagaagcagcagcaatgcagtagtgagccacaggttcccaaaactggcgttaactggcctaaaagcccatgaattcaaagctaaaattaaaattctgaacctttccccgggttaccggatatcaccaggactaaataattccaggtaaaaccggtaccaaaaacaattgtagctagggaagcaggaagagggacttgtcgacatacctgatgtccacaagagaacaaggtcagatattgagacaggcgcgattgcatatgacgtgaacatactccatggcaccggtgaattactcagttttgcctcatcagttctacaacttacaactgaatgggatctacattctacaggctgcaggcatctaagtgcttcatagatagtctgaaattttacctagatactgcgctagcctatgcatgagtcactcagatacaacatgttattattactgacaaccgccatgagcctatgccaactcacggctcactcctcagagcgtggctttcagatgcgccggcgttctgtgcatgggatgccgccacaattcctttcatcttcagatcccctggcaagggcaacccctcctgcagaagctgctgttggaccgtgctaagatgatgatgctgctgcagatgcatctgttgctgctggtgctgggagtggatctgtagctgctgcagctgctgggctgccagaagagattgtatgtgactgcgctggtaaccttgtggattggcgcctccaaatgaggagaggccaaagtttcccactttgccgcagttggcattaacctgacctgttgcaacctttagctgctgaatctcatctcttagcctgtcatttagtgctacatgcaaacaaggaacagttacaatcctaaagatgattggaaaaacactgtaggagagtttttgtgacacctacaaaatagtaataaatgatctgaagcctatcaaagatgatatcctaagtcataatttgcattaactaatgcttactttcttcatacaacttatatcttgttttatgattttttgttacgtctctaccatagacaaaaggttaataactcagcaaaaggggtagagaaaacaataatatcacttcgatcactaggtgatgaaaaagaaaatatcaggagaaaattgaagataatatcacactatattattccaacgaagacgcaagagaataaagagaaaagaaaacaatacttaataggctcaagtaatttccagttatatatactataaattagtgtgtcatgaagacacttcatttttttttctcaaaatatatggcaattcgattagaattactgcgatgatatgaaaaccttaccatcctgcagcctgacttgttgctccattgtttgcacccgtattttcaaatcactattttcacttgttaaaccagtggtatctctctgtattattcaggtagagataatcaaggatagactcgtggaaaactgaaaagtaagttccttcaaaaactacataatctgcaatatgttaacagtatcaacctgtaggatacaaaaggtgtatttgcagctggaaaaaataaatcagatgttaacatcctaactaccataaatggttactgctcagatagaggaaacagggtcggggtggcctgtgggtcctttcacaacccatctcaacccttaaatatttttagcacaaaaaaattctaaatttcagcccaaacctttttggacccaaccctcacattttgtaggtcaaaatgatgggcccattaccacccctaggtatgggttgtcggaatttccagaacaagcagcagtgcagcactttgtcaaatagcttcacttgatatacaaccagcatgaaatttagaataacctacaagtttagtaaccttatactaacacagataataggaagcctgccaggtaaaaaatgccaagttaaaagcataggcatgtacctaaataaacattttcatggggctgaggcatttgtctagtagagtagaaccaactgctaaacattggtgtagagtgtctaaatcatggatgcacaaagtatgagataaggtaaagccaaaataaagtacctgtaacatggacaactgtgctgatagtgtagttgcttctgtctggagagtctgtacttttctctcaagctctgcaatgtagcgcatctttctttcttttgacctagcagctgactggcggtttgccaagatcctaaaatgtttcaaaggagtaaaagaattaactgaagtcaaaacccaaaaggcacacaaaaccaatttgtaagtgagacaaaataatcggtaaaaccaaataacctcagtcaaacacagtctagatagctgtggaaaattggacttatgaattatttgaaaacacaaactgacatacagttaaaaaaaagttgagctaaattactgctgataaaaggggctaaattacagttaaatccatataatatatagggcccctctaagtaggggaacgcagactaaaacaaatatataattgtcaacatcacatattccaactgaagatattctccaatgtgctagtgaattaagaaccatctataaggggcaagggctattcggttatatgatgagcacaccaacatcaccataagcacttatttgcatatcacaccttagatgtgagattaacaacacaaatgacggtccttttcagctttgttaaatattaactactactgtacactataccaaacctgctcagaaccaaatttcccttcatcaatgatagatagagacaggcttagtagttagtgctatactctgttttatcaatagttcaaatgtagcagtatagcatgatttccaatgtatgattcccccacgttaaaaatcataaaatcacggattccacaactttcttactgttcacacacttaatcttgtgacttcgtaggtttgctttcgtcagaatcacgaacacgctaagtcagttaatctgtccctatcaaacgccgcaatgataccctattccccaattcttaccgtccaaaaataccacaaaggtgacaagcattcaagcaagcgaaactaaggggttctcacttctcaggccagtctctctcacctcttggcgcgcttggggtcaacgagggcgagctccgcgagcttggcgtcagagatggccttcttagcgtccgcgcccatcctccccgccacacccgcggcggacgacgccagggacgtggacccgtccatcgacatgctgtgctggtgacgcggccgagcgggcggcggcggcagcggcgccgcgggctccggggtctcgagcttgcccccggcctcgaggaacatctcgaacatccggctgccgcccgccccctccatctcctcctcctcgtcatcctcctcctcctcctcgtagtcgtccccgccgccgccgccgacctccccgaccacgccgaggtcggcgtcgaaggcgatgtcgtccgggagcgccgccccgaggaggatctccgactgcgcgcgccggtgcctcgccgcccgccgcggcggcgagtccggcatcgcggcgacgtcgcgcgacgacagcgacgacgactccgcggcggaggcggccgggtccattggggggacgggagatctgccaccggggagggtaatgcgggagcggaggcgggcgggggcggaggcggaggcggcggaggaggcgaggcgagggtaggcggggctagcggcggatggggcggggagacacggagaacggagaggaggaagacatgctctcgttgagctttgaccgagccattgactctccggagaaaaggagaagaggatgcgacgtggggcatgagtggccgcgccgttgggtggtgggcctctgatagtagggcccagtaacctggacttggtgggcttgagacctccgaatattctggactctgccatggagctctccctagcttatcatggggaaccgggaactgggccagggatgaacatttcacagaatttgcgattaattgttgtgcatactatatggaagaataagttcactttgactcccttcaaagttacccgaatctaatccgtgaccctcaaccgtaaaaccggataggacgactccccgaaatattaaaactggtgtaatttgactctctcggtggttttgaagggcagtttcgctgacgtgacgcatacgtggcggtattgacctagtcttctttccgcgtggcgttgacatggcagttatgtagcactcgaattaaaaaatatgtcactcattttttcattaaaaaataatatgacacccacgtgtcatcctccctcttccatcattcctcctccctttctccgttctctctctctctcctcacgccggcgtcatggagcccgactccccgtcgtcggcacctccacctcgccaccgtcggctgccgccaccaccggtcgcggcgtccacctccctgccccccatgtgggggcacctttgcccctcgccgctgcagtagctcggaggcagcgccgcttgggagaagaaggtgcgggcctctgcgggcgtcaggcgctataccccgcgcgtagaagtcgcggcggtgatgaagtccgcttttgctgctcgggatctgctgctatttgcttattgcttgatgaagccttgataagggcgaacgagcttctggttgctagctcaacccgacaacaagctgctgctgcttgtttgcttgagcatgaactgaacaaaaagaaggtttgctgtgctgttgcttctaccacttggcgtaggaataaccgaagaagagtagaaggtccacctcgccaccgccggcgccctcccggcgtcgtccttcccaacctctccttcacggatccacgccggggacctcctccgcccccagtcctctcggcgcggtggccgaacgggcggcgccgcacttggccatcttctgctcgagctagagcagctcggcggccagattctccgccgagggctcgccgaacccctcgtccaacgcagcggtggcggtggcggtcggcctccaccaccgcatccgttcgcaccgcgcgcacggccaactccatgcctggggcctggccacacccctcgacgccggtcatgagacgcgcgcacggtcgttcggggaggacgacgctgggagagcgctgacggtggcgaggtggaggcgccgacgacggggagtcgaggagacggggatccatgacataggcatgaggagagagagagaagggagagagggacgaggaaggagggaagagagaggatgacacgtgggccccatataccggtgggtcccacatttttttaatgaaaaaatgggtgacatattttttttaattcgagtgacacgtaaccgccatgtcagcgccacttggaaggaagaccaggtccataccgccacgtatgcgtcacgtcagcgaaaccatactccaaaaccgctgagggagtcaaattgtaccggttttaatagttcagggagtcgtcctatccggttttacggttgagggtcacggattagattcaggtcacttttaagggagtcaaagtggacttattccttatatggaggctttgggcacccacattactattttttcccctcgatgtcttgtttggattgtagccactctcaaccttatcaaaatattggcaggcaaaaaattggtataagttggttgttttgtttgatgtaaaaattttggtaaagttagttcaaaggttttctatccttaacaaaatactggcatcccatatttttcggtaacaaaccaaatagcctatgggtactttgctattactaacattttttttgtatgattgagatttgagaatagcgttgaaccaaaacataccccgtaatgtcaacaatgaatttggtatggataagatttaagaatagcattgaacgaaacacacccgtactgtaggctactttcgtacgacaagggtgtagcgatagccatttaattcaaaaagatacgcatccaataaaattacctgatctcaatagaggccgagtttaggtccaaactttttcttcaaactttcaacttttccatcacatcaaaattttcctacacacataaactttcgacttttccgtcacatcgttccaatttcaaccaaacttccaattttgacgtgaactaaacacacccagaactatggtaggaaagcaccaaacacaaacaaaaacaaagggggcaaaacaatgcatacactgtgcctcatttaagagaaccgcagagggtaaatcttggcttcccattccaatattccatcatattaggctaaacagctatagattacaaaacatgccagagtttgaaggtgacactgctgtagaaggaaaccatgtcccatggcagtatggtacatgttccaaccggctgatttggagaacggttggaaggtcaacaatctagagtactagacggaacatgctgaaaggaacagattagatcaaggaccagaggagctacacaatgaacgaacagaacaaggctggcatttttattttagctgtctattctaaagagctcttgagactactgaggatatatgttcattcactatcactagttcactactgcataggtacagttggcctggggagcattgagttgactagctcctcgtttatcttcactggtagcggtggcatctgcttcatgatatctggagcatcatttatcctgcaagatcaacgttgcatgagaagcagaactaaattttttagagctgtcaaacgttgcataatatccggagcatcatttatctgtgtatgcttcccataagtaagatcttaatagatttgactgtcctgtaacatggattaccagaaaaatctacagaaaatatccaagatccatctactgataaattttcagtcagaaaatgaatgaaagaatgcctgatgggaactgcaaagaggatcatcgttccaaattttgatg

SEQ ID NO: 26945 - DNA, 6097 bp, Oryza sativa
aaaaagataaactaccaagtgatgagtaaaactggaaagatatggtagatgtaatgataaaatgaaagaaaaatagcatgatcctgaaatatattgatgaggcagtatcaccaggggtcatcttgaaataaacacacaatacctgcatagtgctgaggttggttgaatttgactcaaaacttgggcattagtttcaaggatttctcctgttggacctccaattgctgcaaaaagggggaaaaaaagaagtaatgaattcagcaacctgtcgacagtcccggacataaaatttggtgcacttgacttcagcagtcaaatcatggtccatacaagtcccaaatgatacacgagaaagaactttgcataacacgcgcatttcttcattgcacatgtaactggaccaatgaaaaggttcaataaaacatatgaaactaactgcgaattagttcagtcaatatcaattgtgatttacctttggaagaaatttcatcatcgtcaatgggcagagctggaagggggtacggaggaacattaggccttccagctatatgaacaggtggtttcaacgaagaatctgaaaccttctcctgcagcaataaatgtctgtcagtgtaaaacttgtgaatatagcatgcattagctacacacacatcaaggaactttttctcttggtgaatcgtcacaacgcatgagtaaaataagttgaaaacaagtgctttcacataaatataataaaaaaacatgttcatttcctgccagctgcagaaaaataaaaagtaacagaaaacggttccactttaaagtgcataaatgtaaaatctcaaaaataaagtgcgacacaattataagtatcaagtgcaggcattaatatgaaattttaaattctctcatgcatacaaaataaatgccacatttattggattttttttggggggggggggggggtatagatcaatatagcaaggtccaagctggagctacagaatagcgatatacacttgaaatacgatggctcttgcaaatgccatcttgaagcttaaatacatggcataacttacagctcgaacgatgaaaccatattgcgaattttacattagtacatatgaatgccctacctcttactctacacagttgccaaagcaaagtaataaagttgcaccggaagaaaccattcattaaaaaaaaaaaatcgaccagtgggggaaagaccgctcccacggcattgcactaagaagaagctcttccttgcccggtcgagaaaagaccccaaaggccggttgcctggatgcgccacagggtgctcagggcatattggcctcatacatttcactgaaggcaaccacaatggttacgggtggaacacggaaaagctgacgagggctcttttttttttgtgcaaatcctgggttcgagcccaggaccagcggcttctcaagtggaagcactaccgccaagctaacagcttgtttgcaaaagaacccatttatattacggacaatatggttgaaacagattaaattcacagatgcttttgtggtgcatagtaagtgctgacaatcaataagtattaaaaaaactaattgatctaatatgcttgtttttttttttttggaagagatggttctgacatcttccattaagaaatatcattacaaaatgccagataatctggaggattttcattcagtgacttttcggactatgtctaaccaggttctgttataaatgaacttattgtagcaagtcaggatcaattttcccataatgcattccaacagtcatgagaatggaggggatgggagatattagtaaaaacctttttatctttgcttttcttcgaggagctgtggtcctctttctttctctttccactttcctttttctgcacatcaaatgcataatctcaaatcattgcttggaaaaagggtaacaagaccaggcaccatgataacagagttgaaggcgcatatgctacatttattactcacattcatccatctacaacgcaaggccacgtctcgaactgttttgtctggcaacttcatggctatctttgcataacgaattacaggagcatcagatgcatacctgagagcaagcaccagagtaacatcagagcaaaaacaaaggccctcaaagctaaacaatccatgacgccccctcacaatgttgttttcggtgctactgtcattttgatggcaacaagacgtgtcggtgccatgtggattctacccattatgcaacgaccgagcattcacataatataccgtacaacaaaatagagcaagtcacataatatgctgggaatagaggacgaaaaaaaatagtctctcaacattgctacattatccacttgtctaaacaaatgctactggtagcttttacagggcagaaaaaaatgacatgcaaaattaagaaatattacataattgaaaccctaaatggagccgtcgtacagttacaatcttaattacccgacataatccaagcaattgtatccaaaactcggaaaatcagtacccatacgcaccccctaatccgaattgccaaacccccaaatctgcatgacgcagcgaagcacgcgacttacttgacgagcaactcgtcgagggtggactgctcttccggcgaccactcccgcgccaggccggggtcgtgccggagcgccgccaccgtgccgccggggctagggtttgctccccctcctccaccatctcctcctccgccgccgccactggaatgggacccgttctgcgcggcggcgctcgccggcggcgggtggccgttcgcgcccatgccgaccaaactgggcgcgaattttcttgctcccttcgggaagcggctcgctgcttctgcgctccgagcgccgggagagcccctctcttctctttcccgctacgagtggatggggaataaaaaagaagttttttttctttttctttttggggatcttttcgatcgatttggggatttttgttacacttgttcgcaagccgaggcgggtttctctctctctctctttaggggatttttattagtttgctctgaattgacctttttttttctccctgtggatgcttaatttgtgttttatttttaaccttcttttcatattatctaaacaacaaaccataatatctatcttgaaaataaacttcgaatgtcacttcctatgacggttgatactagtgtgaccgtgtagagctttttttttttaaggcaaggcaccacagacctacgatctagatagattctataattcagttacaccttcgaagttgcacagaggttcctacaaagaaatagtattacacattaacccctgaaagtagcaaaaaggatctcgtaaaaatatagaggaaagattgattatcatatcaaggactatagtgtatctagatttctatatatttttctcaagctatatggttagagttctattaagattgagggaaacattttattactatcaacaaatgttggaaagaaaatattcaaattacaatgatttatatggcttcccgctcttcattgcattatcctggtcctgaggacctcggctacgacaatatataggtgaaccagtgtcaaaattgaacaaatccaccatgatcgagtttttttttgccattcattcgtgatgacattgatcagctcctccaccatttgagcgttggattggagatattggcattgcgtttctgccaaattaaccacgagactatgcatgattactcatgcatagaaacgacgttggtctcgcttcgccactatacgtggcatacttgtaaccacacagtccttgaaatcctcgctagtgggagcgagttgccatggcaagtatgggtcctcgccgccggtcaaaccttcgttgagaaggagcatgatatgggcatatgttcacaaaattttatttcaacggagcaagtagccacaccggattgtgttaccaaccccttgtttacatgttattgccgttagacgggttcatcttattgctaaaaatatcaaaaactgacatcggcctgactgtgttaacccctattttatcgtatgttttttttaccgtgtattaatatgttcaaatctttcagatttaaaaacatagacaagaaggcttatttgaaaagggaaaaaaatgggttgaaaataaaatttatgaacagcgaacgatgttaagggaaaagggtctacaaagtggtgtctaggctagagtaaagaaatatggtaaatatggagtaaagatatatggtaaagaggatccaaacttcggttagaagtgagcctaaaccgatattcacctaattaatagttttattatcacttttacctagaattgtctaggctagttctttcctttttattggagcggctgaagcgttacacatggaaaatattaggaaattcaggctaaaccgatacacagcagcaaggtgaagaaaacataacgaacatgatagattagtaagcgtacgtgagatgacatccaagattaactcccaaaagctcaaatgctaatttagactatgcattggtttaaccgcacgttatactataagcactagtaatatgtccttacagcgttgtaacatttttaataagatattaaaatttgatggcagtgaaaataattttcctaaaatccgtccatttaagctttcattccattcatgtcatatataaaaaataatatgatatggccttaaaaatatttattcaagacaatcaacaattacatctaatcaattcaatatacactatacaaggacaatttatatccatgcaacaaagaatggttgagttattcctcgagaagtcaatatagacaaatatgaaacttttttggtaggtatgcaccattaacgattcaactggttactgcaaaaaccattttaaaactattgacttctggtaaattatggttgaattttgttaaaaatttaaagtcagtttgaaatttacaaatttgacacaaaaaacaaaaccatttgaatacaggacagtttgaaatttacaaatttaaagtcaatttgaaattttacaaatttaaagccatttgagtacaagacggaatggatcgatggtcccttccctgttttttctagaagcggataataatcatattttacatttgatcgatgacgtaaacactatttctggctagtaagttgatgctgcggattcgatcacacccaacaattcggttcgatctttcaaaatttttcatcatctaaatctacacatcaagtagctaggcgacacattgccctgtgagagcggtatgtacgcttcaagcccctgcatatatgacaacatataagtagacctacgtggccatgtcagaacagacgcatgaagcgatgaagatgcataccgtcggcgcccgatacgcccgggtcaaaccgcagctagctaagctagctggagtagctcgctcggagaggaggctgggtcggcaagaaactccaagcactggtggagaagtgctttttagtcccggttcgtaaccccctatagtcccggtttttaaaccgggactaccaatccgggactaaagatcgctatctttagtcccgggtgaaaaaaccgggactaaagatcgatctttagtcccggttgaaaaaaccgggactaaagatttagtcccggttggtgtcatcaaccgggactaaagagagggtagcggcagtccatcagctagtcattttttcttttttattttctcccgaatcgagtggtatgcatatcatcaaatcaaaccccaaatccacatcacaactccacagcacgattcacagattcaccacaaattcattcacaatatccattcacatattcattcacaacatcacaaatatattcacaatattgattcaaaggttcattgacaacatcgagtcacatactcattcacaacatcacagattcattcacaatatcgatttatagattcattcacagatcaaaacatccaaaccacaaattaaaaaaaatcaaaaaaaaatcgactcactggccggcctcccatcccgccgtcggccggccacccatctcgccgcttcccctccggccggatctgggggaggggagggcgagg

SEQ ID NO: 26946 - DNA, 9393 bp, Oryza sativa
atctttagtcccggttgataatatcaaccgggactaaagatcctatctttagtcccggttggtgttatcaaccgggactaaagatatcggggggcctgacaaggcctgacagatttagaaccgggactaaagatcatttttagtcccggttggtaacaccaaccgagactaaagatcaaatatgcccgctgtagccaccaaccgggactaaagatcatctttagtcccggtttttagtggaaccgagactattgtggatttcgggcgaccgaccaaagatggtttctccaccagtgaagagtccattgcatatggctctcgactcgtgtcgagcacacatggctgatggctcccacgtacgcacccgcgactctcgtcgttccggcgtgccggcgatagctagcttccagtacctgctactgctacaccgatcgatatgatcctcaaccatgaaaacacttgacacgcttcactccgcaatgcgcgcgcagggatgtaaaaaaagctcgaggctcgcaaacagctcgagtttggcttgtcctaggctcgattcaagctcggctcgagctccaaacgagccaaactcgagcctgagcaaaagctcgcgagctttaccgagtctggacgagcttgactgtgtatagtttgtattgcatgttcatcttattaatatatatatatatatatattactatctatttacaaaataaattatcatgtgttagcacaatatatttattttaatcattttatactcttttattagtgtgattaactagaaaataattatacttatcaagagattattattatatatatattatactatttatagccgagctcggtaccgagctcgagctcgaacgagctcgagccgagcttgcctaaaaactcgaaggtgcaataggcttgacttgagctcggctcgagcttgtgtcgagctcgagcttgggcagtcgagctcgctcgagctcagctcgttgacagccctacgcgcgcgtcacatgtcctatcaatccacgcgcgcgcgaccgggcgatgagattgacactaggcactatctactccagccaagtacgcagcagatgtcacagccacgtgggcgacgcatggacacgggataacccatcgcgtgcgtcaagactcgagagtgcaaagcccagacgaccgtcactgagcggctgtggatgtggactggacgcgcgacggcacgacgaaagagctggatcgcaccatgcgacgccccccgtgcgggtgcggcatgaacgaatgccaagcgatccatagcctcgaaacgccggccagaaaccctgcgcaccgcggagcgtcttgtcgtttatttccacactagttcgggagacaaggtttctaactttacctcctgatacataaacaaaacaaaaaaaatactcgttctattccaaaatataagacactgtttttttaaatgtttcacaatataagacatgctgctctgctgaaaagtttggtgtgaaagaaatagacagatcttcaaaagcaaagaactttcaatactttagttagtggtaaaaatactggatgaagtgaaacttggtctgtacgtggagctaaggacattgcgagaataataccttagcaagctctgatgtagcaagatgtgttcatttttcatgttactttcctgtcacccttggtgattatgtcaagattctctcctacttaaataaaaccagctttgactggtttaggtttaaaaaaagacatacatgtaattaactagcccatctaatctactaaattattaatatttttaacttttttactctcaaaatctctaataagcatgtgtacacaacatgcggtgtgatgtcccatcccatcctgattttccgagaatgagataattccattctataaccgttattgttctttttttcttttaggaaaatggatggcacgcattcggtcacaaataattcagttcaatcttttacattaactagccaaacgcacgtgcattgtaacataatactccctccgtttcacaatgtaagactttctaacattgtccacatacatatagatgttaatgaatctaaacacatacatgtgctagaaagttttacattgtgaaacggaggaagtattaaacatagcaaaattaagtccttattgaaatatatattataattgactggttgattgaaacaaatactttttatattaaaaacaaacaaaatgtcatattgagaaaatcaaagagttacagtctagagtacatagtgactcacctaaattctaatatcatgttccacatgtcaatgatggtaatggtgaccattatctttttaattacagtgtaaaaaaaaaccaaaatcgtacccatctacctttgttctaaaatattgctatttatagcataataccgtgtcccaaaaataaagttatttctccacttattctatcatccaatcacgaccattccctttcatctatttatcttcttaactaatcacacatattctttagtcattaacatctactttgttaatgcacgtgccaactaaaaaatatctatattttagcacggagaaagtagcgtgtcattgagttgaatcacttcattaggcgacacactgctctgtgaatctggtttacgcttcgagcctgcaatggcagcagaaatagacacacgttagaaaagaccgatgagagaagacgaagggagatgcatactgtactggctatattcggcgcccgatattctactaccgtcgatcgttcggtttatagcaaaggcacaagcacaaccagctgacgctatagcacgctgcacgcccggcgggccaaaccgcagctagctggctagctagcgcgaaaaggagaggctggtcggcaagaaactccaagagtccatgcatggcttcgactcgtgtcgagcacactgcacacatggctcccatgcaggcgcggctctcgttccggcgcttcgaccaattgatcctcagccatgcaacactcgacacttcactacgcctgccttggcatgcgcgcgcatcctgtcaatgttagagcaagtttaatagttgtgctcactacttactataagtgaatgttggagctaacttatataatagattagctataaagttaactttattttttccattctctttctttctcaccctatgaatttaatgcatatttcttgtggcttgtgtgaagctgactcttgcatgagagacaacactatccacttttttttatctctctcttccacataagcatatagcttgcttatagtctattattatccttgctcttagagcatgtacaggctataagccagctgcaaacatattttaagaagataaatgaggagagaggagaggagcgggctacatatttgtagccagctatagtacggactccaagacgcagtgtatgcatgacaggtgggaccagttattaattgtgtagtatataactattgtataaatgagctattagttggctatagatgaattagagttagtagttggctatgctattaaacttgctcttacgccgcgagcggcgatgagatcgacactgtgggcgaacgcacaccaactaccgtattccgtcccgtccgtactttgcgtttgctatctccatcgcactagaactagcttctccagccaagtagtactgcctccgtcccaaaataagtaaaataagtgtagccgtacatatccgtgcccaatgtttgaccgttcgtcttattttaaaaaattatgaaaaatttaaaaatatttattcacacataaaatattattcatgttttatcatctaatagcaataaaatactaatcataaaaaaattcaaataagacgaacgttaacgttgaatgtgaatagtgtaaatctgcacttattttggttcggagggagtacgacgcagcggatgtgacgggcgcgcgtgcgcgaggcgactcagccgagcgagcgagcgagacggcgacggcggcgagagcgcgcgcggacacgggagcaatcttcgcggggccctgtagaatctagcgtacgtgtttcttcccttccccatctcgctcacgcgcgcggtcaagagtgcgaagcacgaatttttttgagaattaatattatttttatggaaaatcgcaaaagtagtggtcaaccggggaaaatcgcgaaaataggtccctgtcgaacgggtgcagttcgatagggcgcctatcgaacggccagagcgcgactggcgacgagatcggaaggctgccgttcgacaggacctgtcgaacggcccccgttcgacaggcagggctgtcgaacagcccccgttcgacaggctgggctgtcgaactgccgcagttcaacaggatgtccgtcgaactgccgcagttcgacagggtcgcgttctccatttatttgtaataagttattttttttaataatatgtaatttattttagtgtgtaagaaaggaaaatatttttgtaatgttatatgtatgtgatttagggttttgataatgtttggtcagaaattgtagtatttatttgttggttaaaatatttgaattatttagtttcattatttgtatatttgaatgataatttgtcatgattcattcgaagggtatgctactgagtaattatccgaagaagtttatgaaatagtactgatagtactaagttaatcgtaaagtgtttctcaaatagtacggacagaacataaatgactaaaagtttaatataaatagataagtcaaggacgatcagtgcccttcgcacgcttgctaggtcctcccttcttcctacgcctaatctgctcagtgggatatgtcaaattatcagggggtgcctatctctagctgcctgctgtggtgtcacgtctggcccctgaccggcctccgtctcctgcgtcggcattgtgacctgaggtgctgcgtgccagtaatccatccctacttccccctggggaggatcagtggaaaagaagtcctcaatgaatgctgtgcgaggggagtaagcaggcactccgtgatgcgtcgacgccgaaccgtactcatcgtctgtttgtacaagagggagaaaccaaaaaatatggcgtagttagtaacaatacatataattagaaactaaagcgtgttattgtttaaaatgacttacatgtgtgctgtgtgtggccctgctctggcgcacgcggagtgatatgaagtccccatgctggtgtgttcaacacgttgtcccccgttggcatgtaagggaagtgtgccgacccagatgctccctgcgaggggtgaacataaggcggagtttggaatacctgcggacgtggtggtgtcgtgctcgacgtgggtacccctgatccggctgaccccctggtgtactccggtgctggggtgtgctgaaaggaaggacgaccgtgagatgtgtgggccgcttcgtacccgcgacgtgaagaggatggaccactccgatccacgctggaacgtcggggtagtggtggtgatggccgtcggcccgacgtctgcaccacatctgccgcgctccgacaggagacacgacgtagtagtgcggcagcacgtgcacggaagttgcgaaggacactcgccacgtcgtcagacctgacgactggaggtctcgcctctagtctttgcagcagggtgtcggactccacgtgaacgtgctcaacaaattccgcctgttccacaaataatcaaggcaattaaaattatttaaccagttgcacatttattaagagtatttaacaagatacacatttgttagaaataatgaaccagttgcacatcatttataaatactgaactagttccacatttatgtaagaaaaggaactaggtgaaccaattgcacatttattagacatactgaactacttgctaactttttaaaaatattgaactagttgctcaaattccacaaataaacacgtaccattgagttataagctgatctaggctgatgggcaaacgtgtcagtaatcgctgcctggtgggggacggtgctatctccttgtggaggaaaacacctccatcgtgtaacactgcggtaccaacgaaggtaagctccataataactcccatcgtctggaggtgtctgaagtgccaagttatcagctgcgtgctcccactcttgtaccgtcggctgaaccgtggtcacaataactagctcgtaggaaagcccgagcccctttctggagtacctgcacaacaacaaattcacacatcagaaaaaatgttgtgcagtgatttattttaaaaaatgtaggattaaacaactgtgatgtgaactaacctatgaagactatcagccaaaggacgaccatctctcggagggaagtcctgatacatgcccaactgtttgagaaccctgtggacattgtgtggctcgacgtgcacgtccaccacgaggtgacaagtcgtcctccagagttgcatatctcgcgtgcaaagatccgcgagaccgtgcggtgcacgatcattgacatcgtgctgagtgtagggagtccaccgaacacggtcaggcgtaagctgatcaaagtcagctacaaactgagtgtagacacgacgtgtcgtcccgctaacccactgcggctgtaacaagtagtagttttcattagtcatataaggaaagtttgtgaactagtattcataatgataacataaacgaatttaacaaaaattacctcacggtgtgtccacaaggatcccatagtgggacgatcgtcgatgtcatcaacaccagacctgtacatctctcgcaaaccgtagtttgcgtacgagtcaagctgaggcctcccaatgtcgaagcgctcgtgcgcccacaacataagtagcaacgggcatccagggagtgaactttgcttgctgttcctcacgcaagcatcacacagtccggcatatgtcgccgcaagtaccgccgacccccaactgtactgtggaatctccgcgataggtaactctgcaatctgctccgcaaagtggatgaattgcttgtccacggagtcagcgtgagttcccgtgaacatcacccatccaaacaaccacaacaggtaagcgactaagtgccgctgcacgatccactcctcctggtcatcagggaagacatcctgtcgaaactgattcaaccaacttttcgtaggcccgtgcccatctgtgagatcctccagtgcaacaggcagcacaccaccaaaactggccagaaggtcatccgcccatccagcattcaccattgttgggccaactgctggcccagttatcggcagccccaacaaataagacacatcctgcagagtgggcaccatctctccaactgtgaggtggaaagtgtgggtctcaggcctccatctatcgacaagagcactcataagcgccgcgtcaatgtggattcgttcggaccttgcacgtgaaggctcgaccaaccgtgcaaacgtcaacaacccagctgctctcagcctacaacatgacagagcgcaagttattaatacatgaaaatataaacaccttgtattagtaaaaacaatatattttcacacaccttggaacccaacgaggatcaatacgccaatattgatccggtcctcgcatctttagcacattgcagaaagttcctgtactaagacgtcgcgatcgatggttcctatcgatctccttgtctatcagctgcccatcattttgatcagccatacctgcagatcgaaaaccacattagtacaatgcacgtatggtaacagtacaataaatgtatgcaacataattcaattaacaaatttgcatgccatttcaatttaaaattacagtaccagcacacatagatacagataagaatagttcagtacatttcaatttaaaattacaagcccacgacacatatattacgatattacaagtgcagtgcagttcgaaatttaaattacaattccaatacaaatacatgacgatattaaaagtgcagtgcagttcaaaatgaaaattacaaggccattacaaatagattcgggtaataaaagtgcaagaaagttcaaattaaaattacagacgcactaaacataaattgaacaataacgatcttcaaagtagggagtccaccaaggataatagcgaactaaggattatttttcttcttcgacttcccctttggaacgcgacgaacatcagcgcctgtggcatcttgccctacattgtacatgctgcaatctttacgggaatggttctccccgcaaagaatgcaagctttcttacgacgagaacgatctttcacttcagcttcatccataaggttcttgatcctgcgtgactggcgacgacccttagtatcaactaataaatttgagtcaggaacccaattggcttgccctggaggaggacgagtgaaatcacacacggcacgccaaccacgcaattcaccacgccaagttgcctcccacgattcttttctaaagtagggagaaacaaaaatgtttccatcaacacccccttttgcggaagcagcaagaacatgggaacatggccgatgtaacaggtaaggcttgttgcaattgcatttgcaagcgtgatactctggccacaacgtgcattccaatgtgatgtcagtagtcccaatgccgacaccactcttgtcacgaagtcgtatctcaaataacaactctctattcccagcaggccacactctgtggattcctcccttcttacttttctcatccatgtactgtgtaatagcggggctatacttaacactgggtttgctgaggttcagactagccatggaataccttttacagagatacttctgtgtacccctcgtgatgccctccaggatagcaacaagtggtagaggtcgtgtattcttcataacccaattatacacttcagcaagatttgttgtcatcacaccatacctcgatccatctgtatcgtacaacaacgaccatttctcccttggctcaaattctacccactccgtgaagcacttcgtggcccttccacgcttcctgcgccgagtaatacttggtgcttcattaggaatgggttcaagtccctccggctcctcctatctggcaactatgggttttttcctaacctcttccatgtgtgtagtggtcaaacgatccagttgctcccatatggcatcaaactttctttgttgattctgcttgcataacttcttgaacaggtccatcaatctcttactcctgaattgtctataaaaattagccccaaaatgtcgcatgcaccatctgctatgtaaatctggccatggcacggactgtgtgacatcttcttgaagcttctgtatcgctgatagcaaaccggcgtgtcggtcatgcagaacacacacatttggtctgttttcaacaacacacattttaatgtgccgcaaaaaccata

SEQ ID NO: 26947 - DNA, 10313 bp, Oryza sativa
  unsure (1)..(10313): unsure at all n locations
ctgtacttgcgtgtcatgaaagtgccatcaacacagagcaaaggaatgcaatttttaaaggcctctatcatgcacccaaatgaccagaaagcccgacgaagaacattctccccatattcattcacctcatcgagaatagccatgtgtgtgcccgggtttcttgcctgcatcacctccaatagtgggggaagattgtgataagaatcctcataagttccaaacctcatctccaatgctttctgttttgccctccaagccttgtcgtacgatatctcatatccgtactctttctcaacgtcatgcattatggtgaaaggggacaaagatgtttttctaaccacctttgaatataccatttgtgccacaaatgccgctgtcaggtttctgtgcaccagacgggtattctccaacaaacacgtatgttgctcaaccctcgaagctacccataaagtgtcatgttgtggcttgtaaccatgcactctccaaggacatccaccctgtatgcacttcacgtcatacgtcgtcctatttgaaaccttcaccctgaactcacgcttctggacaaatgcccacctcttcaccgcatcttgtaagtgacctttgtcatgaaacatctgtccaactttcacctgcttactatcataacaccagtgggcatctaaaccatcgtttaccttcatacgactcattgatatggtcgtccaattatcgggtatgtaagtttcgttgtcccacaatgttgtatcttctccttccactacaagcgcaatgtattcctcgttttccacttccatctgatccactaccgcctcattgtcctccgctgcatcaacagcataggcgaatccggttttcatcgtccgagtcgttggcctcacgattagtaccacgaacaatgacctctccttgtgtattaccctctactacttcttcccctcgaccttgctcagtccgccaaacattttcagcttgtccaccttccaacggagtttcttccaccacggcatgacttgactcccccgatcgatcaacacattttgtcttctgcaccactattgccaggctatagcctttctcccttactttactaacaaacttcctccaactcccagttgacgcaacctccactactctccactgccatccatgttgacccctcactggccacacggcatttatgacaaatttatcgtgcactggatctaccccaaacatattatacaaccaccctaacacgtcgttcaaacccatatgctccggtgcattcagactagtatcatggaaggcatatacagtcaaatccaccccgctatcacatatttgtataggagcatcgccataatacagacgaatgggcatatcacctgacatcctgataaaacatgacaaatagtctcacgtttaatcatttaatcattcgataattaccctattacaacttatactacattgccgtgtactaatttacaactattagtaacaaacaactagtttaataatccaaataaaatataacacctttgtacatattttaacacacaacatatcaataatatgtactaactaagaactaatttaaccgtacaattacttaaatacctctaccaacatttagcaataacaaatatgtgctaaccatacatactaacatcgaacaatgcgaaacaattaacaactcttaaaccaattttttattaaactttcatatgcattgtacttagggattactaatgtataccttaacttcactgctggagggcgtcgccaaccctttcctcccggccggcgcctcctctccggcctgctatcccctcccctcgctccctccggcgctcacggcgacgatgtggcgactctcgacggcggctggcgatgtggtcctcaaataaatcgaacaagcatcgcgagctggggagacggggctttaaaccggcctgtcgaacgcccattgttcgacagggtcggtggagggacctgtcgaacgcccccggttcgacaggcctggcggcgcggggtggtgggccctgtcgaactccctccgttcgacaggccagcgtgtcgaacgccagccgttcgacagggctctgtcgactgcccgtcgttcgataggtgccctatcgaattgcacccgttcgacagggacctactttcgcgattttccccggttggccactacttttgcgattttccataaaaataatattaatcctaaaaaaattcgcgaagcacaggcggccgtcaccgagcggccgtcgatgtggactggacgcgcggcggcacgaaataactggatcgcacggcacaaacgaatgccaagcgaatcatgcacagccgcagaaccgcgcactggatcgcaggagctagcgaatttttttcttcttcgaaacacaatttgacaaacctctaatttattaatccagtatacataagttcagtgggaagaggatgcgcggcgactccgatttgtcaaacatgtggcattaggtgcgtagacaggtgatacaatcaaaagcttttatcgcaaaaaagaaatctgaaaaaaaagaaatcaacgcatcaacgcatccctctcgcaaccatccacgactgacctaccaagttgcatcaaatttaaacactcatcaagattcacgcactaaccccacaaattttaatcactcacgatacggtcgcgtcaacttattatttccgctcctctcttgcggtgagttcacgccatccccctccattttccccaaagcaaacgagattagagaaaaaaaagagaggattaatcggtgacaagaggttttcaaaccaaaaaaatcggtgacaagaaaaacgaagaatctgctgctgcgccgcctggaataaaaggcgcacagggctttgggagtttgggaatttctgagccaaggaatctcctcctcttctctctccttcgtgcttctccagtctccacctccctgggcgctgttgccccttccaaatctgcgccaactgcgccaccgtatcccggttttttttcccccgcttcttgtcgctgcgcccaatcaggaggcgaggctgctggcctcgtttcctccgcgcgagggttggggctttccgcgccgcgaccaagaaacggttcccggagcaggagcttggaggcttccgcgtggtctggtgattgagctcgggacgacgggaggtgtagttctgcgcgtcattgccgggctcaaggttggatacttggatttggtgcggatgttcctgtttgctactggttttggggacttttgaggtgggtggtggcgtcagatttgatcgcctttggtgcgtttctctggatcatttgttttgaaattcgctcttgatgctttaagccgctacctttcctgacctttcactccaaaggtttgaccttttgagttcctgtgctgattgttcaacaggtgatcgatccaccagtcctggggagtaggcctaatccctctatgaacaatacgatcggaaaagcagtctcctgttcagatgctgcccattaaactagtcccagtgttgtacaaagattctgtcttttggcagaatacagtgatcccctctgcttcttgtccagggcagaatacagttgctccaactcgatgttggtattgtaggagtggataagtcgtaaggatctttaaactgcacgagtggagcaaagccatggatatgcctacgccatccaaccgtgctggctgcaatggcaacaccggcggtactatgggcccttcagatgatccttatggtgcagcagccatgaaccttgattgttactcggagatttacagcccttcggtggccgaccaactattctcgctgctaaatgatccagctgcacaccggatgtttgctatgtggccatccatgggatcatcgccgtgtgctgctggtacgagtgaagatatgccgctcgatgcatattctggcctaggggaggcagtggaagaaccttctcaaataatgtcagtgaatccaactgaagcagagaaaacgggcaagagttcaggcgagcttggttcggacgatggtgcccatcaagggagtagcatggttccaaggtctgttgtgggcagttcacttgctgacaggatgctcatggctttgtccttgttcagggaatcattgggcagcggtgctcttgcccaagtctggatgcctgttgagcaggagggtcatgttgtgctgagtacatgtgagcaaccttttctactcgaccaggttcttgcagggtatcgagaagtatccaggcactttgtgttttcagcgaaggaggagcctggtctacagccagggcttccagggagggtcttcatctctggggtgccagaatggacctcaagtgtcctctactataataggccagagtatttgaggatggagcatgctctccatcacgagatacgtgggtcacttgcaatgccaatttatgaccccagcaaggattcttgctgtgcagtgtttgagcttgttacaagaaaggagaagcctgatttcagtgcagagatggacaacgtttgcaatgccttgcangcaagttctaacttgatgatgttataccatgaaattatcactttcaaaacttaaataggcgaattttgagtacaagtgatggatactattgctaatgctatcccatctatacttatggctggattctgtagtgcgtcatatgtccatcatttgttagcaacttctataaacactgtggtaaagtacatatactagatatgcatccgattctttgtttcatttgtggatgccatgaagaaaagagtacactgaaagttagatgcaagttttccaattcctatggaaccatacagagtgttcttttagcaaacatatccagtatgtagttctaagcagcgtattgcatactaacgaattccttgaaatcaattattggcattctcaaaacgttttgaggacctttttttatacatatattggtactaaatctttaggattttaactaccacaaaaattccccaaatccaaataagcaaatacccccttgtgtagtttccaccacagtagtttcagtaccctttatataacactgatttaaatatagtgtaattcaccatttggtaatatgaagtagtttcattatcctttattagattgatttattctagcaatcactatccatttgctaatatatcatccggtgttgtcagaaaaaaaatcctatccttcccttaattcctttgcgtactacataataattcactgagttgataataataatgtgaagttgtgggttcatttccgttcttatcaatggtaaactctggatattattttgttttatggtctaatatttcacttggtactttcatttgatactaaacacattacttttctgcaggcagtgaacttgaaggctacaaaaggttctagcaatcagaaggtaccatcttcaccttttgagttctgaacggttatattgtgataatttctcttgcaccccatggaaaaatgtaagttctcattttattgtgttatctattgacgtttgatgaatgtaccatttgtttgtttgcagttttatacagagaaccagaaatttgccttcactgagattttagatgttctcagagctatttgccatgcacatatgcttccactggcccttacatgggttcctacatcaaatggtattgatggtggttatgttgttggaaaggatggtgccagtttttcacaatcagggaaaacaataatacgcatccatgaatctgcatgttatgttaacgatggaaagatgcaaggttttcttcaagcatgtgccagacgtcatcttgagaaagggcaaggcattgcaggacgagcactcaaatctaatttgccatttttctcgcctgatataagagagtacagtattgaggattaccctcttgcacaccatgcacgtaagtttagtctgcatgctgctgttgccattcgtctaaggagcacatacactggcaatgatgactacatactagaattctttctcccggtcagctgcaaaggcagtggagaacaacagatgttgctgaataacctctccagtacaatgcaaagaatatgcaaaagtctgcgaacagtttatgaagcagaagttgataatgttaatgctggtactgcagctgtgttcaggaaaaacaatgagagttgcttgccaactggacacacagaaagttcttcacatggtgatcaatcaatcacaggagcttcattcgaggatacatctttagctaacaagccaggagtcatggaacctgagttggctgagcaggtgctctactaactttaactaaatatgtcatgctatgcacctgatttagtaagaagctgagtgacataactggaatataaactcctttttagtgtgttcgggtcaaaattttcagcagtaaacatgagcaatcaaaatgaacttgaccaaactgaacctttttaaaagtttcttctgtagagatatgtagttctgtaaatatctagaataattgtgtcttagtagtcatagccattgctgaaaattcaattggattatgtatctttgactcttgcctattgaataatgtcatcaaaatcacctttattaatgagatgtgagatttttatatatacctttcagttttattagaggaaaaggtgtccaatggtagtaagctagtagcaaagttcatttgaacatgctagtagcaacccaccatagtcatactgggatgggttaaatccacaaaatccatactcaacattaatacataaatgtaatcaagttgataataaaaagtctagagtaactttcacaaaatcccaggttttgaagtacccataacataaaaccccaggtattacgatttgtttcgaagaacccgaagttttggggcaaaatgtttcaagaaaccccatgttaaagcttatatcattgtttttgctaatatatttatgcataataattgaaaaattataatatgagatattcctgagtatatatacatgttagcctcattttaacaagcattggttattggtagtatgattatttaaatgtataggtatctgattaatgtgtcagtattaatgagataattttgtgtttttttaatcatgcaatgtaagagtaaggaagaagataaaatacatgcgagggatatgtattttgagcctactaatgtgaacatataccaaaaatatgatatataataatgaaattatgagtatttgccataaacatggggttttgctttacatgtgcctcaaaacctggggttttgtgaaatttactctagaatctagaatgtgtgtatccacttgttgactgatctccttctgcgctgcaggtacagcctattccataggacatgcagagaaaagcgcagtacagctgagaagaatattagcttggatgttcttcgtaagtacttctctgggagcctaaaggatgctgcaaagagccttggtggtgagcctctagtgtctttttgtaaaatgaacttaacaaacctttactgtgttatttgatctactttatgtaaatagggtataattaaatggttgactttctgctgatgccttcttttaatattgggtgcagtttgtccaacaactttgaaacggatatgccggcatcatggaatttcacgatggccatctcgcaagataaacaaggttaatcgttcattaaagaagattcaaactgtcataaactctgttcatggtgtggacagatccttgcaatatgatcctgctactggatctcttgttccagtagtttctctgccagaaaagttgacattcccttcttgcgatggtttgccaactccatcagtcggaaaaactgtggaagagaattctgacctaaaatctgaagaagggtgttctttgcctgatggatcgcaaagacaaagttgccagttgcagatctctgatgtgaagaaaagtaacgaggatgaatttcacattggcagtggtaacagtgatttttatggtgcaaatgccacagcaaaatctaattctgaggtcacacaaggtccattatgtcccactggtgcttttagtgctttgcatctcaagggaacagattgcaccaatccttctagctctctccgcccaagttccgaaagcaccagaaatcaaatagttggaagaaactcaccatctatacaacaagaagatcttgatatgcttgacaatcatgagccgaggacaaggaccacatgcacccttctacctctggtatgactgactcttctagcggcagcgcatcaagccaccctaccttcaaacagaacacaagaagtgctcttaaagatgcagccagtcctgcactgacagttaaggcaacctacaacggagacactgtgcggttcaagttcttgccatctatgggttggtatcacctattggaagaaatagcaaagagatttaagctgccaaccggagcataccagctcaagtacaaggacgacgaggatgaatgggtcatcttggcaaacgattcagatctccaggagtgcgtcgatgttctcgactccatagggtcgcgaatcgtgaaactccaggtacgagatctcccttgcatcgtcagcagctcgggaagcagcacctgcttgcagttggcggcacatagctcataacatggtagggaatcctgggctcctgtcacccaaccctcaactgtaccatattacagtaggctagtctttgttgtagcaacagccaatagggtttgtattatgtatgcagtagggtatattatgcagtttagctagcatcaacggtggagtcatcatcccacacagatcagatcatattctcgcaagaaacaatgccattaaggtcttaagtttgttgaacacgagtacatgacaataacctgttgtcatgatggtgtacagtgcttgtgaatcgtggtcctggctctctgttgtactccctccggtttcattttaattaatgttttagacaaagacacggtctacaaaatatatcttttaccttatttttctattataatatatataataaataaatgcatgtttagttttattatagtgctttaaaagacaaatctatatatgttgttctagttcttttaaaccaaatatttttaaagttagtgatggtcaaagttataaaagtttgaccttaaccttgttttttctaaaacgtcaatttatatggaaccggagggagtacatgctcacgaatgtttctgcacatattggtccaactgtaaatctgcttctttcagctctctgaattattgtatattacgacccgtgtgctgtgtacttactactgtatatatctttgtgggcatgaagcgactgagtctattatggcatcttttctgcacactcaatctactaaaaagtgacgctcgacaggaccgattgcttgtcattttaggcatttattggctgaaatgtagccggagcaggttataccgtgtagcagctggtgatttcttgatgatacgaaagctaacacctgtggtcggttagagctaaaaagtccagctgacatgaacaggtcgctgccctcttggttgaaactggacatcatcacttcgacaacaaacggaaccgcacgacagcgtcgcaattcgcgtgtacgacgccttcgccgcaaagcggcatggtggctagccgtagccggtcagtcagacccctctctctaagtccagaactactcgctctgttcacaaatataaacatttctagttcatttcacagagattgagatcgagaagaaaagactttgatgatctttatgaaatttgagatgagtgagggtgtgaaaaagatgtttgacggtaaaatacgaaaaaaaaaggagataattgatgagacaaatactagtactctaaaatacctaaacccttcatcttaaaaaaaacatatgacatgataggacgttttctagtacatgcccagattcattatactaagaaacgtcacatcttgttttaggatgttttttttaatatgatagagagagtatggccgtgtttagtttccctctattcccaactttcaatcacatcatatcacataaaaaactttcctacacacataaacttacaactttttttttcaaactcctaacattcttcaaacttccaactttttttcaggaactaaacacacccatatttgtaaacagatgttaaacgattgagatgcttatatttgtcaagaggagtagcaggggaaactgttttaaacactcgggtggacgtccacccgtttcttgcatgtcatctaaatggttatgaaaaaatttcaaaaaaattgacatgataggttaatatc

SEQ ID NO: 26948 - DNA, 21886 bp, Oryza sativa
catattaacctatcttgtgaatttttttgaaattttttcataatcatctacctggagcgcagggaccaacgaccggcgaggctgatgaagaagatcggagagagggcacggcaggggaggcccatgtcatcatgcgcgtgtgccgccggtccgggagactgacgcggccgcggtggcctggttggtcgccgaccgatcttttgaccggaacttgccttaccggccggccggccaaaagctctctccaattcgtgcaccgtctcgctggacaccggacagatcgacgagcccggcctctggtccagactccagacatcgaaaagacaggaagtggctcgggctggcccgctagccccggtggtccatcgctatggcaatgggacgcgagatggcgagggatcattaggctagtggctaccatcagtcgagcagaacaatcatgccgtgacgacaacaacaacggaagcagttcaggcattagccaggcaccttcctgagtcgccgttcccgttttaatacgatcgagacgcaggaaatatgatttgggtccatctatctatctatagcctggtactgtcaatttccgcccccatggacaagatcccaagcagtatatacatagcagtagcatttatgctcactagaacaaacttaaaaaagagctttcaagtttcaactgctaagccgtcgtctagctgtagcctggagagaataaaatcgccgatcagtctctgcagtggtcctgcctatcgacggattcaggaaccgaagtactctgatccagcggcatcaattccacgctgtgccgcctgcttttgcgacatccatgtgtaccaagtcttaagctagagagactagagcgtgatcaagctgagtgatcgatcggctcagcacacaatagtataccattaccgtgtaatttaaagctaaagctcagctacatgatcacggcgatcttctttagcggcctagctaagctaaagcatcgcatcaacacaggctagcttaggcccaagcgatcatggccgctttcctttgccttttcgccctccccgttttttcttacacatccgatccaacatggccatcatcatggcttccctctccctagcttagctcaattcgccgaaacttaacgaaattttaggatagtttcgattgatctgcacttccgaagcatgtcaccaacaccatgagtgacatttttcttgtgtaggattaatcaatgcaacgcgtacgtgtggcaagtgttgcttcaaattaaacattttttcctgttcaaggaaaggagtactttagatttcagaaggctggcacaggcagatatatatatatatatatatatatatatatatatatatatatatatatatatatatgagctagtttatacttatcggtacaagggggcaaaaggaaaaacaaatgatcagtggtagttataaacctttattagcttttctgaagatgagaggagacatgacctcaatatatataaaagaaaatgttagtgttgtgaattggtaggtttggtagctccagattttgattaatcaatttcttcacttctcagcattctgaaccgcacgtatccatcatgtatatatacaggcgtacgtacatacgccacgaccgcaacaaggcgtgtcttttctattcctgccctgtctctgttctcaaccacctagtagctactatcaatcaccaacttggttgattatatgcataaacccatagaactttctgcccattgtcgatcaatcttttccgctctattagttgaccgatcctaaggaaaagaaaaaacaaaaactattctcggtgatcgatgtcgcacacccaaccctttttctagtactaccactgtaacataacaacatggtagtaccatgaattgaaaattcgaaatgtcttgaaattcactcttcatttcgttattaattcttcacgcgagtactagaagagatgcaggataaaaatgcagagacatcagtatcgtggccggccgtgtatgtactacgtacttagtacctaacctgatcgatttggccgacataagaaactataataaggctctgttttgtgatcttagccttaactacctccctatgtgcagcctggtagccatgtactttagtgcccgttggtggtttatactagtacatgcaaaagcgtcgcaccgcctttttgcctattgggagatttaaatgttggatcaattagcttgagaggaatgatggccaaagagaaagcatatgcgtgctgctaacatgcaaggatcaaagagaaaaggaagccatcaagcagtggaggaaacttgtcaaaagctaaggctggatggtttcctttccttatcttttcctttgagatgtagcgctggaattccgcagcatgtgttaagtctcccctgaaattaggggtgtagattatatagtatgtgtacaacattgtatatactatactggtaggaaatgaagtaatcctaaaactagcagaacattctatagcagtagctatctacaattaattaattaaacctctccattgcaagggttagtatcaagtatcacaagtatgtttgtcacccatgagtcatgactagcgtcatgttgtgttaccattaagcccattttgaacaagggattttaccgaaagctgtaaaattccaagggaaatgtatatatgcaataatgcaagtaggagtatgcaacacacatgcagagtgtacttcatatgcttcagtgttggaagggtcccaaaaaagcattccttgttgggtcatggacgcagccttattccctccagagaactttgacattgatcctagtatcctacggcccaaaaagcgacatgaccaaactgcccctcacccgccgcactgatgaccgacccccttaactaactccccagtgtacctccacgccatgggagctgagctgatctgaatgatcccttctcacttccaagtactccacgaatgtaacaacttgatgtgacctcagttcttctcccatctcctcttctccccaccacgcgcgcgccgccctgcccagatgtttctccactccctcttgatgcaaaacatggccaagaacacaacaacgcagcagcagcagcagacgaggtacgcacactttgcatgtgggatgatgatgattgcttcggttcgttctacgtgtttggctgacgtgatggttccatgcgcaggtcgtcgaaagaggcgggcggcggcggcgcggcgaggtcgagaggggtgtcgtcgaagaagtcgccgtggtaccagcgggcggttgaggtgttgctgctgatatggaagcagccgacgggggcggggacggggacgacgacgaaggccgcggcggcgtcggggatgggggctcggctgcggaagtcgtcgtcgctgaacgtggcggcgtcgttcacgcgggtctgcctgtgcgcgcctatctcgtcgtacaatgagcaggcgctctacttccaggcgggcgacgtggcgccgcgccggagctacagctacccgcgggcgtcgtcggcgtcggcgtccgggtgcagcggaggcggaaacagcaacccgctggtggcgccgccgcccgcggccgagcagagggcgctgatgaggacgcctggccccggcggggagagcgcgaggcggccggtgttccgcggcaagtcgctgacggacgacatcctgatgcggcggttcgtcgtcgacgaggaggccacgcggcggcgcaacgagatggaggtgatccggcgccgccacgcggccgccgccaagcggcggcgcctcggccccagcccgctccgccggatggccctggcggaatcggagtcggaggccgacgacgaggaggagacgacgacgacggaagcagccgagccgacgtcacggaggaaaccccaagccgtacccatcgcagcgtaacagcgaagcctccctgcttgtccctgtctcccctctcaattttttttccctcccttacacttcttctcccgttccttgtgctcttgtcgttgtctcgcaatgatgcaagaagaaaactccgagcaacacgcgcgttctcttcgactcttccatatcgaccgatgcggacgtcccgcccagcccagcgcccgccccgcacgccaaagtacgcgcgcgtcgtggagaaacccggcgaaaccgacgtgtttcccccgcgcggcgcggcgcggcgcgggggcgatcgaaacgcgacgccggaacgagcaaacgcggggcagagttaatgggcgggcagccgacgcaacggctaggcaaggcgcgcgcgcgggaccagcagcgggaagcggtggcactcgcggcgtcgcgcggggcacgcattcattgggcttttttctggggttcgtggttaaatgcgtgatcggtatgaagtccctgccggccgttggggtgattacattgattttaacccgcccgcgctttggcgaagcgaacggacgaacctgtactgccgaagcccagattaatgggcgcatcaacgtacggaaccaaacagcgccggtggtggtacgtcgcgtccgcgtccggcgatatctctggatttctcgccacagttcgtagatcgcggacggtgcggctagaatactagcgtgcagaaatgaccctactcaaaagcaacaggtgctactactaaggctgtgtttgagggtgaggggaccggaaagattgggaagatagacaaaacgaggtgagccattagcgcataattaattgagtattaactattttaaattttaaaaatgaactaatatgaatttttaaagcaacttttatatagaaattttttacaaaaaatacaccgtttagtagtttgggaagtgtgcgcgcggaaaacaagtgacaatcttcctaatctctccccaatctctttgaaaggacgcagcctaactcgatcgcggataacataatccctgctcgctaatactaaaaggtttggagtgccaagtaagggctccatgattgatgttccccttgctttcgggctggaaaagcaaaaggcaatgcaggcttgcaggttgcagctcaggccttcgttcgcagtagacttgtactggtacagacgtgtactacttgtactgtagcaaccctgtgccggtgaacatttgcatcgccggcacggggcccacaaggcttttggcgtcctgcagcctcacctatctcgcctcgagtaatcgggtggggggcttttgggattcgttggtacggctctttggtcttttattcgtgggccctcccgaagcgcccgtgggcttgttttgagcccggaatcggggcactctgcacccgctgctggacaaatcttgcttggcgccaatagccacgggccaacagcttaaattgggagtatgcctgtgattgatggatttgaaaaattatcccggttgatgaatagttgtcggtccaaattttgcctgattaggttctgaccagcaatgcttttaaaaccgtacaagccgtcctattgtgtttctaatcaatataaaaatgaatcattattctacatctagagctattcattcacctttgttgcataaaaaataaccgccagaattataagggctcctttgcaacaaaggttttattaaggatgtcttcgctacaacaagtttccatcggaacagtgatcacggaaaatgtagcggtccattagcacatgattaattaagtatttgctattttttaaaaaaaggattaatttgatttttttaagcaacttttgtatagaaacgttttgcaaaaaacacaccgtttagcagtttgaaaagcgtgcgcgcggaaaacgagagagatgggttgagaaaaggggcatccgaacacaacctaagtgtttttgtaggatgtgaatcttttggaacatttttctatatgctcctttgaatcaaaggaatggatctttcaaatttctatggaatgaccaaatccataggaatcttgaagtaaatctaacatgagctccaggctcttgaaaattttcgtgcgggtcattctctctccaattttatgtaccgtttcctgtgaagcattcaaacaacacaattgagcaattcatttttttttcatattccctagggttacattgtcactccaattcttatgtttttcctggttctgtgttttaaaattcctatgttccaaaggagccctagttgacaaatctaaaaccaagaccaacaaatattggtgaatagagtgagttcccctttgtcgcttaatataagcatgtcgcaagtttttcacgtagggggtgaaattaaatgagaaatgattgttgttggttgaaataagaaaaattgtgaagaaattaaatacgagatagcagtgattggttgagatgagaaaatagatggaaaagtagctatactccctccgtcggacggtgtattttataacaaaatttaaaagtcataagtagttatatttagggtggagggaatattgattatccaaaaactccgatttatcatctagcgaccattttcaccggcagtataaattctacacatggttagcatccaacttgaaaaaaagtgctcgtctggatcttctgggctttcaagagtactattcgtttcttccctgttgcaccaactgtttagttcgttaaaagaaaatttttgaatgtcacatcagatgtttgattggatgtcggaaggttttttttgacacgaatgaaaaaaataatttcataactcgcctggaaaccgcgagacgaatcttttgagcctaattaatccgtcattagcatatgtgggttactgtagcatttatggctaatcatggactatttaggctcagaagatttgtctcgtgatttcccttctaaccgtgcaattagttttttcatttatctatatttaatatttcatgcatatatctaaagattcgatgtgatatttttaggaaaaaaaattgggggactaaacggggcatactgtcctgactcctctgcactgaacatccatggcgccaaaaaaggagaaaagaagaacgaactcgttccttctctcgctaaacgttaacggtggaacgcacaacttcagaattcagacaagataggtaaggatagaataaagcggccgcgctaccgatttcgctctgctaatgttggatctgattctgaacatatattcagctggacggtcacacacctactaagtatacacagtaattgagctcgttgctgagaccgcgcggcacaggacggcgagggcgcgaggcgcttgtccgcacaattacaaaccgcaccgcactacacggatgcctcgcggctcgcgcggcgcggcggccgtcagagcttggagtagagctgcggcgtgcaccacttgaagaaggtgcccgtggggagctcgccgggcgggagcagggcgaggcgcgccccgatctcggcagcctcctccgcggtgcgcttcccccagccgcgggtcatgtccgtccgcgtgaacccggggcagaagcagttgacgctcacccggtcgccgcgcgcctgcagccgccgcgccagcacccgcgcgtacgcgttcagggccagcttggacaccgagtagtccgtccacaccttgggccacccctgcccgcgccacgtcccgtccttcacctgcgccaggaaccgcgacgccatcccctccacctccgcctccgtcagcctctcctcgtcctggagcagccgcttcagctccgggtcgctcaccttctgcagcacaaacacgcagccaatccatcatcacaacgagaaaaacatatctcgaatctcactttttgttttttttttgtgtgtgtgtgtgggtgcgcgcgaggatatctgctgcagatagagaaacttcgatgccgaaattccctttcaaaggcaggttagattcgtttgcaaaattagtcgtcgtgtacacattctgcgtttaatgatgccgttgcactacagatgctgacttgctgatgcactacagatgctgacttgctgatgccctgctgtaagtttaaccaactttcgtcgctgtaaaatactccctctgtttctcgtcgctgtaaactactccctctgtttcatattataaattattttattttttttctagtcaaactcatttaagtttgatcaagtttataaaaaaaatataatagcattttcaacatgaaacaaacacactatcaaaatatattaaatattagtttcgataaaaactaatttagtgttatagacgttgctaaatttttctatcaatttgatcagatttttaaaaaattgactaggaaaaaaaaatcaaaacgatttataatatgaaatggagggaatactgagaaaataagagtcagaaaataagagtcaatagattcctcgctcttttcccgttgctttcaaacctcttatcctcgtcccctttcgtgttttttaactttatggcccatgtatacagatcttttgtgagagaagatctctccagctttagttatatactaatagcatatgcatgtgacgacgaaagcgacgcaagcttagttttacaacctatacaaccatttataactggaaaattttaagggttcgtctctgtgcaagaaacataaattgcgcatgatagtacgtgattttcaaacttgcatataaagatcatctttcaacttctgctcaacactccaaatgtagttgggagtaaattagacggaagaacttctgtaaacttggagtttagctagaaaacaaacaagttgcggattctagtttatgctgtgtcagtgataatgaaagaaaagacttcaaaatgacatgtatttggccgtgtatttgtacagaccatagacaacgtattagccagcacattcatgatgagatatgcattatgccttaagataagcttcaaattataatttgtccaccactggtctcgtgcattcacacttcataatctcaagtctttatctactagctatttgtgtgctactacttgtcaagcttgcctcttgatatgtcaaaactactgttgttttaaaacatagtttgatttaatccaaaaacggttaggtcagtgacactatacttaaagagaattagttaattacaggctcaaagtttcaacgcacatacacttaacgtgactcatgatgtacaaggagaccactatggaattttttttcctaacaatttgagctacaaccagctattctttattaaaaacaaattagaggctagtctttattaaaaagaaaaaaaatctttcaatacgacaagcaacaaatattattttcctcatgaaaatatcatcatttattttccttgtcttgttatcgatcgatgatctatgaggtacacaacaatgaaggtaaaatagttgcgtgttccatcttagatttttttttttcaggagagtttcaaacaagttcatccactagttctataattttgggtgtgacgagatatatggacagggaagcaatactagattaacatgaattataaatatccatttgagcacttacattgagtagtccaagttgggagctgatattcagtattcggctggtggctggtgatcgccggaaaagtggcaggagtgcttcagtcagcatcttggccccatagaagttcgttctaaggaccgtctcggcgtgctccactgagttagtgtcaatttcattgaatgaaactgctgcattgttcacctacatcaacaaaatgtgcagatacaattcatttcatcatcgcagaaaaaagcaagtcatcatggattagagtggagctactgaacgaactggtttcagatagtaacaactcccttttattgcagctataatgttaggaggctggaaatgtactccactaaaccgcacttggtcactatatgtagatcatcttattgacataagttaagggtttgtcgtatcacgcttttttttttaatttcttttctgtttacttcagagactttttggttgtgtgcccacgggcagagaccggagatgtaatccattttcattatctaaaaaatgtggtgtactatgcctatcactccacaaagtctcaggcctcatcgtactctacaaaagctaccctcttaatgtcagttagattacttgatggtatggatgtgccaacaaacagatggagatcgattagatcaaacttaacacccgttatctgaaagtgccagctcaacatgaataaaccacgccatcattgtattcaggtaaggagtatggatcaccattttggtagattacaggtcacctagcttgaccatggcccaatgccccaatctgcctagctcggtttgcacagcctgaagatcatgtgtttgtttttgttcttctgttctggcagctgtcgttaagactggccgtaagcagtaacatactccagttcagtaaattacgcattacacaggagcagctccaagcatatataaacacaggccgggagctatggcttccaacgcctctgcaagtatgggtttgaactttgaacgaatgaaagggagagatatccgacttgtaacaaagtggcaatacggattaaccaatggacggatttgacttgaagaaaattaaacagcttgcagaattaagaacaagaccagccaacaagattgtaagttgttactccacctagatagtcaaaagtgctgcagccagagccaatcagcgggcagcggcacgttatcatgagctttttaatactccctatatttcatactctatccttccacaaaaattacactactccgtattacttttctcaccaagaccaaacacaaattaactatctaacatataacaaagatcaagtagtgtaagcactcatgcaaccaatgagtattaagatggctcattagtttctggttaaacatttaatttacctattcatttaagtctttgaatgcatagagacaaaatagaaacaacttatttggaaaaactaagatataaaataggtctaactctcgtggatggagtattataagacgggtttctaataaggatcaagtttatagaaaaataatagcatgtacaacaccaaattagtttcattaaatcgaacattgaatatatgttgatagtatatttgttttgtgttgaaaatgttactgtctttttagaaaaaacttacagaaatttaactttaaaaatatcaaaatcgtgagtgtataacatgacttttatatgtacatttaattattcatattattcatttttgaaaaaaaatgaaacaacataaaacatacttatttaaaataaaacaaaccacaacaaaataaatagtgataactttttttttcatatgacgaatgatcaaacgtgtgtctaaaaattaacgccatcatatatacttaagagagatgctctagtgctctatactagtagtattatactaccattattattaaggataaattagtaagttactaattcaatgaatatgagttactttgttatttattttttttctagctaaatcgatctatgatcatccatcacattggcatcgctcatatttcatcgacaaagccaaaaaagaagaaaaaaagttgtcactactaaatgatgattataccctccgcacttatttttttctgacaataatgcccctccaccttatagtataaatagatatgaaccatttgatcaaatgagatcaatgatttagatagatttctactgtcagtagagagcaccgtagcaagtctcgtatacttcttaaagaaacgcagcaagtatttgcgagctatcagaaccctgacttctttgagcgctcgagttggctccgggcgcaagcgaaacgaaacgcaacacgttggacgttaggaccaggttgcgggccgacgggccgtgtcgctgtccggcagcatgcacgagcacgactcagcctcggcgccgggagggagagggaagggagcccggaattccggatgcgacgccgaccgtctgctacgtgtcagtgacagagggggcccagccaaagcgaccgctcgcccagccatcgcccgcatgaggcggtggcggcggcggcttcggatttgccctttccttttccccacacgcgacaattttattcggttggtcgcccgccgcgcgcgcccctcgcccccttggggcctagcagggctagcactcatggcgggaggagcaataatgcagcctcgcaagaaccgatcttgacgggcgctccacttccgcctaaatacgcaatttgcccaatcgggcgtcgcatgcatacgaaaatcgttactgttctataccgatcgcgagcgcttactgtgcaggattaaagtggcagagcgtggcctaaactgttggcgataagatacgttgccatcatctggactgtggagaagacgtaataatgacgggcgagcggaaacctcggagaaggggaagggggtttgatttgacgtgatggctgactgactcaccaggatgtcgaggccgccgatggcgtcgcggagccaggcggcgaaggcctgcacggaggcagggtcggcgacgtcgaggcggtggaagacgacgtggaggccccgggcacggagcgccgcggcggcggcctcccctcgctcggcgtcccgcgcggtgagcaccacggtgatgccgtgctccccgagccgcgccgccagcgcgagcccgatgcccctgttcgcgccggtcaccacggccaccgtctccctcgtccaccacgccctgtattacgaacggaacgaaaaaaaacccagtcagatcgaacgacgcaaggacaggacaggaagccgagcgcgagcgggcgatggtggtggtcaccttgccgaggacggctccttggagctcgagtagtccatcaatggacggagcgagagatcgatcgatcgatctcctctcgttgagagctctgcttggggctagcttggcgcttggtaagggaaggaaagaaaggttgaggtgttcgtgccgggccacgcgcgggtggtggggagtggggggcactggatcgctgggcgtccggcagtgggcgaggtaggggagatatgtatacaggcggacagacaggccaggccacgccccgctttgggtggtcaaacggacgggacgtatcgcgtactggagtcctatgcaccagggagctgtcaagctcaagccgctgaaggggtgaggggaaccctgtggagagttccaacttccaagtaggggcatgtttaggcccctttgaatcatataggaataaaaaaacaaaggattaggaaaaatataggattctgacataaatacaattgtaaaatagaggattgcaaaacacagaaaaaatacaggaatggccgtttgatcggaccacaagaaaaacgcaggaatcagattagagagatagactcagaggaaatgttccaagaggttagacctcttgctaactttcctctaaaatatgcataggattacccattccataggaattttaaaggattggataggatgcaatcctttgtttcaaaggccttcataggatttttttttccatatgattgaaatcctccaaaatttctacatttttcctacaaatcaaaggggcccttagttcgcgaaataaaaatttttgggtgtcacatcggacgtttgaccggatgtcggaaggggttttcggacacgaatgaaaaaactaatttcataactcgcttgaaaaccgcgagacgaatcttctgagcctaattaatccgccattagcacatgtggattactgtagcttatggctaatcatgaactaattagactcaaaagatttgtctcgcgattttctccctaactgtgcaattagtttttcttttaatctttattaatgctctatgcatgtatccaaagattcgatgtgatgtttttgggaaaaactttttgggaactaaacggggctaggcgtcctactatgccgtgggccgtgcaatcgaccaatcgacggtcgcaccctatggtggtgtttggatagggactaaaaatttagtcccgtcatatcggatatttgatactaattataagtattaaatatagtctaataataaaattaattgtataagtgagagctaattcacgagataaattttttaaacctaattaatccataattagcacatgttcactgtagcatcacataggctaatcatagattaattaggcttaatagattcgtctcacgaattagtccagacttatggaatgagttttgtcattagtctacatttaatacttctaattagtgtcaaacatttgatgtgacagggactaatattttagtccctaatccaaacaggcctatatatttaggtgtggtaagggcattagcaatgtgtcgggtttatttcgtgtgactatatgctccacctagacaagaaaattgaatgaagccacacatatgacaaattctaatctcccacagtgcgctggcctccctttcttccccaggttgtgcccttcatctcctcaggctggcctgcctccttgccttcccccaccagcaccggcacagctccacttcccctgactgccagcgtagctctccctcctctccgctgttccccttccccatcggcgcctctcaatctcggatgctgctcgagcccaactcaatagctagcggcggctgtcgcctccgacctctccctccgtcatcccctccccgcctccaacctctccctccgccgtctcttccccgcctccagcctctccttccatcgaactctctagatctggcccgtggctcatggactcgggcggcggcaatggggaaggtggcggcggctcgacggcaatgctgacggaggctccatggaaggcccgtgtaacgctccgcttttcgtgagacgttaaaaactaattcagtaaaatcctaattgcgaaaatttccgttctttgagtgctgagtctaaagttgtgccaatatctcaatttaaatccgtcctcgatccctctcatcaccatcaaaatcatcctcctcaaaattccttttccaattcaagactccaaatcaaatcccgaaattcaaatcctctcttgaaatccttgcgaaatacctgttcccgattcccatttgagttccttccttgactccaccttgtgtccctaagaccaagcatccaattcgaaatccaaatccaaacccccaactcgaattctctccaaatatgtcttctctgtaaaagtctattttgcgtcctcataattttggatgggctggatcccctcccctcggcccatctccccctctcaacccgcacccctcgcacgtgcattgcatgcagccgagccgagaaggagggccgctctctccctctctgtctctctctcttctctcccggtgtcaacctcccgtcgccgccattcgattttcgccgccgcccgccggttcccgctaccgcggttttgtaacaccccgattttcgttcgggattaaaaatcaattaataatacatttctagaaattatattaaaggttaaatcaatttaatcaagtgaaattatagaggaaattaaaatttcctttaaaaaaatcattggccgggaatattttgcaatattctttgtgccccaaaaatactctccggatttttccgcaaattttcggagctcaagaaataattttaaagtcacaaagttcatttaaccaattagaataaaaagaaaagaaaataatcttcccctttcccccttttgggcttggcccaagccttcccctccactcccgtgggccgcgcgcctcctccctctctcggccggcccgcgccttgcgaaagtctactttacgtcccccggttttcctcccctccttcctaggccggcctcctccctcggcccgctcggctctctctccctcaagtctgctttacctccctctcccgttttcccctctctctctccccgacaggtgggacccgaggccccacctgtcatcttcatcccttacctcccgtcgccctaaccgccgccatggccgccaaatcctcccacgtcgccgcctctcccgcgcgactccctctcccgcgcgtgcgtggacgcggtcgtcgcccacgtcggcgccgttttcccccactctccccgcgaaaatcggcgccggttaacccctccaccaccccacgtcggcgcccacttcgccagccgattccgccacgtccggcctcgatcccgccttcccgagcccataaaaagcacccccgtgctcccctcgtccatttccccttgtttcccgggcccggcactctctccctcgctctccccacgtcgttcccgcgcgccgccacactccggcgaactccggccgccgtttcccgtcgctagggtcgccgccgcactactccgccgccaccgctggctttgccacctcaagggcacgctcggccgccgtttcttcctccccttccaccacgcgaaccacctctccaccgtgctcccgctctccatcggtccccggcgagctccggccacctctagccgccgccctagccactgccgcgccgcgccgtttgcaccaccggcttctccgtgcctcgccgcaccccggcctccgctccgtttccccatttaatcgccgcaaccacccttccaccgtgcatcccaagccacctccaccctacgccgccgggccgccgttccgccttcgtcccgaggagcgccgacgccgagctcccccgcctttccccgcccctcgtcgtcgcgtccttggtgagctcctcctctccctccttgcctccctcctctgtctcccatgcgtgctgccacgccggtggccgccgccggcgaccaccgggccatgtgccgccgccgttaggtcggccggccagcttgtcgccgccccgctcgcctaggccgcccggatccccttgccgcgccgcaccaccgctttcccgcgtgcgtcggcgtcgtcgcaggaggccgcgccgccgtgagccgtcgctcggccgggccggcctgagctgtgcccgtgctcagccgcgccaccccgtggccgcccgatcagctcgggctgatatgggccatcggttcccgtggaccagcggtggactaccccgtggtcccggtccacggtggaccggcgcccttgtgccgctgaccggtggggcccgcttgccggcgccgccctcccctttgatgacgtcagcaaccgtcttttcctttggaaaaataaataataattgcgtcataattcgttaataattctagaaattcatttaaatggctcaaaacttctaaaattcatatctaattcattcgaactccgaattgagccattcaacttgcaaaattcatctaaaattgagctctacatgtttgtttactttttatgtactgtttccttggtttttattagagtttttcctcattttgcgtgccagcgtgtagttcccgtcatttcggaagatcgcggtcgcaaggataagagttcggaagattgtttgaagaagcaaggcaagtcacacattccccttgagcatgttgatcccaatttataaatgttttaccgtttacaaataaatatgcatgttttgctaattacatgggatccgggtattacctatctgctcgcttgtgccatgtttacttgatatctgttctttgtcaaccttgggtaataaatcgactagctcatgttacttatgtgacctagctagaactatatgcttagccatgcttaattaccactagctcagttgatggggtaattacagttttagaccttttagtatcaggatgagctgcgtgctcgagacatctggccatgcttcatggtcgtaattatccaactaaaatgcgactgaatggtgggctgtgggtgcatggttttgctagtcgcacccatggcaattaaggaccggttcgcgggatgccctggaagaacttatcgtacttaccacaagccagcgtaggcaacggctgggcttgtagtgtagctttcctctagccgacgcatccaggcaagggtgggcgtgatggagtttggatgggccctgcgacggcctatgcggcttccggattcacctaggcatgagaggggactgcccgttgcccgctggggacgggggtgaaacctgaggtgtggtgtgcttggctagagggggttatgcgaagggtcctgtcacggcctctttccggtatatcgtggtggcatgtcggcgcacggaaacgtgtcgtggggctgtgtcttgtgggtacagttgtacacctctgatcagagtaaaactattcgaatagccgtgcccgcggttatgggcggtcgaccagattcaccgtgattagtcccatcttaataaatcgacccaatgcactgtagtccaggtgggttggttgggcctgttcaacgtggtgtagcattgatcagtggagatttaatgttactctaattactcaaccgttttactgttttgctcaataaaatgttttacaactgcctttatgcaaatagccacaaacccctccttgtatccccttgcacgtctgcatcgttggtgtggcttgctgagtacggtggttgtactcagtcttgctattattcccccttttcagaagtgtagtgcttctgagctgaagatggagttagaggaccaaggctcagaccccagttgagttttgcctgtggagtggagctgaagccccgctaggatcgcctttttccgctgctgtcgttctgtttcggtgcgaggactaagtgcctcttccataagtattttacgcttaatttacgtttggaactgtatattacttgtcgtcttgtgtaccctggctggtcctggacagggaattaatacgcaaaatagtctggaaatttgggttaaatttctgggcgtgacaggtttgaaccctcccaccaccgctgttcgattttggccctctcccgcgcgtcgtggtggctgaccgcccggtcaccgtccgccctggccatgcctgcgcccgctctgccgccctgccactcgctccaccttcgcgcgcgtgcgtccaagacgtggaggcagagcctcggctcccctctctcacgcgctctccctcctccctctgctcgcccaaatcggcaagaagccgagctcctttcccctcccctttttgctttttccctctcagcccggccgcccgtgaccacctcctgccgctccttgaccgcaagcgccgcgccacccgagcacccttgaccacctaagtcggtttcctcccccaaaaccgacttcccgtgcctataaaaccgcagccgagcccctcctctcaacccctcccgcttcactctccacgttgtcgcgccattgtcgcccctaccctgcagtcgccctcgccgtccgtcgccgaagcaccagggagaccggtgcgtgcggggacgcgagacaaggactccgggcacctcttcttccccttccccggcccaaggccggagagctcgccccgcgccatcggttaccgtcctgcgcccgccacagcacggtagtgcatctccccgttttcctccctcgctccacctccctccttagatttgggtagtagcttgagtagtgcccctgtagcaagctggcgccgccccaagcctcgccgccgctcgctgtaggctcgccgccgttgccgcccactcccggaggccgccgctcctcgtcggccctcctcggtgctcttccaccccatccaacgccagaaacgagtcccctgagtcctagatatgctcccactccgctgaatcgaactcccattgctccggtggattttccccttttgctcgccgccggccgccgccgtagcaatccgccaccgtcgatcttcctccggcgaatccaagccactggctcgcctcctatcgtgcccctcttcactccggtgtgctctcccttggccgaagaccgtcgcgccgtgctccggtgagacctccgccgctcaccgtccatcttggccggcctccttcttcttcctcccaccagcccgcgtggcaaccacgaaggcgccacgtcggcgccagctcggccgcaaccgggtcaaaagaccggtcagccgcctccctccgtcccatctttcgtgcgcctggtccacggagagccctagcggctgcgcgtgggcccgccatctcttggtccacccggtgctcaagccgtgagccgcgtccgccaaaccctcgcgccgccttgcgtgcgcccatccctccgtgagccgcgtcaccgacaagcggcccccacccgggaccctgcgaggtgcactcggtccaacggaccgccccctctctcttccgcgcgccctaatgggccgcctcaccatggccgcgcccggcccaatagccggccgagccatataaacccctcgggccgcgccctagccgccccgaggaagtctgatatctctccctcctccaatttcaaaaagggtttaataaattattaaatccttttttcctttagatagaaattccttaatccttagaaaatccatatcttctcaaccgttcatccgattgactccgttccatatccagtaattccgtaaaattgagatatatctaatggcactattatttagtctaaataggatctttattttgggtcttgtgtaggtttttaattgtttgcgtatagttgcggttaccggatttccgtcaatcgcgggttttctcgaagattcgtgaagcttcgtgaagaccttgagcaaggcaagtcacactttgatcaattgctcctataattagaaaatcattattattttgtttgcaactttcattattagaatcacacacttaacttgcttggcctcggtttgcgtgccaaaccgacggacctacccagtagttgcactaattcctgtaggctgtactaccctgattccttatcgctccacccttgtggtacttcggtatccgtgctctttgagcgcgcataccaaatatcccacatacaccgttgattgtcgaaaacttggaaaatgggtttgtgaagccttgaaaacccgacatgtggtgtcggtgtgtttgaaaataaaatgaattgcgaaaactcgcgatgcgggagccgtgcctacatggcgttgtcccgtattcgcatataaggaccgattcctgtgggaaactcatcgagcataatcaaagtgcaaccacaaggtggaatgggacaccctggctaagtaactagtcggttcagggaaacctcgcatgccaatagttgggaacaccggggcggggtcggacaaaccaggttcctggtaaggcaaggacaagaagtttgctcacttaccgatcaaggtggttggaattgatttgtgaatgcctaaaatggcctatacttacgtgaggatttgatccttctatgtggcatgaggtaaccctgggtcggcttgggaaaggctttgtcgcgaacctctgacaccggccagtgtctggagtaagttcgtgtcttgtgggtaaagtgtacccctctgtagaggttaactaactgttcgaacagccgtgcccacggtcatgggcggatgtgaggtggttcccgttgcgtagatttgtttgcgtgtgctttgtgaaaagttgttgtggtttgggaatcgtaactagaatcagcctacgtggcagatggatgacctgagtggtcagaaacgaatctgtgtgattcgggatgtctacgggcatcataaattaggcttcccgagtggaaacagattgttatgctgctgggcagctggactctgggagtccgagaaaatgaaaaaggctctgagagccgcctaatcaagtgaaatggctctgggagccgataagtaatgatctgaccccgggggtcggtacattaccatttgagttgttgaaaagcatctcttaagtcgaatcgagacgcaagtcaccttttcaacccaaacttaaaaagaaataaatcacttagtgatttcaaaaatgatttcaaacaaaggatttgcaaaacaatcttgcctctcttc

SEQ ID NO: 26949 - DNA, 13826 bp, Oryza sativa
atgtgtgctttgtgtaggtttgtgatgactgaattatttttgcttgcttgtgatgtgcatgcaggatgtgcatttccaggggatggatctcaaggatacgcctgccctgctcgattatcactgatgattaattttcaaaagaagattatcactgatgaaatcttgcggcggcttgtgtcctgctcagctctgcagttgttaccaggaaacacgagttgctgttgatctgttgtatcctccctcggcctccccaccaggcggacgcgcgacgggtgcagcatctcggcgacaaggttgcgccggaggatttgccacacgggcccgcatctgcagcgcgtgatggtgtagtcgttctcgccgaggagcgagcgcgccacctccaggcggttggctagagcggcgccgcgctccacaagggtggcgtgcgcgacgcagcagtcggccatgaaagaggaggaggagggcgacgaggcgaagcggcgccacagacagccatcgccatcgccatccactgctgccgccccgcaccaccgccatcgccatcgccgccgacggcagttgctctgctgttttttttttaaagatagagggagaagagggccctgacaagctggccctacgttttttatatttttccctaatcaattgcatgtgggccttatgactgggctgacacgtcagcataatgggccaagtcagcatgccacgtcagcaaaaccgccctccaaaaccgctgagggattcaatttgtactagttttaataattgggggagtcatcctgcccggttttgtagttaaggatcacgaattagattcggtgaacaattaagaaagtcaaagtggactttttcctttccccttttgtccatgactaccacactctacacacttacagcccaactcgtatgttggaataagttcactttaagtctctgaatttgtaaccaagtctgaaagtcatccctaaccaaaataccaatacaagaagtctctcaatgtacaaaaccgcatcacctgaaatctagtagtatcatcagtattagctaacgtgacaagctgagtcagggtaggaacactggtcccatatgtcagtggctagcactatattcttcctctctcccctcctctcttcccaatcccctccaaggtgacgagtggcatgaaggacagcacgacgagctgcagccggtgggaaacgaaggcagcgcccggcggagagacgggcggcataatgaaacctgattcgcttccctccatgagtttccaacggtgggccaagccaggagccgaaatgttgattggctggctcggctgagctgtttttcccttgacatttcttgaaaaggacgtcccgaagaaattaatgtctaagagtacaataaaatcgtgaatttttcgatctagggccggccctaggcctaggcgggttgtgcgaccgcctagggcccaggccagagggggcccatcacttaccccctcccaccccatcccggccaacaggcctagccacagcccagagccccagacgcgcgcctcaggtcgccctcaactgctcagcgaatcagcgatcagccagggagcagtgcgcgtgcgcgtcgcttcgcctgccgccctgcccaccggccccacaccatgagaaccgcagcgcaggcccaggccgagccgcgtcgcttcgtcacggtctcgccgatgtcctagtccgcgagaggccgccgtgagtgccgagaccgcatcggcgccactagcctatagcgcctgatcgccgtcgcccatcggccaagccgccaaggcggtatcgctgtcgacgcttcctatcggctgcctggatggtggctggtccctgccctgcccgcgtgatctgtgattgtcatcggctcatcggccatttcccattcgcccctcttcttcaggctgaaggtaggtcacagacctagaagtcaatcgacaagctttatgcagctatgcctctatcaatttactttgcaatttcactgcttcaggtgttacaatattacctagaaacatttgtcgggtgctatacataactcataaggtcgcgaaaaagctcttttttataagggacatgggatatttgtggtctcctattaaggtgttcatactaatttgtttctatggtatttttagttgtcaattatactattgatattatttattaaagattaaattgctctatcgcaacttgcaaactgcttgatttattatttaccgtgttaaaaatgtttatttgtgtcactctatggtatatgtgctttatagagtatactgtatgtattagaagtaaaaaaaatagatataactccttaagggctaactccaaggcccatagcgtcaagtctgcctagggcctccaaaatgtcaggactggccctgattcgatcttcctatcgaacaataagaaatcgatacatcctgatactgcccctgatctaccttggagacgagaagatagaacgtgctgtgcatccggatgagatgcaatggagaggcgtcctctgcatccgcctctcgtcttcttctcggcatggctgatgctgcttgtcaatggcgtaaggtcgctgcaattcaggagggacgacttacccgatgaccgtacgccgtcttcccgtcatccgtcgccgaggaggggattgggaagagaggagaggacaggagaaagaggagaagagatgggatgagagaaaggaggaagaaaatgctagtcactaacatgtggggtttgcgtgtcccacgctgattcaacttgccacgtcaactaaaatcagacgtaatactgcctaggatctcagatggtccggttttataaattgagatacttgttatatctggtatttcggtttaaggatgaatttcagactcggtgataaattgagggacataaagtgaacttattccctatatgtttgtgcacgtacgccagggtttgtagcggattttctatgtaatgagaaaaacataaagatttgtagtaacttttagggagaaaacagctctcttactcgatgggatggtaagaagaacaatttctcaagaattgaacgaaaaggaagaggaaaagaagccagcaaagcaggctgttaccctccccacagatggaactaatgggctaggtttactctatatctctgatgcaatcctctaatctgcaggcccatgtatactacgcaggcaacccaagacgtatacaggctattgctggcaaaaggtggccgaggggatcttctgatcctctgattaaaaataattactagatcaaaagactggccaaaacatacgcacattcaccccccattaacatctccaaaaatttcggtgcgtgttgtgcgcgcacaaatgttgagggtgggttgcgtacaacatgcatgttgtccaaaattagttgctcacatcatgcgtacgatcaccccttccaaaaaaaaaaactaaaactgagctgctatattttgagattgtcgaagtcaccatgagtgtctcactagtgagggtatgtcgcatgctactaaaagaataattagctataaatgcgagcacatgtgacaaatcaaagacttcaacccgttgaatcggttctaccacaagaaatctaattagttgaactacgcccatttcgttacttaaggtatattttactgcaacataatgcgagagaatgttgatttaatcttaatatagatttaattaatcatgccatgttgcgaacttgcgatgcccacatgcatgttgagcccattataggaaggagagagcatatgcatccatcatggcctttctcttctccgccagctgcccctctcatgtaacctgcaaaatgtgtagtagtagattcaaggtaaatgtggcactaaatataacttaaatttgtggtaaatctattcgatagttttgtttaaaagaataagtcattaataaacctgtaattttacgatagtgtatatgagccgtaaacatgtaattttgtggtaattttgtcaaagcatataaattattttttgagattctactcttaaggaaaattgactagatatattatcaaagacactggatgccaaaaatgtaaagtattctaggtagggcctattcactttgctaccatttttaaccataccatttttcggtaaaattgccaaaaaaaaaatctacgtttagtttgttgccaaatttaatcaatacataaaatatcctgctaaaattttggcaatattgtcatttgccaaaattttgacatttgccaaaattttgacattactcaaacttgataaggtttattttggctacaatcggaaaagacatgtaatgttgtcagggcctcaacataatctgttgcagtattatttccacaatttaatgcagcagatattctggagctccctgcccagatccactgagggcacccacaatggttatttataggctatctacaaaagatccatgtcagcatattttcctacttgaaagatattaaatgaagagagagagcaaagctatctactaacttagagatagtctatagagaaacacgaggcaatgcatgagagagctatagatacccatgtagacatactattgaggtggtttactattaatctagtctattgctgagatgtacatgttttatagagagcaccttactttaccattgcgggtgctctaacaggctgtctctgagcttgtccaagtgtaccacatgattcagctacttgggctgcttgtacactgccctactaattaaccaagttcagatcagctgcaaattaagagctaattaatttcaccatagttttttcaacgaatggttgttgccacagctgcaaattttcatcagatagctcaatggtacgaggaacatactgtccctcttgcacacgctacatgtatccttacctttaattttgtttttgccctccagctaccatggacaaacgaaaggttccaaatggaatggcaaacacaacaacttcagtcttggtcatttttaatgataatatggttagtttgcttccctagccaacagtatatgtctttatttctgtagcttatcgtttgtttaagagctgaagattctaagaagcgcaatgagctagagtttgataattcatttcactgctatgagaaactagtttatgaaatagttcagttcgagagtttggcttgcttggctagctacatatgcttttgccttccttcaaaaaaaaatgtgttggctggtggaatctgaattaggatgactagttttgtttttcgccctccagctaccatggacaaatgaaaagttccaaatgaaaatagcaaacacggaacttaaattttggtccttcttaatgataatatagtcaaaacatgcctttatttctgtagcttatgccttatggcatgtttacgagctgaagattccttgaataaacttacatggtcatgttaaagtagttttactgcataaatacaaaacaaatgtagcattttcgcaagaataaacttgcagaagtcgacatttctctattatacataattcaacaaaaatggtattttattttaaatagtgaatacccattgtaaataccaaaaccgcaaaccatatcatcacacaaagagataaatacgagaagcaatgcgcattttaataagattcaatttcacagtgattggaaacaaaatcaataatacgagttagctaacttaacatatttcatatgttttgttgttttagtagagaagaatatccttctagaaacaaaattaattgtacactggacaagtgaaaacaactacatgtgcaccggaggtatcagatcaaatcattctagtagcagtacatttctgtgtccgtagttgattgtctccatttaccctatccattatgcccccatttcatcatctgtttctgccctttcaacacctccattactgcctttagactcgtaggaccaaccatggacatggaggtaccatgaacagcccatgcttttttctactttcaaaacctttattaaatgcctttaggaacatgaacaacccaaccccaccctaattcaacccccataaaagcacttatccaacaggatttaggcaaaaagcaacccaaaaacatgccgcaatgtttttgtactaattatctttatttttataaaagagtgtaatagtcctcttaaccccaccatgactgcttggttaccccattctaaaaggatacctccatctttaactagtaaaaggcagatgtgtgtactgttgtgcatctatctctctaaacccaaaaaaaaaaaaccattggtcttaaattaaggtgaggttgagtagtggtacaatcttaatgtaagcgagaataatgcctatgaatctcaattcccgtttgaaatgtgggaattttccagaatcctaggagaattggactatttgtcctaaaaaatgcatagaagtcctatcaaattcatggtttcaaatggacattttgaagaacttttatataagttagtacaatttatgtagagacatggaaaaaagttctgcatatttcaaatggaacccttcatttcttacttacattgcattcgagaaactcatcacctcgtcatttgcccttcagctgttaatttttgaatttaaaaacttgattttgattttttttttatcaaagtttatttttttagcattggtttttaaaatcgccaaggaaatatacatacaacatacataagtttatccacaaatcatatttttttaacaagttatatggcttataatcagcattagaccaactaataaaagctgcatgttctaataaatagaacacgcatggatgataactagagctgtcactatatgcacgatcgatcagtacataacatttcttacaaaaaataatccttattccattttcacttggagcaaaggatcgccgctcctacgaattcaattgaaatggctcaagacaatgagattttggataaaaattagtattgaggttcaacctaatagtattactccctctgttttaaatacataagtcacattaacttttttttattagtcaaactatttcaagtttgattaaatttataaaaaaatacaacaacatttctaacataaaaaacatatttgatgttatatttaatgaaactaatttgatgttgtagatgttacaattttttctataaacttagtcagacctaaaacctaaagaaatttgattagaaaaaaaaatcaaaaacaacttacaggggcagttcagattgatgtcattttaaaccatacatttttggtaaagtttccaaaatgtacatacatttaactttttgccaaactttcataaatgcgtaagaaataatgccaaaatctttttgccaaactttcataaatgtgtaagaaataatgccaaaattttggtaatattgtcaacttactaaattttttgtattgccaaaatttagtgaggtttattttgactataatctgaacaaccccataatataaaatggtgggattagaaaattccaactagtcttcttttccttcttaaactcttaagctaatgtgttttgcaacttctgttttatacttctacttagtatcaaaatcctatatatttgctacttagtatcaaaatcctatatatttgctacttagtatcaaaatcctatatatttccccccattcaatgtaggggggagggggacctcaaaatccactcactctaccctaacccttgtcaatcccataacaaaatatacacagatggggaggataataaaaagtaaaaaaaaaaaaaaagaaagcctatgccccaggaacaatcaacaaccaaggcccattcccaagctcacttttacccaggaaacatgatcatacatgcatatgtacactcctgccccaaaagcaaggtaaaaaaaaaaaaagaaagccatttgcccccactctccctgtataaccttgtacccatccccaaagattcccctctcctccatccttgtgactctctcctctccatctccaagactcccaagtgctcttgtggtggctgtcccctacctctctctctctctctgcattagtgcactgcagaagtgaagtgaagtggagtaactccactgctctgctctgtgcctgaatctctgacaactgcacgcttcttgcattgcatttgcattgcatcaagaaaatggcgatggggtggttgccgagatctgccaccgccgttcttgtgctcttcttggtcttatggagaggtaggtaaatctgtgatgtttgatcttgttcttgttgttgttgttgtggatggttggtaatggcggcatggtttgttttgtgtgtgtgtgtgtgcgcagattggggggtggaggcggcgacgttcacgttcgtcaaccggtgcacggacacggtgtggccgggcgtgctgtcgaacgccgggagcgcgcggctggccaccacggggttcgagctcccgccgggcgtggcgcgggcggtgccggcgccggcggggtggtcggggaggatgtgggcgcgcacggggtgcgccgtcgtccaggacggcggcgcgggtgggggccggatggtgtgcgccaccggcgactgcggctcgggcggcgccgagtgcaacggcgcgggcgccgcgccgcccgcgacgctggccgagttcacgctcgacggcagcggcgggctcgacttctacgacgtcagcctcgtcgacggctacaacctgccggtgctggtggagccatcgtcctccggaggaggcggtggtggcggcgggtctctgacgtcggcggcgacgtgcgcggcggcggggtgcgcggcggacctgaacgcgatgtgccccgcggagctccgggcgggcggcggcgcggcgtgccggagcgcgtgcgacgcgttcgggcggccggagttctgctgcagcggcgcgttcgcgaacccgtcgacgtgccggccgacggcgtactcgcaggtgttcaagtcggcgtgcccccgctcctacagctacgccttcgacgaccccacctccaccttcacctgctccggcggccccgactacaccctcaccttctgccccgcctcctccccaaggttcacctctctcccgccattcatctgctctttccactgctgtctgctagctactgtcactcactcactgtcactgtcagagagtgatctgagctgcaaatctggatgcttagtgagctgttcatgttgtgagctagaaatggaaagaaagtgcaaggattgtagtgtagtagtaattaggtggaggagatcttggcattatctttagttaattagttgcagatagggtgaaaagaaaagtgcaaacccgagcttttgttttgtttcgcgcgattagtttactgttgattttgcttgcagccatggatttgattccagatgcatatacacacattgctcgtgagctgaccatgtgcgcttgttctttctctttccatgtcacgtggtgcgcagcggcagccagaagtcgacgacggcgacgccgacgccggcggcgatgatgccggggacggggacgccgacgacgccaacgacggcgacggcgatgcctggggcgacgatgcccgggacggcgacggcgacgacgatgccggggacgacgttcacggacgccgtcccggacaccagcatgccgatgccgatgggcggcgacgccggcggcggcggcgaagagggcgtggtgctgagcggcagcgagacgtggatcgccaacatggccaccggcgagctgacggcggcggcgtccctgtcccggccgtcgcccgccgcggcgctggcgctgttcttggtccacgccctgcggctgctcgtgctccggtgatgcccggcggccatgtcggcgccattgtagtagtaacaaaaacattttagtcatgagacgatgtgttgactagtgtgagtgggggtatttttgatgagctttgttgttgtactgtagggggtagtggtagactgtatcggttgtacgctgtagattgttgattaattacttgattaattaggatgttagttaattgcaggttttgaggcttttcacgatgagattagggcaagtaccaagggagagactcagtaaggcctctatgttaattagaggccatcatgttacaatagttaagataatacggtatctaaccattaatataacaaaatactttcttagtagtcatctttcctttattacactcaatgcaataaaaaaatttctaataaatactaagagtcgactctgtatcgttctcatactcatacggagcaatcatcttttatacgtagcaaacatttttctcttttttttttctctctagtccacatcaaccaatatgcttgtatgataataaagagagaccgttaataaaaatcattgtacatgccattagtcgtgtggttttgtttcttgtttaagggccggcagattcgtcgctcgagggagggcgacccggcacacgggcagccgggcacggcacgcactattacattatttttatactactaatctactactactatacttaattagcactactacagcatactaattatttacttaaccaattaacagtaaaatcgtgctaatagtacgactaaatcacttagctgaagtaactaatgttgatgctaatcgtaatgctaccggagtggagtaggaatgtacagaagcgatgggggtgtcgaggagaggggggcacatgcgatgtgattgttgagggcgcggacatcgaggcgcaaatgcggtgggggcccacgacgagagaggagatggacgtgacgggtccagtccggtccgtatgggtgggatgggcctagcctcctcggtcgctctttgccatggtatactagtactactggtaattgtgtaccgtgccaccgcattctgggtggatcgtcgattcgatctcctcaactcccagtgcggttattagtgcggtaatttttttagtttttaaaatggacaatttcgttttccccccaattttatctctaatattgattttgtctctacttttagggttttcgtttttgccccaccttttttcactgaaacagatatttacctctggtttggatagaagttagtgagaccgggtttatggcagaaataaagaatttccgaattagtgatttactttttacccctacgaaatgttaaccataaagagtctttctcctctcggcgacagacctagcccgtgtccaaaaaaactggagacctagccggcggcgagcgggcggcggcggaggagagcgggcgtaggctaggcgccgctcctcccggcgtgtgcaggagagtagccggggagagggtggcggccaagcggcacgctaggtggcggcggggagaggggtaggtgtaggcgctggtgctgcccctagtggaggtggaggtggtggtgttgctagtggtggtggtggtgagagaggaaggggaggaagaggagggaggctagctcaatggtttggacctcatatgtaatagctttatgagtgcttttgtttgaatgcatgatctggacagctacttgttactatgttggctatgatttgaacctgtaatatgtgatactatgttggttatgatgtgaacttgattatgttggtgcttgctatgaactaaactttgctattttggtgttggctattatgttgtcatgctttgagatacttgtaaggtacaatatgacttcatatgattatgtaaaatgttgttgaaattttgtcaaaatgctgccgaaattttgtcaaaattccttcaaatttaaattttgtccaaattgtaatgtcaaaatctgtcatttaattttaaacatattcaaaaaataaatttccaaagccattgcataatgggggcaaaaacacaattaataaatagatttgggggagggcataaatgtcctatttaacaccattaacttttccatccaaaacatgagcaaaattatctttcggtttaaaaagtgggggcgaaaaccctaaaaagtaggggcaaaatcaatattagagatgaaactatgggcataaacgaaattgtccctttttaaaaccacaatatacctcacgataatcgtatggtttttacgataagcatgcggttaacacaggaaccactaaatcctaggatgacggtaaccctaccttaaatgatttaagtaaaccctgactccaatgcacaacaccatggggcatgcggttggtgatcatcatattgcggtatcgacgatgagctccagccgagaagcacaggtttgtgaacataactaacacggactagtactctttttttttccgaggaatagtatacacgagctccatcattttttttaccgagttacaaaatgcaaaaccaaaagactctaaatccttaagcggttttgttcccggttttatttgacgtgacaactgactcaacatgagacccacgtgaacaccgcatgttagtgactacttatccgctccacctctcttcctctctcctccactcctccccatcttcttggcgatgaccgacggagaaaaggaccggtgtagctggtgacgggcggagagaacgggaggcacgacggccctcgcaggagaagcggaggcggccgaggcgatataacttcctcatttctgtcggtcatcatggtagagagggatctagtatggggtgctgaggtagcgacgtcttggcttcacaaccaccgcccgccctgtttacctcattcgctcccatccgctcgccctcctcatcctggagttggagacgaggagttggcttttcttcctccctcgaactcctcatcggtctaggatggcatttcagcatacacgattcagttgggtgtggtgttctagcaaaatctgtttaagtgatgatattaattccagcaaatctaatcttttgtgatagtagatacgcaattttctcatgcatatataggagagaccttttgggacgggagaagcgaccgtcgaattttggtggtttctcagctggcaaaacaatgtcatggggtcgatgtaaattacaatggtccttcgtatcacggcttcacgccgtgctttttttcccaacgatcttgtagtggtggtggttaaaatacaactatcatcttttcatctaaaaaaatcatcttaattaaccttttccccttcctttttgggaaagaatctgacggtatgatgcaaacgttgtatcatatgttaattgttaacgtgaatgttaacaatttttttgacaatataacatattttaccgttttgagctatatactttgacaaatataatatatttttaagtatttataaaatttccacaaataaaataaatgcttaaaaaaataggtttgaatggtgctagggtcgattatgagaaaatggagggacaaacatttcttttaaaagcccgaacttaaaaactagagagcgttcattagttagttgaataacacacgtccttgctactgcacttatgtatatctttacttctttcgttttaaaatagttttaagatataatgatcaatacttgattatagtactatgagtttaaaaattttcagaattgtattactgattagtatctactaattgattagtgatataagtatattttaagagagaggaagtactactaagggcacccacaatggttatctataagctatctacaagagatccatgtcagcatattttcctacttggaagatattaaatgaagagagagagcaaagctatctactagattagagatagtctatagagaaaaacgaggcaatgcatgagagagctatagatacctgtgtagacatactattgaggtggtttactattaa

SEQ ID NO: 26950 - DNA, 28842 bp, Oryza sativa
ctagagtggccatttctcgatgtgttatgctactaaaccatgcatgataatctatcactcacaattgctcaagaacttcttgttgaggtggaggagtgagagagagtagagagaaaaagttgactcttttcttagcaacaggtgtgataccaagtgcaataatagattccggaaccattccttgatgggttttaagatcgcggtgggaggtgtagaggatggtagcgtggtataggcgacgatcgttggcttccttaaccattacgaacttgtgctatgcaccatctttctcttgtacttttgtcctaaaatataaacagttttggttagataaaactattcttcctcttcccatgtgttatctcgggaacatgcatggcatcgtcttccttgtatccatatttcaatttcaactcttacacacgcctcagcacagtaaaacacatagtagtatggatcatgatcgttgtcgtccaaacctagaatcatcaccaatcacatataagtcgatcgccgtttgtttaaaaatattgttttatatgcacgaatatacatggatcgccaattatatactactatctgaagaactatcaatcaagataaatagattaggggaatatgcgtgcatgcaaaaacttctccttcctttctttctttctgtcgatctgcatcggaattgaagacgagaaaggcgatggagagcgcacttcaccaaccaagcaagcacagcaatgcacgcgtgctactccaaaaggtgagagaagctagagctactgaagatgcgatgagatcgagcaccaaatctaaaagccgggcaagcagctgctacagctttgatcggccggcctgccggagtgcagtgatggacccaagatatatacagaaaaataatcccagacgaccgaaggatccaacgaagttgcataccaagtttctcgaccaattttttgtaccctgtacgtgtagctactgggcctatacgtatggccaacttttgccttgtagttgatatggagtagtagtatgtgttaagctcttttctccctgggtttgagcttttggttgaactaattggtgcatataatccaacactatctccattctcaaaagaacgttgtatgtacttaaatatcgattattaggctaagaaactttagattcgtcatgaagaacaatggttatgtttttaacaattttataagtttttttataagtatattcaattagaaaaaagtggtgatttacatgtacgtatgggagacttcgtcgatgtcagtaaaagaatcgttggtactagcatttgtttctcatgtcacacccacatatttaattcacacgcgatttcttaccacaaaagctaatggcagtcggctgagtttaatttagcaacttggctgagcaacttcaacatattttgtgagtacacgcttttcaaactactaaacactagaaatactttataataccatatagacgtttctttaaaagaatcaaatgtatctattttctaagtgtaaaattattaagaattaattaattatttattaatgatctatctcgttttatgtgcaaccaagttaattggccgagctaaatgggcagttcaaacgcacgatagagacagacaaaatgctggaaagtttacataagtccatgggaattgtaaaatgcgtacgcgaatgtttatatcgaaagcccactgctttgaaattttcgtaactcggcctccagggaaagcccagtgtgatggatgggccgagaaatttaagcctgtcaatgaggccttaaagtggggtggtacgcatctttggtgatatttggtccatattagctgcagtacaaacaaattaatctagtttgtatagattgatatcattttaaaccatattattttttggtaaaataatccatttagtttttattaaactttgataaatacataaaaaattatgctaaaaattgacaatattgctaaaatctttaaaatttgataaatgtttatttttgctacaatctaaacaacccctaagactcagcgaatttatactccagagcaagatagccaacaagaacattaacaagtgcaaccaccaacatgtccatttaatactgttttgaattggggagactgaaggagagggagatgattgtccttttacaaatgattacataaatccatgattttttatgagtaaaatagattgcttgcccttaattaaacttatcctaagatgtcatctagtttcataaacttagataacatacatcttagatacataatctttgtttaatataccacgtcaagtccaaagtgctgcttgcgggactagagtactgaccagggttccccttattctttttgcgcggttaccgcacccccacgataaggtgattactacggtaaccgcgcgattaccgagaaaccacgagacgtaccgtggtttaaaaactgaaaaagttaccgtgcatggtaaccgctataactgcatagtaaccgcatggttttgtaaactatgtactgacgtggccatctaccgtgggtgaagtttcttatgcagcccctttcgttacaataatatcaaaatcggctctcataattcagcatgccaccacttgaataggagagcaggcgaagaagtagctatatattagggcgacattgatcatccacaatcaaattaaaggtccccatagcgagatatatgacgcgatagggagacgttaagtttgtgcacatacgaatgacccggcctatactcttccttcccttttgagccgagcaattaatttagaggttactgtagtggaaattaaggggttaaatgaaaaggtcccatcattatggatggtcatgttagctctatggcccatctaattaaccgatctcacgtggtacattaagccaaaattataggctctaaatgagcattttgttaagttatgggtctagatgacattctatgataagtttaaggattggcattgtattttgcctttctttaattaatgtagtataaaagaaattttgcacaccaatattgatttgacatttttgctttatgatcgatcgatcgatctatctatctatctactagcatcattattattatcaattattattatagctacacataatatgggcatcccattcttttacacgacaagaaataacagtgaatccccagtatttaagtggtaagagcataaacaatagtgagctaatagcgagaaaacggacaatatgccactgtacaggttgggctgggataaaataccactcaatacaatgcaccggatacaatacattgtctataggatgaaatgctactttgaagatttttgtgcccaaaatatccttggagagagagaggagatcaggggagcgccgtggagggctgcccgggtggcgccagaggcctcgccgggcggaggcggctggcgaggatgacggggggaggaggatagggcagcgggccagcggaggaagaggcgacatcgcctggcgaggccttcggcgccgcccgggaggccttccctggcgctcccctctcctctctctctctctctcgggacattttggacataaaaatctccaaagtagcatttcattcagtaggcaatgtattgagtggcattttatccgatgcattgtattgagcggtattttatcccaacccaacctatagagtggcatatcgtccgttttctcgcaaatagcctgcttacttaggattttaacacatgtgatagataaaagaaatagtagagagaaaaatcgggtactaattagttagcggccaagtgttgcacgtctattttacaactgatagcttcgttatgagccctcttcatgccacaccaacgaataggatgacaacgtgtgatcacacggtgtacaattcgttggatcaagatataccagtactatttagaaacttataccttaaattggtgaaagcaagcaaatagcctattctaaacaacaaaagagaggaaaaaaaaagagttttagcaagttttagagcttgcagctagcccttttgaactggctcaaacaacaaaacaaaaagggacaagagaagagatggcccactaatcagtgaccatagagtccgtagtatagagccagtgagtgacaagtgtcgcacagcctcgaacgcgcaacccccccccccccccccgccaaaactgtccgtacgatggggtgcatgctcccctcgccgcagcgcgcgtgcccgggcgccccgccgccgtcgctgccgccggcggaggacctcctcttcgagatcctcctccgcctcccgcccgaccccgactgcctccaccgcgccgcgctcgtctgcaggcgctggggccgcctcatccacggcccggccttcctcccccgcttacgcgcattccaccgaacacctcccgtgctcggcttctaccacaactcccgctccctcggcccctccttcgtcgccctcgccgcgcccgcggggccctcgctcgtgttcggcgacggcgactggagcctcctgggatgccgccacggccgcgtgctcctccgcagcgggcccggctggctccagctcctcgtctgggaccccgtcactggccaccgcagctccgtccgcctcggccgcctcgcgggccacgtccgggcctgcaacgccgcggttcttggcgaccaggacacccgccgacacggctccttccgcgtcgccttcgtgttcaccggcgagggccgcgcgtccgcctgcctctattcgtcggagaccgccgcgtggggcaggctgatcaccgcggggacagcgcgctgcggcgacgtgggcaagaagcccagcgcgctcgccggggacgcgctctactgggcgctcgacgacggccgacggcgacatcctcgagctcgacatgggcaaggagaccctcgccgtggtcgagccgccgccgcccgacgctctggctctgtacgggaggagcagcatccagctgatggcctcgccggacggcgcactcggcctcgccgtgatggacgtgttcagcctgcagctgtgggcgcgggaggctggcggcgccgatggcgtcgcaagcaccagcagctgggtgcttctcaagagcattgacctcgacgtgttcgctccaatgccattgccatgcgcaggtgggcgggtgattctggtgccgcctgtccggctgctcggggttgacgaaggtggcatctctgcgttcatatggacaattgaggggatcttcatgctccatcttgaagatgagatgctgatgaagaaggtggctgcttccagagtggtggactttgtttatccctattcaagcgtctatgttgcaggtataacatgcaatgtttttttttatgtgtttacttgctctcattttgaatttgatttgcctctaaatgtgtaattttcgtagtatctgaagatgaattgcacaaatgacttcaaatccctgtctgttctggttgagtttagttgcagttatagattgcctttctagtttgtgctttgtggataggaatgcagacatgcacatatgaaatggatgttagcagtatcaagttgatagtttactttgttgaagtgacttatcatatttcttgcaattcatggattcaagaggatgtaaaatgggtagtacgcagaaattggcttatcagaggtgcacctcaactagcatattgttaaaatgttactgtgaatatccaattcccgtatggtttgagttagtaagaacatagggcttgcattggtatccattttctaccataattgaatatatgtgccttttatgggtaagaatatagcttctgatttctcttgaatatatcattgaaatctggtaatcagctatcaggggatgagctaaagattgtactggtggatgtgaatggtgatcacatatttttggagtcatccgtatgtaactacagtgttgcatattgtagaaggagctatgctttaccttccatttaaaaaggaaaattctggggtcaccctcacccatatagaactatagcatgtttactctataatactgatacaacaacatctactatataaagtttgaaagtttttaaagtataacaaatgattcgcttagctattttaagctccgaagttactcatttctgtaagaaagctgacgaatttatgacatcataaattggccaaactagttcatgctcttgtcttttcagaattaactagctttcttcacgtcgtacatgcctgcaaaaatagaggctgtgatgtgggggtagcattgtagcaaccatgcacgacaatctcatatttcttttatttttcctgtgactgttcttgtgcatctgcaattcacaccatgagctttgttggtaaagattacatgaataatactccctctgtttctttttatataatgttggttagttcaatcatatattttgggatggaggggggtattcatttggattatattgtatccagtaacctttcatgtgtagtcttttctgattgcttttatttgtgggttacgttaaaggatggacacgaatattcgtttcatcatgcactacactgaactaattacagagagctttaacatgcattcttgattctagtgaccttcagaaagatggattctagtgaaagaacctttctttcctttggggttacccacaagtagttgtcaaattgctagaatttcgaattgccatatatgtgttgtgcgttaatgttgttacatatcccagttttgctggtttctgtgatggactgatggtcttccataatttggcctaactctccagtaatggcaggtggaggtggtgaaggtgaagatgctggtgcagttcatggaagtggacggctgtaggatctttggtttgcagaggtgttcaaggatcagctatgcatctgcactgctttcaccaatgtctaacgtattaagcacatactaccatataagtattattagctattctaacttatgttagatcacgcatgtttcagtcgtaaaaggccaatgtgtcagttgctctatgtttgagattacagctaatactccattgagcatatatttgctttatgcgaagatattatcagattatctttatgctccgtagttcttctgtaaacagaagatgatcttattctgtttgttctgtgataatccagcagctgctctagcctgtaggctcttctcagaagtagcagttaatatcttaaatggaaaattgatgattttctccatagttgcatgtgcttctacattttgtccaaagatattttttcttgatcttctgtaaacagatttgggacaaaaaacatgaagtacagtctgtacagacaacttcgtggcatatttgtcgaagcgcgtgcaactgtagagcgaacaataaaatttcccatttagaagtattctttgttgaaaagaattttaaaatcgtgaacacacggaattttgaatttcaatatttgaagcaaaacgtcagactttggctgccaaaattggggattgttgcatcaaaacctgaagaatttgcactgtgtatttgttctctggaacagctttggtaatttaaaaccataagaacatacttccttcattattttaactttgagttgttaagctttgaaccgacaacattttttttttcaaataatttagttatttgacattaaattcataccaatagactactagtcgatagtactttactaggatttcacattttaattttttttgaccaactcgatctgacttagcataaatcttaattggtcaaaattcatgtgctctcagtcaaaaattcaaaatggatataggaagcattagtgatatagaggttgatttgtggatgcatgactccagccaccaagtaccaaattttaatacccacgaatattacacatgtgtagctttcaatatgattttagtaagaccagaatgtgtcgttggtttccgtctcttaaaaagtgtgttaggaggggcacatatgtagcgacccacgtatttcacttccgaggtagaatatcagtctacggctcattcctcagcaagaatcaacttaccgagaaataggcacactagagtagcatagcagaaacagttatagcgaaacccattaaataaaaaccgtaaaaaaataacttttgccaaaataagcactaatagtaccttgctactatagaccttcatcaccttcaactctcagttgatgtagagatatggaacgattatttgctttgatcttgatcaatcatgtagaatatttcttcacctaattgttagctcaacactataaggaataatatatatatatatatatatatatatgggatgagtatgaatggtactcaacaagtccaactatagcaacccaacaattatatgctcataatccacctgcataatacatatatgtccaaagtcccataatccaacaaggaaattcatacatgttcataaaaacagtgttgtaaaagctcatattaagtaattatgaaatctactgcatataaggcaccacaggtattagaacctccgataggttcctttcctgccacgttcatagtttctacctgaaacaggaagtgacatatcacaattcatacactctccagaggtgtgtcgctctgtacccacagacgccttaaacattttaatactcacgcccgttagcgcttgaagcatacttcatggtgtatgccagcaaggctaaggtcataagcttttcatcaatcccatctatcaattatctctacgggtgattccctcaacaacggcgatccacatcatctaatcggatcccgcaacaacggcaatcctcatcgctagcctacgctcacggggttcacggaagtccttaagcccgcaggataaagccattaagaaagatctactacgctagcctgtcccattccaggtcatgtggtctataatacaccgagtttcaaattagtatatttcagaaaatattagaacagatgcgcaaaagtgcaatttttaaattgttgttcgaatagacgaccaggaaccatggatgcgtagggcttgccgactaatgcaaaatagactataagttagtttatagtaatcggagtccaaacgaagtctcggggattgaatcgatttggaccgttgttctcctttctagactatatataaccaacagtaaaaaaaaagggggcaaagagagggatcgatcccagccctagccgtctttatctgttttgggcaccgccatcgccggacgtcgccgctgtcgccgatcgtcgccggtcgtcgccacagccgtcgtcctccacagccggtcgctggtgagctgctgctccttctgttaatttccctgctgctgccgatctgatctcttccttgctgctgatgcatggcttgttgttgctgccgatcctcgttgctgcttctgctgttgttgatgatctgcaacgaatgctgctgctcctgttgatggtctgcaacgaacagagaggaggagggttagaaggcagagaagaacatgaaggagggagagggggaaattagatagaagaaaggaaatttggggaatttggtggatatttcaaaattcattgttttttttacaaattagtactgctaggtaattcgttttagtctctatttgtttctaatttatacataagacgatctgtttccgatagctcaaatttattttattggctgctgggctgaaaacgtatttttaaatctggtattaaaccatcgggattcagattagttgttctaaataaagtttgtagtcatcgccgatatctttctaacggcgctggtttcactcgattctgataaacggtttgagacaaacatcagaaacaacagtgctgacctggtccggaaatcaagatagcaattcgttttgtttaatctgagaccaataaagacttaatctgattttgtgcccaacatgaaagatgtagacaattttatctagatgtccgaagtagtattatttgctagatttcgtaaacggtttgcgagttacgcataaaacagtaatgaagctgctatatgttgtttaatataaatcggttaaagtttatatgttctaggtttcgattttagtgtaactattattagttgaacatagtggtttattcgtagttttgctgcataggtgtggggagatctggtgtggagggtggttcgtcgggttaccgtcaaggttaaaggcaaatgcatgatgaactaattgtgtgattcttggatcgtttactctatctatttatttctgacatatttttatgtgataagtgactgtttatgttcagactgttgtttacgccatttagatttcaagtttatcttatgtctatgacgttattcttgtttcgatattccggattctggttctggttaaataattcaagttccatgcttgccatggatgtgcaatatggtttcaatttggttctttgtttctggtttcagttattcatgttccatgtgagtcatggatgtgctacttggttttctatttatattcctgtgggtaagtgctgatcacgcttactcagctttgccggcaaatgctaggatgtattcacaattgtccgggatggaaactactatttcaattcatatttgtctgggatgggactactattgtctttaacttggtgtttgaaatatgattcttttcaaagaaagaaagttttctgttcaggctttattgcgcatgatgtgtatacgtgttttctagttccatattatacttgctgagtatttctgtactactataaaaaaagtatttctgtactcactcttctgtttatttgattttagatacacattgagatcgacatgcatgggcgggaagtagcacccttggattacacatttatagcactaaaaaaatttggttttagattatgatcctgcttagcataagttttgcgtagaatttgtaaatgtcaattaaagttatggttcgtattcttatgtgggatttatggaactaggatggtttggattgtgcgaattatttcattattgatttatcttataactgcctgtcgtggatgttcgtatttataggggagactgtcgaaatttctaataattttgggagttagtggttttgagtgtttttggtgtggcactctaggtacgtggttacctgggctgttacatagtcgacacgatcgctacgacacttgcatgccatataccagttgtttttttaaccttatgatgataaatatatgcaactgagcccccaccacaatgacaagtttagaatacatccataatatgaccaactgctccaacaaccaatcgaatccttcaacatatttattttaattgcagaaaatataattaatgcaaggtgatacatatagattgcaaatacgaaaatataacaagagttggtcaaaggtgttggacttgcttgagatacccgaaatcgaagaatgaataaatcaataaagaattctagaaatccaagataaacacccaactaaaagaaacaataaaacacaactaaatatgataatgtttatatgaatgcaatgggatgttctactcgaactcacatactggatctatataggttatgggtttgcttttattaaacttattttaagaaagagtagttattttgtttagaagaaatttgattcactatagagattttattccataatctctagatatatttctttaattagaacatatattttggtttgcttgacaagataatttataaggtatattttgaaggaatacttttatttagattatagtatgaaagattaagttatatatatatttacttaaaaaacaatttaatttaatttagaaatatgctgaagggaattaaaataatacatcagcatttgcaagaattaactttgaatagtttaaaggatttaaatgtcatatactattttttctttattttttaactctacctctaaattctattagcccatctacgaaagcccacaacaacacgatctacctagcccaccttttttctctcctctctttttctcattctctttctttttctctcgctctcccttgcgccgccgcatcctcaggtctcaccgtcaacgccgccgttccaccccactccggccgctgctccctgctccggcagccgctgccagcctgaatatgttctgtggctcctcatgagtctgcccccaagctaaccctagccatcaacccctctccaatcgatgctgctgctggctactgctctcaacgactgagattggaatttcccagccccatcgcccctgattcaagcatggctcagaccagccgtgtctccccgagctcccctctgatcccttctttccctacttctgtggtgtgatctaattggtgttctcttgtgtggtaacctattgtgaatttcgatgcttgtgaacacgtcctaatgacgaacttgatggtgctatactaaggattatcctgctgtctgtagggatgaatgaatgaaggcaaaaaattgcttaagggcatccaaaaaagtgtaataaaaaaagtgtaattagttggtggacaccgaaataacgtgagtttgttgttgggcaccacgaaaaactggtaattagctgatggacacttgcaaccttattttatgattctgcccttgcgtggctccaacacaatattctctcaagtcctcatccctatttacccaagatatttttgatgttcttgttagcaatagctaatcgctttttgggaattgaatttaaatttttctggatcacaccgtcagtccaaaagctagggaaagcaaggaagcagcggactcaccaatgcacttgccggagctctccttgggaggcggccgttgcggttcatctcgtccaagaagcgatcgacatacttcgatccctccttcctgccggccggacgtcttgtcgaggaagtggaggtcgcggagccccacctgcgcgttggactgcatccacgtcatccttccccccggtcgcatgcccatcccggccaccctttccggcactagaacgacgacgtcgacagcaactgctccaccccattcgccaacgccatggacgacagcatcgacagcaactacggagctcgagttcggcgagctctaccacaacggccagatccagccgcgaaccttgtccccgcccccgaatctcgaccctgacagcgatgacgatgacgactgctgccctgtgccagtacgaggctgtgagccatcgtcgcggagcggatccgcgcaccacacgcacaaggtccatgtcgtcgctctggatcttggctgggctctcttgcactcggctgggtcggaggagctagccgcgaaggcgtcgcatgaggatccttgatgccgcccaggtccctcgagctccgccgccgccacccaactgctggtcgctgtcgtcctactgccagcctcgtcgaactagaggaagatccagcgaagaagacaagtcttacaggtaggccccacagaagaagtttgacaagggtaaatttgtctttaatgagtgtttctctctccaatttctccataaatagtaaaataatcttaggagtgttcatcagctaattatcagttttttgtgatgtccaacagcaaattcgtattgttacggtgtccaccagctaattacatattttttgaatgccctgtagcaaattttgccatgaatgaatacttacataatatatcctagagtaaatgcagtactgaaattaaaagcacactaacatgattttgtccttataaatatgcttgcatgtagaataaccgaatttctgaaattagtggcacattagcaggattaaatccctgaattaggtttattgagcaatttacatgttctacaatttgataattatggcaagatctgtactttatatagttgaattataacctatgaaatctgacattgaatataaagagatggtgactgatttctttcgatgatttactactactatctatatgtcctgacatcaatgtatgctttacagaacaaataacacaatttatgtcatacttgattagaatggttgacgaggccaataattgaactattgatcaactaattatatataagaaacttatccagatgctatgctctaaatctaaacagtttctatagactatctactataaacgtctatggttttctactcattaatcttatcaccccaatttaattctttttactggaacacactactcatcttctatacctgtatatgcacattaatctgaactactggtgccatctggacttttactaaattctggaggttaaatccagtaagttattactatctctaattaactatttataaaatcaagattcatcttacagggtcttttggtctttactgaaccttatcccacataactagttatatatctagtttttaagcccaacagcacaattaccatacttctaagcaatataaaatatttcttgctgctagctacatgatgatgcatataattttgaactataactaatctttctacttgtcagctaaatcaaaatatttataccctattggttacacatgttctacaactgaaattattatatgttccttttactgattcagagatgctcttgttcatattctttttttttaataatggaaatgggctacatctccggcctctgcccgtaggcacacagccaaaaaattcagacgtgaacagaaaagttaaaaaaaggcgagatgggacaaacccccaacttctgccgatgatatgatctactaaaataatattttttttcaaaatcacgtgaatactatcacgaaattctgtaggtactacgccatccaaactggaataaaagttccttggctactaattctaagcgtgtagcaccattgcgcatagtatcctgttgttcctgtgaaagcatcatacaccaagagtggagccaattggaacacatgaagataacctgcatgatgttagacatttttttatggttaaaaactatatcattacggcaacgccaaattgaccaacataaagctccaaacaaaatcattttttttgtgggtctaggtactccccttagccagtcaccaaaaatatcttttgcattgtggggagagggatgttgaaggcaaagaagacacatcaccaagcaaaacgtgcaatatgacagtcaaagaaaagatgttggatggtctcttgtgtattacaaaaacaacattgcttgtttccccttcaatttctctttatgagattatctttcgtcaagattacttttttttgtgaagaaaccacataaatactttgatttttagtggtacctttacctcccataagatcctcttgtggattcttacattggaattgatgatcgcattatacatggatttgaccgaaaaatggccatttttatgtagcgaccaaataaagcaatcattttcatttgacagggttatgttagctagtcgagagatcaaattattccactcaactaactttggtcctacaattgatcgtcggaatgaaacattcaacggtgttgtgctcataacctctgccaaagtagaatgtcttttttggaccacattgtacagagaaggatattgatatttgagaggttgcaagcccaaccatgtgtcttcccaaaatcttatttccatcccattaccaggtttaaaagatccatactgaaaaaattgatcttttactttcattaggcaagcccaaccatgtgtcttcccaaaatcttatttccatcctattaacaggtttaaaagatccatactgaaaaaattgatcttttactttcattaggccagcccaaaattgggatgttcctggtttgtgtgacatgtgggagaggggtttaccctttaagtacttgttgcgcaaaaggttttgccataggccatcaccattaagaagcttgaatagccatttgcttaacaaacatctattcatgatatcaagatttaggacacccagtccaccttgatcttttggccggcatatataatcctattttgttaaccgatatttctttttctagctatcactgctctagaaaaagctcgatcggtagtaatccaatctttgaagtacacctcgaggtatttcaaaaaaggataacatgaacatgggaagactcgaaagaaccgagttaagaagaaccaatctcccaccataggagctgtttttgcccttccatgtgctaagttttctttgaaacctatcctccacaaatttccaatcagaatttttgagttttcgatcgtatatggggattcctaagtatttgaatggaaaggaaccagaattacaaccaaacagttgtctatattggtcctccatttccttagctcccccaaagcagaaaatttcacttttatgaaagtttattttcagccccgagagatgttcaaacacacaaagaatggccttcatgttttttgcttgttcaaaatcatgttcaagaaatattattgtatcatcggcatatgggagaatggacaaaccatcatccactaagtgtggaattacccctctaatttggccatcggctttggctctttcaataagaatggctaacatgtcagccactatgttaaaaagaattgaggacattggatccccttgtcttaagcctttgcatgtccggaaattttttcctacattatcatcttgttcatattctaatggatgagaatgcaacacacaactcctacacagctctgattgtccatcctgtggagaatcatgccatcctcaatccgcaatccgcaatccacaatattcaaagcatacatactaatgtgaattgtctggatcttacaatctggatcggaggttctcacaatgcaaaagcatcagtggtccaggttccaactaaaggcattgcctcgttggtatgcatctcttgtttttaatctgtctgttgcaaggttattaaggcggtatggcgagctaaggcgctgcatacccgcctcaacgctattgcgatatggcggtaaggcgtggcgatgccctaagaaggtaccctgctagcgattagaggggaaataaggaataatttggtatggaaaaattaaaaaatgacaaaacagaacatcaaaccaaccctcccagtaacctattggtcaaacattctggcctaaaagcatcgcgcattagatgtccacagccgccgccacatgagaaaaccaagcgaagaagagaggaagaaaaccaagcgaagaaaagaggaaggaaacaggagcccagccgagtagaggagggaagcagtggatgtagcagcgaggatgccagcggggacgtgagggagacaatctaccgtagccagagctgatggtgatgggaatcgtggattctgagtcatcgccgccgctgctagggttccagatgagatggaatcctctctctctctatatctcgcggtgatgttttagggtcaccataatccgaaattgctaattagcgcccagttgcgctcccccctccccgcgcgcgactgggcacgtggcgcgatgggggagggggagggctgagcgacgcgatgggggaggggtcacgtggcgctggttggttttttttcggttttttccgtttggtttttttccggttttggttttttttcttttccttttttgcggttttcctttcaggttttttctttccgatttttttatatatacgtatataaactttttatatgtacatatacaaagtttgtatacatgtatacaaactttgtatatacacatacaaactttgtatatgcatgtatataaagtttatatacaaacttttgtatacgtacatatacaatgtttgtatatgtgatgtttttttttgttttttcaattttttaatacgtacatatacaaagtatacaaagtttgtacacatcgtatataaagtttgtacatgtatatatttcttttgatacattagaaatatatattttttatagtagtagtactaatagttatagtagtagtgtagtactagtagtgtactgtagtagtactagtactactagggggcaccgcacggcaggctgggcgtgcgtccagtcgcttgtggcatcatcaatgtttactacctactttatgaataagggtgggccctgcatcagtgggtattagttgttgttgtagccacaatggtgaaagaacaaaagtgggtagtaagctggaccccacaatcactagccatgagagaaagatgagagaaatcatttgtttattccttatgactaggtagtaagtatatgacctggtattagttacttactactcccacaatgtatacaacctggtagtagtagtattttattctttattatccactttagatgtacattgtagatgctctgagtggatgtaaaatccggctcctctaactgctagtaaagagtatacaaaacagagttaaactaggaccactaggagggatatttcttgcaattgtctgtagcaggttcagctcacgttggcgacaaaaaaactaaaaaagtcacaaaagaataaaagcaaaacaagtaattcctccgttttacgatgtaagtcattttaacattttccacatttatattgatgttaatgaatctagacatatatatctatatagatttattaacattaatatgaatgtgaaaaatggtagaacgatttatattgtgaaacggaggggtagatatttagatgtgaagcatttacacatcatccatattttgctcctcaattttgtactacttatcgtacttccttgtacgtgcgattccattcattacttcttgtttgggtaaagactatcttatcagcttaagtgattgcgatgtgttacccaaaccatttaactcgaatggataaaagtcatgtgacaccaacatcattaaatcttaactaattaaaagattcatatttttccgttcgtcacatgattttcgtccgtatgcacgatttttcacccgtccgtgcgatccgtccctcccagagtccgagtctgtattaaaaaaaaatccccgagctagatccccaaatcaatcaatcaaccagacaaccaaaaacaacacgaaaataccaaatttaaccttaacctcatgaatttgatcaccacaagaaacctaatacccatgtatttcctccctcccaatccgatccgatccggcaatacagaaagtcaaacaaaggcaatcatgtatgaatttgctggcaaacaagaggcagcaggaggcacgtcgggttgcaggcgacgtgcggcggcggaagtgtttggcgcggtcgttgggcttgttgtaggatcgagatgtcgactagaggggggtgaataggcgatttaaaattaaatgacacctaatcaaaactaacctaagttactaggctcggtgagggacaagactaactaagcaactaagttatgttttgcaatcctggggtgaaagtggctcaagtatatcactaggaaagtaaatcacacttcctaagtctagtttagcaatcctagggtgaaatgatctctagtatgtctctagaaatataaattgcacaaatgtaaatgcaacaagtaaatgagacaaggagacgagatttttgaccgaggttcggaaactcgccggtttcctactccccattgaggcgatctcaactccaccgctcaaccacgaagccaccgtacgcccccttcgtcaaggggtgggcaaggcgggagccggcccacggagaggactacccaagcctcgatcactagggtagttcttccttcactccgaaggtggtgaacttcaaaccactcacaaaccggcaccgggcctcctccacaattttctcggagaggtcaccgggaaactcctccacaagccgtctaggaggcggcaacctccaagagtaacaagcaatgacccggcgtggagataatcaatcaagtgccacactagctctacaatggaagcaaatgcacttgactcttggctagaacaacctcaaccactacaatggatgaacactaagctcaaaggtgtgtgagagaggtgcaaggggtgtatgcaattgaattgggtgccaagagaatccccttgttgctggagggggagtatttatactcccaccaaccaaaactagccgttgggggcgaaatcccccaactcagtgctctgccggtctgaccggaggtatgtggccggtcagaccatactactctacaacagctagttttctagccgttgcagggctgtcattgggccccactgcctaggccggtcagaccgacttggggtggccggccaaacgggcctcggctcggttagaccgccatcagctcggtctgaccgaatacggctccggcggctcgggatcgacacaccgagacggcaccatccgggccatatggccagccggtcagaccggcccgcacacaccagtcagaccggcgttgatacggcggtcagaccggccctgacatggcggtcagaccggcgacgccggccggtcagaccggcactcggccagcggtcagaccggccttggcaaggccacacaatgagcgcacaacttaaaatgtggggagagtctaaaagcgagcacaagtctaaatgcataatgacctaatgtggcaatttaaaatcatctctttgctaggtcattacccctcttaatagtacagcaaagctataaataaactagcacaattttgatcgcctaacgccatgatcaaattaaaatgaaaacactagtttaccgtcttctcttcctttagctttgtgccgtcaattttaattgcgcacacataatgtgaacctaacttaaagatatagctcaaaagaatggttagtccacaattagcgcttgtcattaattaccaaaattaacaccgggggcctagatgcttcacttgtggacaagctcgacgcgggccggcggcagggatagcatcaaggcgaccggcgcatttggtggcggcgtggctccgaagcccttcctcctgctagatctggcggagggagggcgcctctgggcggccgccgctcctcccgccgcacaccgctgccgtggaggggagggcgcgaccatcactaccgatgccgcctcccgccgctgggccgcaccgtctccacctgccgccgccacctgtcgtccgccgcctcccctcttgcgccgcggcctgccgcctcggctctgagagagaggagagcaaaacgagagagaagaccgacagagaggagaggaaaacgagagagccttatttcctcggtgggccccgccgaggggagggcgccgtcagccgggcggagggcgccgtgcgagggggacgggaagcggcgcactggtgaggggagaggggagggcgtcgctggctgcgacggcagtgggggagagaacaccaagaaagaggaaaaagaatggaggagagagggaggataagggaagtcgggggaaaacgagaagatgaggagacaggaaggatcgagaggcgccgctcgctccgcttgctctctcggtgataagtatcagatctgacgggcctttctttttaaaaaaaagagcactctgtattttaaaaaaacaacacaagtataccatataatcggcacatatagggatttataggggttggtttttaatttttttcggtttaaagtctaatgggtctttcttttacaacttttttatttctataaggaatatttttttaagggctcatatcataaaaactaaatcctaatcatctactatttttatatttgttataattttagtttacccgtagcaacgcacgggtatctatttattaaaattgtttaaataataaaaaaattcttggcctgtccgtctgctctctttttcctatgtccttgtccttttattttgtcccctcattgtctaatcttctttcattttttatgtcaacttattaatatttgacctcaaatacaatttgtaaataaaaaaacaatactcactctcacaaaattaataagatttatttttaagatttgttaaactccacacatttttattaggtaacaatacacaggtacattcgcacaaatgtaaagtgagtatagtttaacttgataggtttcttgtggtggaaccagtcaacctgcattcaaatatttgatttgacacgggtgctcgaggcgttcgtggtaacttcgtcaatctaaatactcgtgttgtgagtgcgtttgcactatgtgtttctaaaaatatatatattctcgcaattcaaagtacattgagtacaaaaattccactcgtgttctacataaaaaaaaatatttccgttcatgatacaaattttcatccgtcgccttttgggcaaagacagtcgcattattcgtccatccattttctctcatgctacaaatcatccaaactaaacatcatttctacaaatatagagcagattatttatctaaaagcaaacaatttttttagcagattagttgactaaaccaaacaacaccttttgtcactgtacacattccgtaatcacccggtgcaacgcacgggcacttttgctagttaaatggataaaatttagaaatttattcgtgtcgttttccgaacgcaaattgcagattgttgactccatctggtcttctcccccaatttcttgctcagttttttctacacccagttgtacgcaggttacttattggatcgatcatgcatatcaatgtgttgaccagttcttgatgcatatacaattgtgtgtcatctcctaccttacaataacaactaatctggcctgttgcattgcaatcagagcttccgaccttgcaaagaatgagctgctaaaagcatttcagtgacagctcgagagtgtgtccaaacatgggggtttctccatggattatcatcttcttgttgagtgttattgtgctggtttttgtcgcttcggccgacacgaacgcaagacagtaagtatagttcagttcctcttcagtatttgttgctgcagtgctaattttgatgttcttcttgtctatctctgcagctgctggcctcaatgggattgcaggtagctgggacacggacaccaaaccatcgaactgggggaatggcaacgatccatgtggagacaaatggatcgggataatttgcaccgggaaccgggtcacgtccatgttagtatatcagcatcagagatttgtatatgtccatggagtgatttttttttcttgcaattatgcagtaatatgagtaacaaagatcactcatgttgtcttcttgtttcatggtgtttttacagaagactgtcaagttttggattgtccgggacgctttccggggacattcagtccttatcagaattgcagtacctgtatgtattctcttctctctgtagtttgagcactttggattgcgaattaggcgtaaacatgtgcatagttggaaatttggaaatttatgcaaacttctgaaacgcttctgtttttgttgcagggacttatcctacaacaagaacttgcgtggaccccttccttcaaccattggaaccttgagcaagctccaaaacttgtgagtagtttaactttggagaagttcagttagtctgctaacttgagatttttcagtcagttcatggattcttgtttgacttgtcccctctcatttctctgcagaattcttgttggctgcagctttactggtgaaataccaaaagagataggccagctctcaaacctgatatttctgtagggaacttagacctgattcttgattatgtctaaaatcttaggcctgcggtcgcattccctgaacttctctagatcatatctaatctgaaaatagaatacatctaatagatttatagtctggttgaaaaatgttttaatataaactccatcatttgaaaaataaacaatttcgaactttattggttggacttttacctcagaatttaaagttcacctagtgatgtagattgacatgatggtaacattgtatattttaatcctaattttaaaatatggcaggtaagattatttcacttattagccaaccatgcttatacagagtatccattatctaaaaaaatgcttgtacagagtaaacagcaagtaaaaaaattaattaatttcctcctgtgagagtattacctccattgggataataggaataacaaccaaatggatggcctaaaaagcttaactacaaaaaaaatcctataagcttgtaacaagttaagaacttgatctggacatttagaaagataagtgtgatgcagttaaaccttttcccttttgggataatcaagtaccttaggtatggaggaggtggttatctggttttattagttggtaatattgaattctcaggcctggtgttcatctattatattattaaaacaacctttaaagaagtcaccatattcaccgtgaaagctagaaattctacattaatcgaagaaaatatgaattatttacaccgttagattgttatgtctatattttaacgtctgagaaaagccttaatgacattgccaccatatattttacttagcaacctaactagtagcaaacacgaagctttcttctatgttcctgtatcagcctttcacgcagtaatcgctcgtcgtaatattctgcacatatagtatcagtataatattgtacatttcctaaataaaaaagtattgttcattgtactctattcctacagatctttgaattccaacaagttcaatggtagcataccgccatcgctttgctgcctctcgaagctatactggttcgatctgtctgacaatcagctcactggaggacttcccatatccaactggacaagtcttgggttggacaatctaacaaacactaagcacttgtaagtaaattacaatattcttgatttcataagattttttttcattttctttgctgttgtctaatgaatatgtacacacgtttcgtcacagccatttcgggacgaatcagctctctggaaccatacctagccagattgtcaactcaaatatgaagctgatacatctgtatgactaaccaaattcttcatcctcctaaggaataagtccactttgactttcttaaaagtgacccaaatctaatccatgaccctgaaccacaaaaccagatatgttgacccctaaactgttaaaaccgatgcaatttgactccctcgacggtttcgctgatgtggcacgttacgtgacgatgttgacctagtcttcgtcctacatggtattgacgtggtgcttacgtgtcattagaattaaaaaaatatgtgcgcccacttgtcattcacaaaaaaaatttgtgtgacccactgacaggtggagcccatatgttagtctatcccttcctcatcctcccgatctccccttctctctcccttttttgttcatgagccccagttcgccatgccccatgccgccgtcatcgagcagccagctctccagcatcgagaacgccggcgcgggcttggcgccgccagtggccatcttgctgatctccgtcgagccctctggcgtctgggcagtcgccgccgccatagccaatccggcctccacctgctgcaaatgtcttaaggggaagatggcgacccccttctccgagcgacggtcggcgaccacagcggcaccacgccgcccctctcctccttcctgcctccgctcatgaatgtagccaatccccttggttgagctcggagaagatagaatcagcgccgccactctccctcccgttgccgccactccggacgccgcctgctgttgccggcccctgcttgccgaatggggagggagagagaaggggaggatgaagaatgtgggccccacctgccagtgggtcccacaatttttttaatgacaaatgggtccaacatattttttttaattctaatgacaagcaagcgccacgtcaatgccacgtaggacgaagactggtcaacatcgccacgtaacatgccacgtcagcgaaaccgctcaccaaaaccgtcgagggagtcaaattgcaccggttttaacagtttaggggtcaagatatctgattttgcggttcagggtcatggattaaatttgggtcagttttaagggagtcaaagtggacttattcctcatcataattgtgtttaattattgttgttaagctcagacctgagactgatttctaccatctgtatattatccaggcttcttgacaacaacaaattatccggaagcatcccttctactttaggccttcttaatacattggaagttctgtgagtacaagcgcatattatggatgagacaataaaattcatagattgacactgctgccttatgtcatgaagttcgatcgatgcaggcgtttcgataacaatgcgcaattgacaggaccagttcctaccaacctcaacaacttaaccaggcttacagaactgtgagtttactatgtgtgtctgctttattaattgtcaattattcaatattaatagcttacgcgctatgctttcatttgacactagccatcttgcaaactgcaatcttactggtccactgccagacctaactggaatgaacgaactcatgtatttgtaagtgatcagtcaacccttccaatgttaaaactaaaattgactttccatttatcatactatgcaactttctggatggtttcatcttactaacttgcaattcaatttgttacaggtacatgaacaacaatagcttcagttcatcattatttgaataatcactagccgacgcattataggctgaggcgctatcagattcataatttacatacctaaaataattatttgaataatcaccagccgacgcggtatatatatccattaaaaataggtctaacaacatatgtatgagaattaatggtacttgtaaaattattttgagaaacatatatatttgtaaattttacctcaggcttggtgtagtagggaaacggtgtagttctatggtatgctcgtccatatgtgcctttagcacagaagcttaactcctagtacgatggctgtgtacacttaacaaaaaatctaacaaattgatctgttagtgcaaatagaagcctttgttcacacgtagcaggatcgcagcactggcgtatgtcttggctccctgtacacacgacgaccacttaacccgagattgctacctggcgatggatcgccaggggcgatcaggattcggtcctcccttccttccacctgattttcttttttggcaccgtattactttcctaaatttatgcatctaaagtttgtacatttcaagttcaagtttagggacccaaaatttataaatcaagtttatatatccgattcaaatttaaatttgaattcaaatattttttatatatagtacatctaaagtttatacacctaaagtttataaacctaaagtttataagtcaaaatttacatacccgattcaattttgaatttgaattatatccgattcaaatttgaatttgaattcaaatattttttatatatagtatttctatgcatctaaagtttatacacctaaaatttatagacccaaaatttataagtcaaaagtttacatacccgattcaaatttgaatttgaattcaaatattagtttatagacataaagtttataagtcaaaagtttacatacctgtttcaattttgaatttgaattcaaactttttatatatagtatttctatacataaattttttcaactttgtgttttttttaaaaaaataatttatggtgtagtaggaagagaagaataagaggaggaaggaagagagtagtgtataggggggatggggttgggggggtgatctttatgctactatggttttgatgtcttcttgtgtcgctatctgaggtttgaaagtgagtaaagatctgaagctaaggtaaataataggttaaaacagaagaatgataagaataaagtacctctctgaatagctactttcttacttgactttctgatcaatagaaaaagacttgctgtcctcaagttcaaggccttagagtgagaagggaattacgtggtacctctctttttcaataagcattctaccactaactatgtgcctggctatggtttgtcaactcttaccttttggtatgagaacggatgctggaggtaaatggatacacagctactgcctgacttctcagatttcagtatggaacaaaaatccatcttggctagctattcgggaggacttctccatcggatcagaacatgaattgtagggcatacttagtagatgcagatataggtattcattattcttcctcagatggggaatgggccaagccgatccgttgttggcactgaaagtgcatttgctagtttgaaaggagctgaattcgggtgggattcaaaatgattcttatgtttcgtagcatgcagcgcagactcacttggtaaatagccttccataaaagaggcaaggtgctcacacatgaaattccctttcttcgtgcactcatttactagatagtcaggaaccttcttttgacttgaccagcttacttgtatagtatagtagtaggcatttgcttctgaacgaccttacgaatggatcaactagaaatgaatcggtgtcataaacgaatttagctaaccgttgtagtaaatagcatgacaccaagcaatcgatcaaagccaactcaaaagaaagcccatcccttcatccaacgtgaaaatattctcaagaagaagccaaaagaaagagaggtgaaacagagtagagagaatcaggtgcttccagtgattagttatcaaaaagcactgttttccagatcggattcgatcacagtcccgtaagcagtagggaccacgagtgagcatgagcctatttcgtgatcggctagttgctcaaaaaatcgtataaaaatcaagcaaga

SEQ ID NO: 26951 - DNA, 809 bp, Oryza sativa
tgccagtggaaggctttctgcgttcagtcaatctacgcagagtgaatcggtccctaaggaaaccccgaaagggctgccgtccgatgggtacactaaagtgacgaagttgctttgactactgaaccatgcctggatcgtcggagcgaattggatgatcgagccgagggctgccccctcttcccctcgctctcctttccttaatattcaccgtcaagtcatcaaagccgtcaactaattcagaggggctcagctggcccggtcgccctacgctactggcgcttcctaaggcgaagctctcgtctttggcaaccagcaaactcagggctaaaacctgtagttttgaagcaagggatgagtgcgaaagccattgcgcttccgtacacgtgcatacgttttcttgcttcgtcgcgcgttagtacaataacgcacagccgttttcttgctggggcggacacggatttctctctaaaggcgaagactcagaagtgggcgaacactcggcccagcgggcgaacatgccggctccggctccgcgcacctgttgacacctttcgaagcactttcacgtgtgaaccgaagtcgtcttgccgaactccttcctttcttatttcagtccttgcctttttcatcttccgtaggggcctttagtcttttgattagactagaggtcgcgagagagcagagcgtaccgcccttccatagtcacgaggatcttaatagtcggtcgcgactattgtcatagtcaacgacggttgaaacttcttggaaaaaacttcgaattgggagggcgatcctcccggtgagctgac

SEQ ID NO: 26952 - DNA, 25840 bp, Oryza sativa
cccaactatcccacctgaactaaccagttcattaagccaatttagggtgagaataatcacggtgaatctggtcgatcgcccataaccgcgagcaaggctattcgaatagttttactctggccagaggtgcacaactgtacccacaagacacaatccaccggcatgtcaccatgcctgcgtagacacgtgaccatgtcgagtgattgtgacaagacccttcgcataactctcctctaaccatccacaccacgctgaggtttcacccccacccctaccccgagagtgggcagtccccccatgcaccgcggtaaatccagcagctggacaaccggacactcggccgacccaactccatcatgcccaccctcgccactggtgcctaggaaagggtctgttgatgcgaaaaacacacactggcctaagagatttgctttactctagtgcaggtctaaagaattgctttcggtttctgatcgtgccagttggtttgatcttgcaaccaacaagaaataacagaaacacagttaagtcttcaaacgatagccgatcggttgtactgccgatgacgtatcgttcaatattaggccgatgtgatgtgaaccagatcggcaatgaagaatgaagcaggataaaattaaatctacccgatcggctgtagatatcaatgatatataatctatttctaaaaatatgtttaaaccaaagtgattgggatagatcgaacagtttgccaagacagtataaatcacttatgtttaaaagtacttcaagatagagattatatatattcatagcatagccgatgaagtaaatctaagatgtatcggctactccgatactactttatactaagatgttaatacagacaaaatatactaaacaacaagcttaatatgtttcaacgcagcaagatcttaatataaagggcagatttagcatatcgattaaatataaggaacaagacaactaaaccaggtaagatcggctgaaactccgatattatctctaccgataatcatagaacaagctaaattatggttctaaatattacttaatagatcgaacctaaccgatgcagcattaggcataaagagaaacataagatttgaacaagtcgatgaaaacctctttgagatggtagatatactatataacctagatcaacgttgatatctaaccctgtcggctgccctctgttggtagatgttagccgatttagggttagatagaaatattgatagagattatatagcatatatgacaactcgacgatttacataaataggattagagtatcatgaagatgtcagcactaatcacgagaacgcaagccgccataacaagttttacctcttgccggagatcgaacccgatgcagcccgacttgaaagcaagaattcgtcgaaacaaaaatagaaaaggtggcgatgcgccaaaagtgttattaaactgattgttcttcatttacaaggtcttgggtcatatttatacccaaaatacataatatgtccttgccggatacgactccaaatctgttacaactctaagatacgaacaagtcttttaggcaaacacttgccgacaaatatctctaaagaaactattcaaaatactctagttaatagatacaattgcccctttttcggatttatcccaatcgtggaaatacttgctcagcacatcaatcgatcccgaagatgattctagaaccaccttaccaagatcggctacatcggctgttctttgtccgatccaatgtcagccgatgcagacgttagccgacgtgcccccgtagccgacacgtactctgtttatgagaaacgatctcctatcaaatccgcttcgactttagctttgaatttgatgcatgatttaccaaatttggtcatcaacagggtcgagctatactacagatcaagcaattacccactcccgcttgtggtaagcgttgtatgtcttccagggtttcccgtgaactggtccttaattgctataggtgcgactagcaaaaccatgcacccacaacccaccattcagtcgcattttagttggataattacgaccaatgaaacattataacgccccaattttcggtcgggattaaaaatcaattaataatgcatttccagaaattatattaaaaattaaatcaatttaatcaagtgacatagtgagggaattaaaaatttcctttaaaaatcatggccgaaaatattttgtaatattctctgtgccctaatgtactctctggatttttccacgaattttcagagctcaagaaataattttaaagttacaaagttcatttaatcaattaaaataaaagcaaacaattttaaatctccatccttgtctttgggccgctatcggaccaatcctccatcccctccccgcggccttcctactcctctcccttatcaggctgtcggcccagcttggtccctccctcgcaagtccatgccgcctcccttctcctccctcctctccccgagttgcctacagatgggcccatattgccgggctctccttgaacctctagcctgggctggcagccgccacggccgcctgagccgcccacgtcgccgcctcctccagctccccctcgccctctcccgtgcgggcccgacgctgccccactccctccactctccttcccccactcccttcgcggaattcggcgccgtgccgccgcctctctctccccacgatgccgctccacgttgccgccacgcccggccacggttttccctccccgagcctataaaatccatccccgggatcccctcgtccgtttcctcctcctccccgagcttctcacgcccccttccgctctctccacgccgcctgccatttccgccgcactccggcgagcttcggccacgcgccaccgccgctcagccgtcctcgttccgtgccgcttgtaccaccagcatcgccactccttgccgcaccttggcctccgctccgcgccttcaatctgccgccgaagcaccacttccaccgccgacccgagctccaccaccgcccgccacacttcagccgcctattgccgccatccccgtctacctcaggttgtgccacctatttccctctctccaccgccgaatccccacctccattgcaaacccgaggctaccgccacattcgtcgcctccggtcaccgtttgccgccgctcccggccatcctgagccgcgccgtggccacctctggcgccgccgcatacatccgcaccttggccgtcgctcctcaccgctggaatcccccgctggcagccattcccctcaacgcactggtgagcacctccacaacctccgccttcggcccatgtccccactcatcgtggacctcatccctctccctaactcctcttaattgaatccccaggtcaccccggtcaccgtcagctgcctcgcgctcgcggtgcgccatcggactgtcgccgcctccctccgtcccgaggagagccgccgcccctcgtcgacgctgcttggtaagcccccatcctcctccgcttcatctccccggccgcctcgtgccgcgccgccgtcgccggtggccgtccggccaggccgccgccgccgctcccaccacacgccgctccagcgccatcgccggctatgctggtggccggctggccgcctccccttggtcccagccgcggccgatctaggccatcgaatcggcctcggcctccatccgggccgcccatgtgtctgcacacgtggctgccatatcggtgctccgtcggcgccacgtggtgcgctataggccaaagcccttgagtcaccgacgtgggggacccacttgtcggcaccaccccttccctcggtggctggcgtcataattcatttaaattgtgcaataatccggtaagaattataaaaaaccatttaaatggctcaaaacttctaaaattcataactaattcatacgaactccaaaatgagccattcaacttgcaaaattcatctaaaattgagctctacatgtttgtttactttttatgtactgtttacttcatgttcattagggtttttcctcgtttgtgtgccggcgagtagatttcgccgtttcggaagtccgcggtcgcgaggaaaagaatccctagttctacttggacaagggaacatctatgggtataaatacaagaccccctagaaggaaaggggcacgaaacagtcaaaatagacaccaatacccaccgccaaacatcgatatcagagataagcctaaacatacccaatttgtcgcctacggaggccaacaagagggatctagcgttatctctgatctcgccaagtccatattcgaggaggaagactaccccatcgtcgactacgcgttagtgttcatgccgccaagtcaatgacggctagatgggttatccaaatattgtacttgtgtgattcttttgaataagagcaacaccggcttcagccaataggagtagggctatttatctgattctgatgaataagaggcccgaacctgtacaaaaatatttgtctccgtctcttttatttcaatctcgcatataccggaggatcttgtaccaagatcccccgtaattttgctggtttctataatggtcacccataatttggcctaacttaggtggtgaaggtgaagatgatggtgcagttcatggaagtggacggctgtaggatctttggtttgcagaggtgttcaagggtcagctatgcatctgcactcctttcaccaatgtcttaactcctttcaccaatgtcttaacgtattaagcacatactaccatataagtattattagtgttgggatacgcgtaggctacgatagcataaatcaaaattttctatcgcgtaaactaggaaccatgcaagtattagatcatagatcgttaccactcgacgcgttgcgcagtggaataaggcgctaagaagtcgaaggaattctcgcgaagtatcgcgcgtcgatgtagaggaagtagtcaatcgcaccggctcgacgttctcctcctcatgcgttctcctcgccgtattcccacgctgttcagcaccgcaaaccagcggcgcctctaccgatatccacacgtacagggacggaacgccacgcgcagatgtgctagcacccgcgcgcggctagggttttgctcgggaggggagtgacggctagggtttctcacgtgatgcaatacctccaccggtcacacctctcacgaatatataggatccatcactcgggcctccaaggcccgtagaactcctattcagatccctatccgaattaagctcatattggatctccatccaatccccttattctggcccattaagtgtgcgaccctgtaggttcatgtacactcggctgtaacccgaaaactccttttcggtccacgcgtcaacagcggcccctagcagaacgtattgacccaccggtcatacataaagatcatatcggctaaacctctagtgtatactttatgaacccctttgcctcacgatatcgattaagctcaaggctagatatatgccatcctctaatagctcaatcattcacttgaacctgtgatagattatttaacttatgattgactcctcaatcacctttggcatggccatgcacttccataatctacaacatagagggcccagagatatctcttcataggaggggcaaatcccattttaattattcatatcccactacatgtttcacaacatacccgaaaactacttttataactacccaattacggagtagcgtttagcagtccctaagtaagctactacacatgttggaaaccataataatctcaggtctaaggattcaacaccaacactaaatgagattactgatgacacaacacatatggctcttgcagtgtctcatgttgggtctatccaacaacatgttccccaacatatgtccacattattaatttggtatctctataccatgatccatgagacatgataatcaattaatacatgtgctgatcatctaaacatatttgtttcacatatgatatttgatcagggatcctttagaaatagtaacaaataacataaagagtctcatgaaagaatcacatattcattaaccaataatgagttatttatttcaatgaacaaagtcggataaatatgtaaatatagtatgtgatataattatctctatgattgcctctagggcatgtcactaacaattagctattctaacttatgtttgatcacgcatgtttcagtcgtgaaaggcaaatgtgacagttgctctatgtttgagattacagctagtactccattgagcacgtatttgtttatgcgaagatattatcagattatctttatgctctgtagatcttctgtttaattctgtttgatctgtgatgatccagcagctgctctagcctgtaggctcttctcagaagtagcatttacgtggtgtttggatccatgtacttaactttagtctttgtatttagatatcaatttagagtattaaatatagactacttacaaaactaattaaataaatgaaagttaatttgcgagacaaattttttaagcctaattaatctataattagagaatgtttactgtagcattacgtagactaatcatggattaattaggctcaatagattcgtctcgcgaattagttcaagattatggatgggttttattaatagtctacgtttaatatttataattagtatccaatcatccgatgtgatagggacttaaaagttttagtcccatctgaacagcgtcttaatatcttaaatggaaaattgatgattttcttcatagttgcatgtgcttctacattttgtccaaagttattttctcttgatcttctgtaaacagatttgggacaaaaacatgaagagtctgtacaaataactttgtggcatatttgtcgaagcgcatgcaactatagaacgaaccatcaaatttcccatttagaagtgtttttttgttgaaaagaattttaaaatcgtgaacatacggaaaaacgtcagactttggctgccaaaatcggggattcttgcatcaaaacctgaagaatttgcactgtgtatttgttttctggaacagctttggtaatttaaaaccataaaaacatacttccttcattatttgaactttgagttgttaagctttgaaccaacaatatttttcaaaataatttagttatttaacattcaattcataccaatagacttctagtcgatagtactttactaggattttacattttaattttttttttaaccaactcgatctgacttagcttaaatcttaatcggtcaaaattcatgtactctcgatcaaaaattcgaaacacaacttacaaatattacgcatatatagtttttaatatgattttagtgagattaagatgtgtagttagtttttcatcttttagagagtgtgttagatggggcgcatatgcgggtatactatgacgttatagtgatgtgtatacgtgtacgtctatcatgtaatcgaaaaaaattcaaaatggaaaaaaaaaagtatattcaagagaaccagacgtgtcacgtgtccatccatcctctgttgagattttagaagtgaagtccgcggccatgagcgaggcgaccgccggccactcctccgcggcggcggcggagtctgcaccggacgacgtcatcgcggagatactcctccgcctcccgccccacccttccttcctctcccgcgcctccctcgtctgcaaccgctggcgccgcctggcccgcgacccgggcttcctccgccgcttgcgcgcattccatcgaacaccccccgtgctcggcttcttccacaactccccggacctcccccgcttcgtccccgccgagggcgtccccggccgcgtcgccgccgaggccgcctccctcaggagggacggggatgacggcatgtggtggtgcgtcgactgccgccacggccgcgccctcctccgcagccgcgactgggccgagttgctcgtctgggaccccatgaccggggagcgccgctgcatcaccgtctccagccagatccaggagggggccctcgacctcaacgccgccgtgttctgcgctgcctccggcggcggtgaccaagactgccactctagtcccttccatgtcgtcgtcgtgttcaccaccggccaatgccatggccgcgtgttcgcctgcgtgtactcttcggggatcgacgcgtggggggacccgatctcgacgccggtgacatcaccatgtgagctctatgaggagccccctgttcttgttggggaagctctgtattggcttcttgatgggagccgtatacttgagttcgaattcggcaaccaatgtttatgtttagctctgattgatcatcctgtggagaatcatgccatcctcaagcggaacatccgtcttgtgaggatggaagacgatgatgtgcttggccttgctttcgtcaaggatttcagcctgcacttgtgggcgcgggaggttgccgatgatggtgcgtcgcaatggattccgcgcagagccattgagctggacatgatcctgccgctggagggctatcggtgccgtgcgatgcctatttggatatgtggatttgctgaagatggagatgtggtgtttatacggactgttgctggagttttcctggtttggcttgatacattgaaattcaagaaggtgtctggctccttactcatgaagactgtttactcctatgctagcttttatgttccaaatggtatgaagaattatgcctctgtccctttgctgtgaagtatagttattacctaatgaaatgacttccaatgtttttccttttggtgctgaacccagtactgtgtatcttgttctggtttaggactgcaagctatataaaagtataaaacagaccaacactttgctaacttgctcttattatggttttctcattgctgagctgatgctcagtagtttaccactatggtagaaagtggattgatggaatacctagttgtgcaaatttcaatgatacctcatttattatttggaaaattttgcctacttaatgctacatgatctgtaaggaaaagtatgacaagtattgattcagcatatgtagtttgctttaaaaaaatatagtctttctctataatcaatggcccatgagatgcaagctaaaaacatttatattgggcggcaaattttaaatttacatcatttcgagctttagatgtaacagtctaatgtgtagtcctgatataaataatacagttgtgagtaatatctgattcttatgaagaaactggtgcccatcacatagtatacttttcctttcagggtgcattgaagcaatttttgtgacttataagtgaacaaagatgtaaataccacatgaatttttatgcacatcttgtgtaacacagcccttgttagcctgtcgacacttgacacatttgtgaaataggcgttgccaaaagtagctttacgaactatgagatctgcttaacttctcattctacatggtagagtaaaaactttcagaggaaagagccgacatgaaaatttaacttgttatttttggacatgagtgctttgtcgatgtccattcctgaatgggacatattattcttagtgttggttccttctggtatgatgtcaatgaaaatcccttgtaactaaatgagttgattaagctaacttatgatttgttgagtataaattgtgtatagcaccatagaatactatagcgagtatagttaagtgttttatgaattctatttgttgtctttattgtaaatcaagccaggccattgagattcagatagtaaatcatgtggacatttgttttttctacttgcgacatttcattgtattacactgatccaagactcattaagttcgactatgacttgagtaatttaagtctattactttacatgaaagttcggtaatttaaatgagctagtacgtaacattaaattgcaccagatatcattaaatgctattatgaaacatgaaaagtttggaagctaatgaaaatgctatctgaaaagtgttattcaaggcttcaagcactgctacttcgtaactacatttgaggctacacaggcagtcacttggaggcaaactaaccatacgtgtttctaggaaaaatatacataactcgatgggtcattttattgtttgctgaaaatggctgactgagtgactgtcatatttcaaattgctcaccaagtttacttcatatttaggaaatatcttttatgttctctggtcaccccgttcctcctggtgatttttgtcgtagttcctgtgtttttctgtgagtccacatgcacaattattgatgtctgctgtcttttcctttgatgttctgcatttgtacatcacatcacagtattttttttcctgaatatgcaagacatcccagtattgaactaggaacatttaatagcgaaattaggaaaacaatataggtaaattccacaaccaatccagtaatctatgagcatgcgagttcctaggagctgtttggatgaatgccaccaattgccacagatgtgttgctaagtgtcgcgtgcagcacttattgtggtgtacaaatctagcagagcaacatgtctatcaattaggcaacgctattctatattgacaatgtgccatatagaagactagtttaagagttctgaagtaacagagtatgactttggtacactattaacttacttttggtgttgtctgattgtggatgtgttaattcatcaaatctcatagcttattcatgctatatacatcttattgtttgctgttagctaatgtcacaggataatgacggaaatttccacagaagcccatgacatcccatgtgttgatagaagcaaggaactactgacattttcaagcaggtgaggcagcctggacatcagactttccaaaatattttgttcttttgtcttatgtgcagtttttttttaaaaaaatcgaaactgcagtggttcttttacattttagcttcactgcaattcacaagctagagcctagtaccagcaattggttcttatactaactcatattacatagatcaatatggcaattggtgagtaaattcatgctatatacatcttattgtttgctcttaagagcatctccaacagcctctccaagtgactgtccatgtcaaatttgagcaattctaccaaaaaatcgtgctccaattgatatagagattggtttaatttcacccctgtatttttgttgctcaatctgttctgttatatagcaggaaaatgtatttcagttgtaattgctattgcaagacttacacatgctgcagtagtacattggtctctctatatttttttgaaacaactaaataccaggagagttatgctgatggtagatgaaacaaaaatatgtctagatatttgtgtaatagacatttgacatttgagacatttgtgtaatagacatttgacatttgagacatttgtgtaatagacatttcacatttgagacatttgttatcactgaagtaaaaaagttgaggtcatttccacaagagttttcctataagaaaattcaataatttatgacattataattggcagaactatactctttcttttcagaaccaccaagctgttttcttataaacatgactgcataaacagatggtgtgatctagtgtagcaactttctatcttgacttgcctttatttttcctttcactgtttttgtgcacgtgcaatttgggctatgagttttgtcggtaaagggtactgcaataatcttcttttcgactatattgtagtattcaggaaccatttcgactatatagtattcaggaaccttttcatgtataattctctctcattcgttttctcgtctgagctattttaatagatggaaacaaagatctgttccttcctgcactacactgaactcatttcagttaggatgaaaatgcattctagagaccatcagaaagatgaattctttggggaggaccttaattctataattgggtaaggacctgaattatagaatcccactgaccacaagtagctgttaatttctttttgaagaataataagtagttattgctagagtttttaattgcgttatatgtgttgttagtgccatgttgcattcaacttgcgccatcaatcttcctaggattttgttgggtaggtgccaacttttctgtgttggtagcttgcttttgattgtactcctgttgttcatgattaaacggaagctcgtttactcacaatgagaaaagtggttacatcattacatgccattagtttgctcctttgtatgatgatctattgatgtcccctaattttttctaccgctcctgtgatggatacagatgatggtgcaaatcatggaatcggatggctttagaatctcttggctgcagtggtgttgaaggatcagttatgcatctgcgctgctttctcctgattgcagagggtgttgaaggatcactccatgtttcaatgaaaaggttaaagtggcattttgttgtcgttggagataacagctactaatactccaacgcatatcagattactccataattcaataaaaaggcgaaattgacattttctcgcctttggagattacagttaatacttcatgtggtacattttattttgtgcgtgcgatatgatattgttgtattcctatctctggttactctgtttgattgtctgtgatgacccaccagctgctctagttcttttttttttctctcataggcaattcatctttcaaatggaacattgatcatttgctccatagctgattgagcatatacattttgcccaaaagttgtgttcacttgatcttatgtaaaaaactttgggccaaaatcaagtgcaaacaactttggatcatattatagaagctcatgcaacaattgggtgaaccgtccaatttttccgttttgtgttcgcctgtgttgtgtggtgtgcatattgtgtcttccgtggaaaaaaaagagccattttttgtaaaaaagtgttcttggttgaaaagaatttttaaattgtgtagatacagaattttgtatttcaattatttgaagtaagccatcaaatgcttgcatgaaattctcattatttgcattatgcatttccaatggttaatctatggcttataatctgacaaagataaacgaagcaattcaaaatataaatttaggataagactttgggatacttttactctaggtgatccaataattaagcccaaagtatagaaaagcggcaaaagaacgtctagactaattgtagacggtaaattgtattcacggtgcatcaacttaacagttgggtggtgcaatttagataaaaacttaagaaatgagtgtcctagtgcaaaaggtgagtggctaaaaaatttataaataataagcttataattagaacaacttgtaaagttgtaaggtagctgcgattttgtggtacaataagttataagaagagatgcggtaactcaattattcaaagcactttttttttcattatacagatttaatttataagtgaaaaaaaactcggaatattttttttcggtgtgctaatggagcagtgaaaatttgaagttataaatcatgtttaaattttacgtgtttgtactgtgttttaaaaaagaaaaaaaaattgagcaggcttgagaaggggtgggcagaaaaagactgaaccgaaagaccgagaccgagaaattcagtcatcaattcagtcctaaacagtgaaagactgaatttggttcggtcaattcggttagtctcctcagttaaccgaatagaccgaaaagactgaattaacaaaaaaaaattgtctaaatgcaacctagaatccgctaagttcaataggattaaactctaattttcacatccctacttcttctagacatgcaattcatacatgcttgcgaattttttttttgtgatttttgtgttaaaaatttctatttcattgcatatatgaaaatgttattgaatttcggtcaggaccgagaccgagaccgaatttgttggtcctgactttattttcgttgtaatttggtgttcacttttcttttttcaaagaccgaaaaccgataccaaaattttgggtcagaccgaatgccaacccttggcttgagagacttgagaggcagcactcccctaccaatccacacgacatgagcgcggcggcggaggcggaggcggcggcggtggagtcgttaccggacgacgtggtcgccgagatcctcctctgcctcccgcctcacccttccttcgtctccggcgcctccctcgtctgcaagcgctggctccacctcatccgcagccccagcttcctccgccgcgtgtgcgcattccatcgaacaccccccgtgctcggcttcttccacaactaccgggacctccccagcttcgtccccgccgagggcgtccccggccgcaaccgcatggacggagtcgacgacggcggcgacgcgcggatgttcatcgactgccgccacggccgcgccctcctccgccgatacgactgggccgacctggtcgtgtgggaccccatgaccggggagcgccgccgcatcgccggccccaaccagaagatgcagggcggcggcgccggcacctcccgccgcagcgccgcgttgttctgcagctgcgatgtttccggaggcggcggcgaccaagactgccactctagccccttccatgtcgtcgtcgtgttcaccggtggctgccgcgcgttcgcctgcgtgtactcttcgctgaccgacgcgtggggcgacctgatctcaacgccggcgccattgccatgtgagctctgtgacacgccccctgccctggttggggaagcctcgtattggctttcttatgggggactcatacttgagttccaatttggcagccaaagtttaactctgatgaaacggccattggagatgcttgccgatgtacgtcttgtgaggttggaagaagatgggcttggtcttgccttcatcaaggattccaccttgcacttgtgggcgcgggaggttgccgatgatggtgcgccgaaatggaaatggataccgcgcagggccattgagcttgacaagttcctgccgatgccaagggtgctcaccggaaaatggtgtggtgaaatgtttgtttcgattagtgggttctctgaggatggaaatgtggtgtttatacggacccttgccggcgttttccttgtttggcttgaagcattgaagttcaagaagatgtctgaccccttatacatgatgactgttcacccatattcaagcttttatgtcccaaatggtatgggaagttctctctctttctttatcctctgctgtttagtattgtttttagctaatgaaaagatttccagtgtctttcttttggtgctgaacccagtattatgtgtctcattgtggtttaggagtgaaagcaaatagagtatacaatagaccaaacttttccaagtcactttcattttatggcttgttgagctgatgttcaatagtcagcattaccactatggttggaagtggattgattctacttgcgccaatttcaataatatatcatttatgatttggaaaatcttttctataatgccacatttctgtaagaaaaaaatatgacaagtattgattcagcatctgttctatttacagtagtaatgatctagtagtttgattaaaataaatatgcagatgaccttttctttataatcaatgcctgtgagttggaagcgaaaacattgatattgcgcggcaagtgttaattttacatcatttagagccttagagatgaagtgctaatgtgtagtggtaacagataaagcatcatttctgatgcttatgaacaaaacataagtccagttcttatcatgtagacatagtatacttttccttcaagggtgcattgaaatgtatgttggcacaatctctgtgacttataagtgaacgaagatgcgaaaactccatgagctttcatgcacatcttctgtaatacaaaccttattagcttgttgacactttgagacatttgtgcaaaaggtactgccaaagttgctttataataccagattgatatctcattctgcatatattgtagagtaaaaactttcagatgaaaagaacagtaacagaaagataacttgtgatgtttggacatgagtactttttcaatgaccattcaggaatatgttattctctgtattggttccatgggaatgatttcaattaaattctcttacactataatgtgttgattacttgattatgctaatatatgattcttttagtataggttgcatatagtataacactattaaattctcatgtactataatgcgtgattacttgattacgctaatttatgatttctttattggttggacttattgtaagtcaagccaggccattgagctgcgaatcaacaaatcatgtaggtgtttgttttttctacttgctgattttcattgtattgttgtggttattgacttattaagttcgagtattggactgattgtatcttaattttagtactttacattaaaatcggtaatcttaatgagctagtgtttcaaaattaaactgcaccagatatcataaaatgccattctaaaacatgaaatatttggaagctaataaaaatgctatctgaaaagtgttgttcaaggcacagtcactttctagttaaaaggcagctagaactgaagctgactatcccaattcaggaagacagaaattgctggttgggttagtccaaccaatatttgggattctttgggctttgctagggctgacttcagtatgacaatcttaaaggtctataattgcacacttgagtgatctgtctacagccaattaaccagagcatctatagcagcttcaccgctttctttttagtattaaactgccttttcaatgtgaaaaaaaggcctaggcctagtactcagtcactcagagccaaaaaaaaaaaaacatgcttccaggaaaaatatacataacccaatggaccattttattgtttgctgaacatggctgactgagtgactattatacttcaaattcttcatgaagttttacatcatttctggaaaatatcttatgctgtctggtcattctaccttcctcaaactggtgatttccgttgtagtacatgtgttttacttgagtccataagggaagtgcaattatattgatgtctgctgtctttttttttgtcctgcatttgtacatcaaaatcccattattcaattaggaacatttaatggcgaaactaggaaaaagataataggtaaacaccacattcgatccagaattttatgggcatgttggttcctatgagctattttgagctgtttggatgaatgccaccaattgcgaaacatttcttgttgccacactttattgtggtgcccaatttagcagaacagtgtgtgtgtgtgtgtgtgtgtgtgacaagcagggattgaaatttcggttcgaaatttccgaaatttcggaacccaccggcatgtcaatattttggccgaaattttcggtttttctcaattttttgtgaatttagtcaaaatcagttaaattgcgtcaaaatttcagaaaatttcggtccaaaaattaccgaaccgaaatggccgaaattttagccaaaatcgaaattgaaaaccctagtgacaagtaggccatgatgttgaagaactgtaggtctgtggcatggacctgcttaactcaagtgtggcaaaatgtggcatggtagccatctggtggcaatactagatcagcaatagcccataagatgacttctaattaagatattctatacatggccaatgtgccatactaaagactagtcttaagattgctgaaatagcaaagtacaagtattggtacaccattaacttactcttggtattgtctgactttgattgtgttaattcatcaaagctcatagcttatatatcttattgtttggtgttagctaatgtcacagaataatgactggaagttccattgaagcccatgagatccaatgtgttgacagaggcaaggaaatactgacgttttcaagcaggtgaggcagcctggacatcagccttcggaaagtttttttgctcgtcttgcgtttagtggttcttttttttattgattgaaactgcagtggttattttccattcttgagctttatcataattcacaagctagagcatagcaccagcaattatacatttttggctcttatactaagtcatgttttttaagtagatcgatgtggtgattggtgagtaaataatctatatgcagattaactcatgttaattaaactagtcaaatgaaaagactttcctagacctttggtaatcatttaaaactatggatagattttagtaatttgtacctgattgcagcactttgccactggcttacaggagctcttttgtgtacagatgtttcaagaaggtagttttcactcgaattctaaaggctggatttacttgaattcttgtgtattttcctctgcaggatacgccacgggtatctgacatcaggtctgtgatctcatgatgtgcatgagttgcagttgcacgtagctcaaatcgtttgctcgactggccccgaaaccccagctgatattttgtaaagaattggtttaaatccacccctgtgtcagtcttcaatccctcctgttagctaccaggaaaaatgtattacatctgtaataggcatgctgcggtagtagattagatatattggtctctgcattttatttgtcttagctaggaagattggatgttttcttcgaaataataatacaaagtaggagagttatgctgatggtagatgaaaaacaaaattgaatgctcaggatgaatattggatatatttatgtccctatttcaatactatttctatgtgaagttcaaaaatattgctaatattgatatcccttgttattaagggtgtgttggaacatgtgggttcagaacccttcccttcctcccgcctcccgacacataaaatggtaaaatggaacggcggatgagtgaatgaataattaagtaatccctccgtttcacaatgtaagtcattctagcatttcccacattcatattgctgtaaatatgaatctagacatatatatctatctagattcattaacatcaatatgaatgtgaaaaatgctagaatgacttacattatgaaacggagaaagtattaactaacaaacttaaaaaatatattaatatgattttgtaaagcaacattcttatagaaaattatagaacacaccctaatgtggatctataagctgtgtgatacgaccatactctttatccttaacaaaaggatcacactacttctgcaaacttttttctctcctttctccactcttaggtttaagatcatacataagtatgaaccagcacacttataagttttaacacattgccattaggtagttaaccatatggctaatagtaagtattgcactaaagactactagtttctaatgttctagttatggacacattttagcatcgtaataaattacacatatacattccatcgtaaataactttgatgatacatgagtattgttttctagatcttgaaatcactggtgatagtgaaattattgtagaaaatagttagctaaccgtaacaagagcctaaggtatgaaacagtagcaataatcttataatctttctcagtaatatataacattataactactcgtttcgtttcaaagatatcgctagtcgaacggtcgaagaatagtttatgaaaactttaagatccactttgttgtgaacttgattattttaaagagttgtacattaagataatatcttcttttattatcggaggttaaggttgaatatttcactttgtcacgctaaatgttagttatgttatagtttccataattaaatgtttagtcattatcataattgtaccacaccactttgtatcccatgtccaacctttatttgtgaaacttgtggataggaaattgttagtcacactttaacaacatgtatacattattcaacacattaatatgggtgttgtatatcagtatatatctttacaattatctgctaagggtattaaagttaattcgcatactgatatatgttaatgataataaattaaggatagtcaattcgcatactttagtatatctcaatatattccctttagaaaaagaattaataattacttaaatttttttaataggacgaacagtcaagtttaaaaaaatcaacgcatcaaatattccctttaaatttaagggcaattactataatatctcatatgttgcccctaagagtgccacattcgattgagtgatgatgtggaagagagaagtgaggagagagatgatgagccacctctaaatcaagaggcaaccttcacaaaatttaagaaggatgtgagagtattagagcaggtacaatagcaggttataagccagctgtaaacatattttaagaagataaataaggagagagaagagcagcgagctacagatttgtagccagctgtagcacggactccaagatgcagtgtgtatatgataggtgggaccagctattaatagtgtaatatgtaactattgtatgaatgagctattagattggctatatatgaattgaagctagtagttggctatattgctcttagagcaaagataatagtaacgcccacagttggctgcaattttcaccatatcatcaaaagttggtttaggtcccattcgtttatccaacaatatttgaatgaagatgaagattttcgtggcacgcttttcaaactgctaaacagtgcgtttcgtgcgaaaacttgctatatgaatgttgtactaaaatatcatattaatccattttttaagtttataataattaaaactcaattaatcacacgttattaccaccccattttgtgtgaaacacttaatttttatcttcatcttcatcttcaagagattcaaacaccaccttagtagcttaccggcacaataagcatgctctaacccgtctgtccatcctttcatgacaatagtattttattcttcattcatcttattctctctctggagattatttcaccgctgatgatctatggcatcgacggggcccacttttctcgaaaaacgcatgcagccaggcgacaatttagtcgccgactcgccctctctcctgtcttttttctgccaaatcatcactccggtctacgtggccagcatatcgccggcataccagctgctattgtacctgctcttaatgatatggtatttgtattggtatttgtgtactagaggtgatgcattgtataggttgactcttagagcaagtttaatagtatagcccactgctagctacaattcatgtatagccaatctaatagccaattcatacaataattgcttactatactattagtatatggtcccacctgtcatacacacattgcgtattggagtccatgctgtagctggctacagatctatagcccgctgctattctctctcatcttttatcctattaaaatatgtttgtagcttgctaatagtctactattgtacctgctcttagttcatgagtgaataaaatagataaatttagaggtgatagtcacatgtaccatagcatttgcccttcagtgcacaaaattcaatcccccgtttctctcatccccagatctgacgatggccgatgtcaccggcggccactcctcccctccggcggcggcggcggagaccttgcccgacgacgtcctcgccgagatcctcctccgcctcccgccccacccttccttcctctcctcggcgtccctcgtctccaagcgctggctccgccacacccgcaaccctagcttcctccgccgcttccgcgagttccaccgcaccgcccccgtgctcggcttcttcctcaactcctcgcatggcgccctcttcttccccaccgacgcgcccctctgccgcatcgccgaccaggtcgcctccctccgcaggaacacgggcgatggcttgtggtggctcgtcggctgccgccacggccgcgtcctcctccgcagctgcgactgggccaacctgctcgtctgggaccccatgaccgaggggttcgtctgcttccccgcccccatccagatggtccaagccgacgccgaccgcgacgccgccgtgttctgcgctgcctccgccggcgacgaggaccgccgctccggcgccttcaacgtcgccgtcgtgttcgtcagcggcgaccacgtgttcggctgcatgttctcctcggcgatcggcgcctggggcgacgtgatctcgacgccggtgactttacctctgctgatgatctacgacgagcccgctgcccttgctggggaagccctgtactggattgttaatggcagcagcttgctcgagttcaattgcggcagccaaagtctagctctgatctcgcggccatcggatatgcccgcaacccacaggtggaacatccgtcctgtgagtttggaggacgatttgcttggcctcgcctttttcaacgatttctgcctgcatctgtgggtgcgggaggttgccgatgatggcgcgacgaactgggttccacgcaagtccgttgagatggacaagctcctttcgctgccagtggcgacggaggacagtcggcgccgtatcgtgcctgcttggatatgtgggttctctggggatggaaatgtggtgtttattgggacccctgctggcattttcttggttgagcttgacacgttgaagttcaagaaggtgactgatggttccctactcatcaagactgttcatccctatgagagcttttattatgttccaaatggtatgagcaactatccctttgtccttttctgtcaagtagtctttaaataatgaaaagtcttacaatgtttactctgttggtgctgaacccaatactacgtagtacatatcctgttccagttcaggagcactagcaattaatatcaaatagagcaacacatgccaagtcacttttattttatgttttattgatctgatgttcagtagtcatcgttaacactaaggttgaaagtgggttaatggggatatctccttgcgcgattttaataatacctcatgtatcgtttgtggataccttttccacttaatgccacattatgtttaagcaaaagtatgacaagtattgatttgtgtctcttccacttctatttatactagtttttaaaatgccttttccacttaatgccacatttatgtgtaagcaaaagtatgacaaatattgattggtatctgttctacttatatttatagtagtaatgaacttgtttgattgaaaaaaaaaatacagttgtaccttttctttacggtgagctcattctataaagatcccactgaaaattaaaatttaacttttgttgtagttgttaataaaaaatacggttctgacaatttgattaatacggctggaaaaaagggagatagcaaacgccttttctgccagggttttgaaaagatgaacacttattcattaagtgccccttagcttactttgtttggaatgttgttagttgtacttttggtgttggtccagttcttagtgtttatcatctttttggaccctggctaaacaagtttaagaagaaactttagtcactcattttgattggaattgcttttgtatgctggtatttattgaaagctagaaattcagcctgtttcaaagctaaattatctaaagatcctacagatataatatattttgtttgcttatggatgttatcttgggctctaatgcagaaaaaggaggaaaacaggagagtgctatagtggggaaccaggtttctgaggcaggtggcaagtgagatcttccgcgccaagttcagatggagactgtgctcaggacagttggaaggatgaacacaaaggaggatgtcactatatgttgggagaattcaccaggtcttttctagttttaagttctgtttagctgatcatcactttctggatgctatttctcggtacatgttggttgtagtcttgtgctttgaaactcaacttttgttgtaaaccagcggttggtatacatggtaggatggcaccatgtgaacaacctggctgatgcttgacctgtttgctgctgaaaggtggtgtgggcgttatgaaccttgtagtctgtttgactgtttccttcagtggtcggtttgaagacaaataaaaaacaggttttcataaaacaagttttaatttgatttatcataataaacacttataggttgttagtttgttatggatcatttatttaacatcatgtttgggtggaaaatactaaatatgtgttttgcgatagatgtgtgtttggcactttggctggctgctgcgagggagaaaaaaggggcacggtcaatatgtttcgtgctgtgttgattgagaacaacactacttttcgtaaaattgttgtgtagtttttgattaaacatgatttcccggttttattgaaacccagtttttcttaccgcttacttgcacaaattttttttaaaaaatgtgattaaggtaaagcggttttaatagaatatgagatacaaacaacccgtcttgatatatcaagggcctatgagttgcaagcaaaatcattggtattgggtgcccagtgttaattccacatcagttgtctgcttactctgttagaaccaaggtttgaaatttcgccccccatcggcatgctcaaatttcgtccgaaattttcggttttttgtaattttttgtgaatttggtcaaattttattcaaattcattcaaattcagtcaaattttcaaataattttggctcgaaatttccgaaattttggtaacccctggcataaaatccaatttcgaaatttcaaaccctggttagaaccttagggttaaagggctattttgtagtggttatagaaacaatagaatgatagatgataatgcatggtgcttatatgaacacaaaacaattttggtgcttattgcactgtattcttttcctttaagggtgcaatgaaacattaaatagcttaccacatgtgcatatagttggtgcttggtttcataagtgttaagagatgagaaaaatggttgtagtgggtgttgctgctgttatctgagctgtctggaaaaccaggaatgcatatgtgatatgttttataaatgtacttaaaacacattctgttgagctgatccattatgtttgcttttggattaaacctggcttattttgcagaaatcaagtagcaagtgagatgtatggcgcaaaacctggctggaggttcggaactggaatgctggactgaattttggcaatcctggtggtttgaccaacaaaatgagggggagatgaagtcctgtgatgctttagtaccatcagaagttttagttgtcttattacagatgttctcgttagctgtactgaaaacttgtataggttatcctagtagcatcacactgatgggatggcatctaattaagaaggggtggcatatgctacactttttcgtgatgcccaattttggcagagcaaaagtgtctatgacacactgtaattgtatagcaaagagtgtttatgagaggattctggggtgttggatgtaaaattctcactgaagaacagttacagacaagcgaccgaagaacgtgtgatgtcaccgaagcgtcgctcgccacttgtgcctgcattttccgcttcagcgagcagcctttagtcaatccccattcctcaccccaaaccttaattccccatttttgaggttgcggctgccattgggaagcaagagcgttcagcttacctctaggatgaaatttaatttgtgagtgcaatttata

SEQ ID NO: 26953 - DNA, 11329 bp, Oryza sativa
tcgttgttacttgcattgcctatagctctgatgatcactggttcccgctgttgccgatggtgaagatcattggcgttgcggaggagggcgacgtggtgtttctatggacattgtcggggatcttcaagttctgttctggatccatggagcttaataagaaggtttgtgaagcaactaaagatatggagattgtgcatccgatccgtatgtgaccttttctatgtctcaactcgcaactcccacaggtatatatatgttcgcaaaccatcctagcttccgataggcaattcaattcaaatcggtttcatggattcgttatttcaattttctagtgtcatttctgaaatgcacagctgttaagaatttttactatttgtctacatccaactgaaccatgtaatcacatatcattacttatgtttgaatcctgaaatgtttgtttccattctgccttcattttgcttagacaattaattcagattattgtcctagttaagtttatggaaatgtagagaccaggttttagtccattttctataataagtttagtggaaatacttaaattaactggtaatatatatgttataggttgtcaaattaacatataaaaatgtacaggatttatcagaaatcaattaggaacataaataaatagtgataatataaaagacaatatttttgtatgaatcagtagcacatgtgaaatcttgctttgttgttgaaccttttagttaattttatgcgcttgtgcttcaatcatcttctagacttccactgagcctttttacttcgatttggagataatgcaatatgaggatttcttaacaaatatcaaatacatgtggccactatttatttaagaaataattattttgccttttgtaataaaaccatatacaatgaaaaagttgcagttagaacgaactaaaattgcacattgcatagtattgcaaacctaggtttagccatacgtgatttaggtgactgaagatttataaaatttgcacataaaatctagaaaatcccttttgtaaaaaaaatttgcatagaagactttgaaaactaataccttggaacaatatatagcaacagttttttgatttccttgcggtttctttttattttctctgccttgaggaggacacggcagatacaaaaatgacccaacctatgctgtgctggatgcaaaattatcactgaagaacagttacaaacaagccaacgaagaacataggatgtcaccggagcgttgctcgatcgtttcttgttcccgcattttccgcttcaacagcctttaatcaatccgcattcctgaccctgaaccctaatccctatttcagaccttgtgggcgctattaagatgtgagagggagagcttagctcgattcacgctgctctttgccgtcactatgttcattggatttgaccgggaaggtctacgtacggttgtacaaaatcaagtaggatcgaggatcgatggtggagaataaacgcttgtaaaagaggatgaaatttaactagtgtcacgccccgaactagccccgaacgggactagcccgtgacgttccaaattaacctgttaatcgataccagtcccaggaaacagtgctggtatcacaggaagacagaatatcacaaccacaggggtctctttattacagagtaggagtacagtcatgttgggctgcggacagatcccgagctcacaactgcattacaaaagggaaagcggaagccaagacttgaatcaaacatcacaggcgcgacttgggaactaggccaaaaccctaaaactcatcgtagccgacttgctcctggaagaactcctcgtcagcgggggccacatcatcttcttcggcaactggggggattatttatatagagcaagggtgagtacaggagtactcagcaagccatgggaattaagtgtttaatgcaggcttcaaaggaaaggctgttgtttttgcaattgattttatttaaactcctttttgaaacaactaagtgagtgcttctcaaacgacacggatgggacagtgcgtcttgtccggtcggagtatgtgcaatgtatcagtctttgaattgatcagggttggcacccggccaacagctttcaaacggtcacccgggcctggttgatcccatcaaccgcagatttttcaaacatcgaacccattccacaacagcaatttcacaaagcagtagtcaaacaaaactacgctaggaatcacctcacatccgcccatgaccgtgggcacggctgttcgaacagtttgttaacctctgcagagggggtgcactttacccacacgacattactaacccggatcacccagcccgtgcagaatggccacgtctggagaccttgacgctttcatgacaaggcatttcgaaagccgacacaggtttaccatatgccaacgagaggggttccagaccaacaccaggttaggtcccagaccatactgtgccaggaagcccgggagttctccccgacaccaccccgttgaatccacatgtctcttggcatcaaggctcccccgattagcaatttactcagccaggggtgtcccatttcacccatgtggccgcacttgtcttatgtttggatgaaattccaaggaaacggtccttaagtgcaagagcgggaaaccgtactcccggtacgtcccccggcctgcgattttggaaattcatttagttcgcaagcaccgacccaggtgtcgggttttccaagtcttttgtaaaacccaagttttaaccatcgttggatgttttatatttgaggggaggtgtcccgatgcgcgtgcccgaaggcccgtacatcgaagcacaacagtcgacaagggagggttaagtgttcaataattcaaggagggtaattgcagtaattaggattgggggccgacgggctatctcgcaagccgcggccgaattacttgtgttaatcctattcatgcaatatttgcggaaaagaaatacttagatttaaattataggtgcaagatggtcaaaggtaacttgccttgctcaagatcttgagcttgatcctcgtaatcctcgcactgtgggtcttcgggctctgaaactacacgcgaaacgggacaactcaacaaacggcaaaaataaagccctattattgacctctaagcgtgccattagatagatctcaagatttgaggaattttggaagttgaacggagtcgaacggatgtacggttgataagatatggaatttctaagattattggatttttgatctaaaggaaaaggatttatttaaatcctttttgagaaaagaaaagaaaagaaaagaaagagggaggggaattagacttccctcgggcggctagggcgtggcccgagagaaaggggcggctcggccgaacttaacgggctggccggcccgagaaggcggcccaaggcgcgcgcgcgggcggggaggagagagagggagccggtgggccgggtccatcccgcgtagtcccgagtgggacccgcttgtcggcggctcggctcgccgtgagcaaggtgcacgcggggcgtgctagggtttgggaaggggaggcgcggcgcacgcgcggttcgcggaggacgcggtgcgcggcgggcccacgcgcagcctcacggctcaccgtggaccatgcgcatggggagggtggaacggagggagtggctgactgggtcagccgatccggtcgtgccgaggtggcaccgacgtggcgcctacgtggctgccacgcgggccggctggaggaagacgaaggcgccggccgcgaatggacggcgggcgacggcggtttctccgggacgccgtgcgacgacgaggggcgacggggtgtacaccggaatgacgagggagaatgagagggagcgagccaacggctcggattcgccggagggagttcgacggcggcggattgcggtggcggcaaccggcggcgagaaaagggggaaacggcgacgaggtcatgaggggctgattcccggcggtgagagcatctacgcagctaaggtaaagcattcctagcaccggattaggaggaaacacgccgtgggaggtcggcgacgagaggttgctaccggactcgggcggcgacgccggcgagtccactgcgagcgacgacagcagtcggggcggcgccagtttgctacggggaggctacacatgctactaaccgagtctaaggggaggaggtgggacgaggagggagaacggggaggatgcactaccgctgcagaggagggcgctgtgacgagaggccgacggcacgggagtgatctctccggcctcgggccggggaagaggaagaagacgagcgcccggagtccccttccgcgtcctagcgcgcaccggctcctctggcacacgcgacgacggcggtcggtgatagagagacagaggggacggcaatggcgcggtggagcgagggagaatgggggagggaaaggaagggagggcgccttggtttaataggagggcaatgtcggtttgggaaccgacctagggcggtcaaggagcgagttggagctcagcggtcgcggccaaaacggcgacagagggcatgacaccggcagaagaagagaaaagggaaaaaggaaggaagaaagggggcttgccccttgtcgctttgggaaaaggaggagggagagggggggtgacgcggcagagggaggaggagctctgcctccgtcccttggaagctagcgcgcggtggtggcggggccgggtcgatgacgacggcgatgacggcggaccggtttggagcggagcggcgacacgggcggcagacacggggcaggcgcggcaggtgctgacggcggtggcgactggccggtcggccaccacggcgcgcgcgcgcgggaggcaacggggcgacatgacgatttggacggcgttggcgggaagcggcagcgagggcggagggcgctcggctcggcgccggctcgcgcgcacgcgcgcgcacgcggcgtacgagcagagcgagggaggggagagccgagggagaggcgctcggcgcggcgtggctcacgcgcacgcgcgcgcggcgcacgggcagagcgagggagagagggagagggagagagagggagagagagagggagggagagagagatgggccgagaggaaatcggcccaccgaacctgagggaggcaaaatggacttttgcggaggaattgaattgggaaggaaaattgagattagggtttggatttagcgatggatcggggattcgagatccggaatggcacggagactaactgcaagcgaagaaataattttcgcaattagggtttttagaatttaaattttcccgctaggcgccacgacggaacgggcgctacaactagtgagtgcaattaattgtcaaacttatgtaatatacatttttgcaaagcaacatctgagctagacatttattgagtgagatccttatatgtagacatttaatttggtgaatttcatccaaatatatattagtgaaaaatatttttgtttctatttatcaaaaaattgtgatattaaattcttaattacctactcttcttttgctcaaacgggcataatgtatgtcgagtgtctagatttcaggtgactgaaatttcagtcacttttatcatcctttaaatatatagcatgccaagagttgtcacttccactattactcatgcaaacaaagtcgtttctttcctgttgaacggtaaattttataagtagatacgaaataaatttacaataaaaaaacaaaattacatgtaaaattattcaaacatagataaatttgtcccgactttttagggtttgcaattttattgctgttttttcttaaatgaagcaaagttttgccattggtttggcctgctgttttgatggtgttaattcaatggcgaaaaggcatatatatccttggttgttgtttgccactactttttttcatctctagtgatttcgtccctattctgttttgaatgatatgaagtaagattgtgttaaataattcaaatatgagcatttttttacttttgccaaaaaaaatgacaaatactaccacaagtaaaattttgatggtacttgaattgaattttgttaaaattttgatagaatgtgctcaatttataggatttcctacatcgaaccctccccgtcatctcatccgcccctccgccacttcttcccccgctcaccgttgctattgctgtgaccgtcgtggaggaggccttcaaggcgctgaagaggaccaaggacctcctcgcaaccttctcccaccttgaggccatcctgccaccgttcaacaagtgcctcacatgcctcaagctgccccgacccatcccacgtccttgccatcgccctccactccctcaagacaacccccaactccatcgctgtctcgctcgccatggccctccacctcgtcgggtcttcctccttcaacctcccgttttcacattggcctcttcttcttttcacgctccctccgctgtctcgctcgccatggccctccatctcgtcgggtcttcctcctacctcccatttttacattagcctattcttcttttcacgctccctccacctcctgtccctgctccttccctccaaagatgttgtcgcctttgaggaagaaggcgatcattatgctaaagtgctgcggggaggcggcaggaagaggagagtgctagggggagggattgaggatgagctgaggccggtggccgtgaggtggtacggtgctggcatgaacatggtcttgccttatgctaccgagccacctgccttctttcacacatccagcaacgtcggtacattgaaaccaccctctccgctgcattgcatgattctcgcgtgctgaggtgctaaaaacactgtggccgccagcctcacatagttgcatcgatgcaccggaatgacgaatccacccccgccacaacggcatgcctcaacgcactggaatgccgccgccgtgcccgccgcgtggtcttgccggattagccgttgcctgcctaggggttttatggtgaaagctgtggcagggaacacaacgggatggttggggtaaccttttcttttactacaagggtagaagagtaaacctatatttcataaatcatttttctattttcgttcctatttatttaactcaatttcgtgggacatacctaacaactgtctaaagtgttggcaaatgtcttcttcgttttcagaaaacggtgtaaattacaaaccttaaaaagtgagggcaaagcaacaatggaggttcaaagcagaggcatggacacaattgtcccttgattaaaaaaaatgtaaaaccatatacataatgataactttgtagttaaaatagaccaaaattgtacattgcatagttttgcaaacatagtttagcttagccatatgaaactttaggtgacggaaaatttataaaatttcagacgcctaaaatgtaacaaatcccttttagggaaaacaatattgcaaattaagaactctttaaaaactaatagcatggatcaatatatagccgaaatgttttctaatttacctgaagaaaattcggttactttctttttctctctgccttgccgaggtaactgcaaatacacacgagacaaatggtgcgagaaaatgagtaaaaaaaaaaaaagaaaaaaccggggtgttttgcgtaaaagtctcactgaagaacagttactgacaagctgacgaagaacgcgtcaggtcactggagagcatcgctacctcgccgcttgtccgcattttccgccttcagcgagcagccgccttcaatccaatccccaaaccctaattccccatttccgatctcgcagccgcgcgccgccgggagatctcagctctgatccattccatccacgccgccgtcgcgcgcgcgcgccagccgccatgtcgctgagccgaccgctcgccgccgccgccgccgccaccgtgcccgacgagctccatctggagatcatggtgcgcctccctgcgcttccccaggcgctcgcccgcgcctccgccgtgtgcccggagtggcgccgcgtcgtgcgcgacgcggccttcctccgccgccaccgcgagctccacggcggggtgcccgccacggcggggttcttccacaacaccgtcgtcttcggcggcgcgcccggcggcgcccgcttcgtctgcgccggcgccggccccctcgccctgtccgttccgccgtcggtaagccgccagggtgtcccctgctgccacacccacgtaaaccccggcgacgcatggacggtgctcgactgccgcggcggccgcgtcctgctcggctgctgcagattctcctgctacttcctcgtctacaaccccatcaccggcaagcgctgcctcgtcaaggcggcatcccataaacgactccatctccatcactccatccgatgcaacgccacgctgatctgcgacgacgacgacgccgacgccgacgggccgttccgcgtggccgccgtgtacaccaccgtcaccgacggcggccgcctgttcggcgcggcgttcttgtcgcgcaccggcaggtggaccacggcgccgcaggtgttcgtcgacctgccgcggggcatcgacctccgcggcgagccgtccgccgtggtggggagcacggcgtacctctcggcgtacagctacctcgtcctcgcgttcgacgtcgagcactggacgatggccacgttccagcggccgccgcgctgcggcaacgcccggctgatgaagacgcgcggcgacggcgtgctcggcctcgtcggggcgctggagctcaccgtccggctgtgggcgcgggaggccggaggctgggtgctgcgtagcaccgttgagctctccgacatggggcttcttcgtgatctcccatcggcaccgttgcccaggtctgaaaaaaaccaatgggttctttgatattttgttggaaatttcgtgaaattggcaaacttttagttgttttgttaccttgataaagaaatctcttttgctaaaaatttgggaacttttgaatatgtgctatgttataaacttattataactgtgaatctgaaattaagaaccactgtactgtatgtttttgtccattggcagacacaggaaatataccgtccattgtgtttagtgggatagagttaagggacttgaggtagttagctattggattagaattgggtgagccagcaataaaaaaataaatttgttgacaaaagaattagaatgaagtattagatcgaacgaaatatatacatgtgtgatatacctatatatattaattttatttcacaaatttttgggtattcttcctagaaatacccgggaacccctgtgtctgccactgtttttctctttgtttgtgtatatatgtatagctagtatagccccaaatcgagccaaagaaaaaaaaaagtatagtaaccccagattggttgagtttaacttcaatcatgtgatccgggtatctgacaatggcattgttgttgattgcctagctctgatgctcggttcccgctgttgccaccggtgaagatcatcggcgtcgctgaggagggcgacgcagtgttcctttggacgatgctcgggatctttatgttctgtccaggatccatggagcttaagaaggtctgtgaagaaactcgagatattgagatggtgcacccatacgcatccttctatgtcccaactcgcaactcccgcaggtatatatgtttatatattatccttgctttctaccattcaaacataatgttttatggattatttatacaaaattctccatttcatttctgaagcgcgcacaaagcagttaagaatttgtatttgtttgcattcaactgaacccatataatcatatcattactaatgctataatcttgaaatccattttaccttcagtatgttcacacaatttggattattgcagttaacttattggaaatgcctaaagtaactgttaaatatatatgttctgggatgtcaaaggaacatatagaaatgtacaggatttatcagaaatcaattaggaacataatatatagtgataatactagctttttgtatgaatcagtagcacatgtgaattattgttatttagctgaaccttttagctttctgtgcggttatgcttcaatcattgtccgttgagccatttttacattaatttagagattactataagatacatgtggccattctgtttcagaaatagttattttatttgctgtaaatatgtaacaaaacttagctcaatggtacttttgggactcagttaatctgatctaggaatatgaatgtacataaaactcccttgcaaataagaaaacatataaaaccgtatttgttaaagcatattgcgactgcaatatatatgaatattccattatttactgtttgtgggagttttaccctactgaaaaagtttgctgtagctcgagtaacatgtgtcgtctgatagaacatccttgacaaagtttctgcagaattaaatataactgtatagttttaattaaattgcttgttgagtgcaacatatatactgatcacactatttctcatcacttcttttcagaaggcagtgaagaaacagcaaaacagggttgacatgctacaacaaatgtcgctgaagattaatgatgaaggtgcaatggagtttttagggattggatgccttgtgattttttgcttcgttaaatttgaacctgtttgatacaaataatacatgtaatatgtttgttgcaatgactttgtactcgttgtactctcttagatgatttttgttgttcaatgactgcatgcgtaacttctgttgtgagactcatgtatgaaatcaaggtggatttttggacgcatgaaaatctggttattgcatctcatctagcttatttttcctattgatttccaattcagcctctatgatctatgttggttaaagtatatcaaagttatcttcatgatattttttttccactaccattcattacttcacttttttttttcactgcagactccttttttaaaaaaatcttgtggattatattgtttttaatggatggaggcaaaagattttggttcatctgtgaatatatagatactgaaccaacattgaacttcctacatgcatatggcttgatatatagagtgaacacgtatagtaattaattaccttcaaaaatatgcacagaaaagataactagcactggtggagaaaccatctttggtcggtcggccaaaatacacaatagtcccggttgcaataaaaaccgggactaaagatatctttagtcccggttcaaaaggatagagtttttttttatctttagtcccggttggtaacacca

SEQ ID NO: 26954 - DNA, 14913 bp, Oryza sativa
cctgcagcccttctatctcctccctggccttatctcttcctccatatctcttcctcttcttcctcctctccttttgggttctctcctccttttcctctttctcctctaccagcgccggcgggcggagggcctggcggccggcggcgcggaggcccgggcggcctcgtgggcagcgcggtggccgggcggcgcagcggcccaggcggcctcgcgggcagcgcggtggccgagcggtgctgcggcccgggtggcgcggtggttgggggcggcgcggcgttgggcggtgcggtggcgggcggtgcggcgaagggccaggcggcctcgcggcgggcggcgctccggcggccggcggctggcggccggcgcggcagtggcaacgggctttttttttcttcttctttttagaatttgtgattcagatctgtgtatttgatttgtgtgtgatgtgaatgtgatgtatctatgatgaattttgtaaaatttgtgatgtatctgtgatgtatcgatttggggagttgaggatttggggataatttatttgggattttgggaaggggatggggtgaaatcaatataatgaagaaaagaaaataataatggagcaaccggatctagctagtctagctctaccaaccgggactaaaaaggctctatctttagtcccggttggtaacaccaaccgggactaaaaatggatttttactcccggttttttcacccgggactaaagatagtgatctttagtcccggattggtagtcccgatttgaaaaccgggactataggggggttacgaaccaggagtaaagcccctttctccaccagtgtagatttctcccatcagtacgtgaagttgtcaattgttcaaatttcgtacaacatagtacgtatatgtatcatgtttaattgttatttacgttttgtatattcattgcactgctcctttgtttgatgtggtgccaccctactgtttccctactatatcttgtgaaatatgatggctgatggcagcaacaagatgatgatggtgtaaacatggcgctgcaaaacagtagcatttatctgccacagctgtgttatcttggatagaaaagttgcagaggtttcgaaggatgccttccatccataactatatatatatgataaaccatgaaggtatgtttcaaaggcatggaacccatgcgcatgacaacgcttcctatttgatgttgtggtgtatagtgtgttccatatctccctttaatcaatttcacatatatacaacatgtctgtacattttatcaattataggttcccttgaattgtggaaagcaaggaagattgtgctagggcgagctgactgctcagacaagtcacaagtaagatcttcaagtccaagtttagctagagagatcccaaaaacgtttttttaatacgcaggagagctacttatcattatattaaggagaagaaagaagaggataagaacccttacaacacacacaatagaccttacacgagaccaaaagacaacttcaacctattacaagcaaacactatttactgttcggcatgaggacaagaatgcccttaggcccggccaaaccctattcatacaactcttctcttgcaaacagcaagtcttcagctatgttaggagaagtaccatcgaagacacaaccgtgttggcatgagggctaccaacaatcgactctaagtgtcgagaagatggaatgaaagctggttttatgttgttttgagagtgccccttgagttttttaggttcaaggtgcctagaaaaaaaagctgacaatttagataaactttgtgttgggaaaagttgttttattctacgttgtcttgccagaacatgaatagtggagcagagaatgagatgtcattctcatctcgagaaatagtccccttcagaggaatatatgtatatatacacacacatacatacatacatgtatggggtgctttcttttgtttgtgctttcttttgtttttccattctgtttctcatcgaatcatttctattaatgaaaatgaagctgtgccctttgctaaaaaaaagtttcccaacattcataaatctccaagcaattaaacggataatttttttaaggcataggcagcttccaaaacttcttgcaaattaaagtggtaagcaaccatatgcagaagaaccagtactatctggagcaaagtcctagagctaaataatgagaaccatccattattcacatttctcgtaataccaagtaatagtatgtcacattaattcttctgtttagcacaaattgtacaaaattaactaaacgatgaacagtcctagctaacaggtaatcacgtgcattatcagttcatcacagaaaccgagaggccaagacggtctgttactcatggacgtagatggaattgaaccaaactctggtgtacatgagaaagtttctcttttttaatatatcgttcctcttcgtctgttccaaatgaactctatagattcttctgttatttgtttgtccttctatctccaaatctaatttgaaattgctacatcaaccaactgtggcgttgtcttggtttaagaagtgtaactcatggcttctgcatatagctagaaatgaacacaaacattatacaaaatcggcagaggaaaagaaggtatgtgaaaaagaaaaagactgcctactctacatttgatagaaaattccctctaaaattttaggaatattgagccattaattggattgttttgattcgttggagaagttaggaataattcccctgtgccctcttcttcttccctacgccgttgccgccgccggagatcaacgagatcatcggagcgggaggtaaggtaaaggtgttgactattgaagggtccaaaatctgcaagacactgagggggcaaggagggatttttttgttgaatgaaggttattactccctccgtattttaatatatgacgccgttaacttttcgaacaacatttgactattcatcttattcaaaatttttatgtaaatataaaaatatttatgtcatgcttaaaaaatatttgataataacataaagtcacgataaaataaatgataattacataaattttttgaataagacgaatggtcaaacgttaataaaaagtcaatggcgtcatacattaaaatacgaatggagtatcaactagcaggaaaagaaacccatgtattaccatgcaaggacataatggaaagcaacggatgaaccaaagctaaagaattcttgaatggctgctagcttctccatcaaaagaggccaacagatgaaagcctagtacacgactcaagcgaaaatgttcagttaaattattgtcctcttaatttctgtcacggtgtcacttcacatcaaatcataaaacgcatactcttcaacgggtaatgcttttatatttccatatggatcgagatcgatcggcagtacaggttcattcattctccaaagtccagcgttcatcaatggccatcttcatcggatgcatctgttcacttgcactcttgctgctctgctcccatgtcttccagcttctctcagacgctcgccgccgtcttccaccgggcccgaggccgcttccggtcatcggcaacctcctcgacgtcgccggtgagctcccgcaccgctcgttggcgtgcgtcgccgagcggtacggcccgctggtgacgctccgcctgggcacgatgctcgccgtcgtggcctcctcgccggccacggcgcgcgacgtcctgcacaggcacggcgccagcatcaccgaccggggcacgccggacgcgtggagcaccgacgggcacgacggcaactccatcttcgcgttcccgacgcgccaccaccggtggcgcgcgctgcgccggctcggcgccgagcagctgttctcgccacggcgggtcgaggagcagcgcccgctgcgccgagacgccgtgcgcggcctcctccgccacgtggcggagctggctgcggcgtccggcggaggcggcgcggcggtggtcgacgtcgggagggcggcgttcgcggccatggcgagcctactgttcggggcgctgttctcggcgggcatcgacgccgcgacgtcgtgccggttccgcgacgcggcgcgggagttcgcgctgctgacgatgacgcccaacgtgtcggagttcttcccggtggtggccatggccgatctgcagggcctgcggcgaaggacggcgaggcacatcacgtggatgtaccaactgatcgacggccatgtcgaacggcggatgcgtggccgggaaacggccggtggctgcggcgccgcgcacggggagaaggagaaggacctgcttgatgtgatgctggacatgtcggagaaagaggagcagaatgacgacagcagcctcaccatgaaccggggtgtgataagagcatttatggccgtaagtatatgtatcctatatatctcagttttttaccagattatacagtttacttttaattatattttgactgtatgccatattttgaaattttagtataaatattctaaaatataaatcatatctaaaatttctttaatacataattaacatgtcataataaaataatatttatttatttttaataaaacgaatggttaaatatcatataaaaaggtagccacatcatctattttaaaaaaggagtataggtttgttaaggatgtttttccaattactttacaactttataatagttaatctgttcgattattgtatcttaacatattataaaaagttggataattcatcaccctttcagaacagaaaaaccacgcccaaaagtaacttttctcaccgcatgcacatatgttttacaaagaggcaaaaaaatgctactgagcaataaacaacgtgattgttatagaagatagtaataatcatggcatgacagtttgtggctacttttcattaattagacttcgtagtcactaaaacataatgggtggacggaagcccagtgaccacggctagagttatctctaacaaagttattttccaaaattttttacaactatttaggtacatgaaaaataaagattgaaggagcgaaaacactttagaacaaactatattttatgcataaggtgatttctataatcatctgcctaggtttttgttaggctttaaatattttctctgggttggtctgtttgcacgtgggtgtgttttcaatataagtttggtggtatttacacatttatttaaaggcaaattttacgggaggacatcacgtacggctcctaagtggttttagcttttggacactaaaagttgatctttgggaaagatactttcaaagtatggttatttactactagggacatcatgttggttaaaatattcatttttattaaataaaagagagataaatagtatgaaaggacaaatgtactagctagcgaaatgaccaaggccggtggcatatttgtcctttcgcactatttttgctctcctattcaatcgaaaatgaatattttgattaatgtacgtggtgttcagtagcaaataaccatatattttaagattgaattctgtaaagattgactttttggttaagatattcgatttatctaaattacttacattgcttaaccaatttcaggatttactaatggcgggcagtgaaacaagctcagctgtaatagagtgggcaatggccgagctactgcagaatcctcaaactatgacaaaattacaagaagagctcaaaaaggtcattggctcaaaaacttgcatagatgaagaagacatcgaccaacttccctatcttcaagcagtcatcaaggaaacacacaggctacatccagccataccactgctaatgtacaaagcagccgtcccagttgaaatacaagggtataaaatccccaaagaaaccactgtgatagtaaatacatgggcaattcatcagaattcagaggtttggattgaaccagacaagtttataccagagagattcctacaaaaggagatcagtttgtcatcaggtagtaccaacatggaacttattccattcagtgccggacgacgtttctgcctcggatatccggtagcaaatagaatgctgcatgttatgcttgcctcgctagttcatcagtttcagtggacactgcctgaagtagtgaagaagaacggtggcgtagacatggcagaaaagtttggaataacactgtctatggcgacccccctacatgctatagcaaagaatattgtgtaatgtgtaatttgtgtaatgtattcccgaataaaatgtgtcatttatcctaaaatataagacggatttataaaaagtatctgaaattaaatagggaatgattgtgattggtttaagacactactacaggattgattttcctggacgcccccccttttgtttacatgcggtccgtaagtggaactacacgaaaaaatagggggaccagcgctgggctgtcgcccgcacgggaaaatcgattttcccgtgtggacgtcctaatccaaccgcacgggataatcctccgtcctttccctctcacccacttcaaaattttcccatctctctcttcctttttcccttttattctccctcaaccactcccctctctctctctctaccttatctcttccttttactcctctcccagccacacacccggccggcttcccacctcctcccccacaccttcctggccggcttcccctcctcctccccctcccctcctcccattcccctctgttgggccggcgatggcggcggcctgggcgacggcggtggccgggcgcggcggcgagtagcgaggcggcagtagcggcggcggccaggcttcccctcctcttggtcgtcgtcctcgttgtgcgctcggctacgtcaaggcaaggcaaggcaacagacgtcgtgcgctccggcaaggcaaggcaaggttccgtcgtgcgctcgtcgtcctcctcctagtcatcacgtgcatcgtcaaggcagcggatctggcggcggtggcggccggcacaactatggcggcggcgggcgggctcaacagcgacgacgatggcgggctcggcggcggccgggtgggtgcggtccggcggccggcggcgattttcttgtttttttttatttttggttttttttccgtacgggtggtataacacgaccgcacgggataatcgattatcctgtgcggtcggcccacccgcacgtgaaaataatgattttcacagacacctgggtgcaaataggccggaccaccgcacgaaaaaatcttgtctgtagtagtgagatgaaaaaaagtaagttgagaaattaaatagtatataattgggattagttaagatgagaaaataggtggagaagtaattatatttttaaactaatagataatattattacttttatggctaccgctactgctatactactatgacgacaaacgaatactaccaatgccgccattgctgcaataacctaccattacctaccaccaccaccatcacaccactactaggacccatgatcaacctagtacaacaacaacaatttccactattatttgtgtagatattatagtaacacactgataaccttgaacttaaagtccatccaaataatgcaagtttaatttgcaatctcattccattaggcaacaagacaatattagtgtagttctttcgaagctagcatacggacagaagagagagcaccagccacagatggattgattgggctttagatgggctaatgacagtgaactactgtagacgaggccaatagcatggagtgagaactatagtactacatatagttaaggaacaaacagataacatcaggagcttttgtaaggttcatgtgtatcctaggtatatatatgtttgatttcaacataaagtgggaaatgatgagatgttattgtcttgtatttggttggaaggtcgttgggataggccttatttgattggagagaaaaggatggatgggatgattgaagggatttttctttgatgagccttgggtggacgcgcggatgggatgagtcatactcatatgtcctgcatttcatcatcacatgacaaacacccatccatcaccaatgggctcaggagcttaccccaattttttttcaaacaaatgtgatttaatatgtttggtatatgtgtacccagccggttagttatcaaaacaatcatttgtaagtacaaaattatctttttcaagattattatcattctttttcccttagatgttttataatttttctataataatgatttttgtttgagctaataacacatactagcacttcaatatttttgtcattggataattcttgcttcagtaactctgcatctctcgctgaaatcctgcgtccgctactgaatcggagccaagcctgtgcggcccagctcgtcacaacgcttgaagatgatgaacctcgtgacgcgaaactcgtacgtcacgaggagaaggctgctggaggcgtaggttgaggcgtcaaggtcggaggcagcagcgatcgacatgtcatggtccagtaaacataaattgatggatggatgtgaggtatcgtactatcctacaaaaccaaaataacagaaacgatactgatcttatcctactatagaaagggtttttgcgtgtggaccgaaaagcatcttcctgtgcggaaggccggcacgcccgcccgagaaggtctgcgataatcaaattttcgcatgcgattgacccaaccgcacgggaagatgtattatcccgtgcggcactatatacaataacctaggcgtttgggagtatctcgtcctatctcaaccggtagcaataccggattatcaaatggtacgcgttctacatatcagggttgtcattagtcgcacgaattaagaaatcacattatgatataaataagaaagtagaatgcacacattcacataaaatatgtaatagacatatacacatacacacatatatatataattattgtcttggaatttacaataattcaaaaccaaatacaatttatgtctctaaattgttttttcacgtaaattctttctcccactctcttaggcgtttgaaagcgtcattctttgcaaggtcgctctccggatcgtagaattcgcccaaatggttacaaacatcgtggcggatgtaacgacaaatatctgcacacaagttgagaatggttttttttgtcgaacaggtttgctacccatggaattgacatgatctgtttaagaaaaatacatattgaaagttagggaaattaaattattgaatatgttaatgtgtacacgatattttctagactcatatctgcaaactctattgtgtacctcccattaatttgaagcatctcgcacatgtagtatccacataagttagtgcctggtggttgcttgcaacactgtgttgaaaattctgtatacgtcaatatttcaatctaacaagtataaaaaatgttactatagcggacataccattcattaccggccatcgtgtcttcacgagaagcttactcttactggcatcctttactcgtccgctttggtctttgtaatacttgtgtgctctatgtagccaaaaattttgtttgagtcaattgtgagtacaagagccaatagttattgcgtagtgtataacaatacttacaagttcaacaacacaaggaattccgtgaatgtcttctcggcataatgtgccggatcaagcacgacgaccaagtggtcccacggatatactagaaatagtatgtagtggtcgctgcagagaattacaggtgatgttgtattatggaaacagtagtatggaagtaacacttacggcaaagtggaagggaccattagggcatttttgtcttggtgcgtgagcatcgctttccccaagtacattgctacctagaccctctttttcttgtgcaattgattgatgaacgcttttttctcctccgctgttctcacctagtattctaattttcgtaatattcgattaattattatactattcatttttacacaatcctacgaaatcttagatagtatcctgatactacgatcccaccaaatattatttaaaataaggtggattgaaaataatgtgaacaaatatgcttaagtttacataaagaccaattatatttatcaaaattaatattatatgctttgatttatacaatataaatatgtactttcgataatctgatagtatcttgatcgtatggtactattccgatactatgatactacaaatcggaaaacaatcatacctagtatctcgatactgattagcttgctctgtaggcataatagggcagtttgcaacaaagccaacaagggatcaattgtggctcgcgcttgggctggctggccgtatcacgcgtgagcaagaggaaggtaacaacctcaaagttgtgaatttaaagttggaaaattaaaaattttaaatattttttttatctttggatgatttttcttgtttctttaaatattatagttgccagtgccaaaccaaatgaatgcaattaagatttagaaattaaaatttataaagtgaaatcctcttaagaaaatccttttacagttaccgctaccaccactactacgacaacaaacgaatactaccaatgccaccattactaacagagcctaccattactttcgacggggatacccatgaaccgttttctgagagtattggggtacattgatacgaggatctacatgatacgacatcaagcacacaaaaaagcaaggattataccggttcagacatctcgtaaggtaatagctctaatccagtttatatgggattatagagaaaactacagagtataaaagagaacaactgaatttcgagattactgacgagatccttgttaagaagtactcgtgacgagatctatcacgagcaggcttcaagttcttcagattgcttgtggtggcgagtgtcttatactaagattagatgccctgtacctcccgggggggtattgtcgacgtttgatgtcgcgattccggtatttgcatagtatatggatcgttggtactagggtatatgcgagactgaggtaaaagagacggagacgaggatttttatataggttcgggcccctgaattgtcagttaataaccttacatcctgttagccaaagacggtcgttgctcttattcatcataatcacaccagtacaatatttggggtagcctatctaattgttgtcgacatggtggtctgaaggtctgacttgtagtcgataacagggtagtcttccttctcgagttcgtgcccggcgagatcaaagacagcgctagatccctatagccggcctctgtaggtaccggatagggtcgatccaggcatatctctgatgtcgatatccggcggcttgtcttggcgtatgtaagcttgtatgttgatcttctgtcttgatctatgttccgtgtcgtctatggtgggtatgtcccctctcctcatagggggtcttgtatttatacccataggtgtccctttgttcaagtagaactagggaaaccaatatggatacaatccgagtagtccttgtcgtttccatgtagaactctggttgtctttccttatccggaactcctcctatatctgcaggttgtctccgtatagaacatggtatgtggtgggtcctgccgagatttagtcaactactattaggtatgtggtatccataaccctgacagtagcccccgactttaatgcaaatgagcgagttcatattctcaactgcagaccttggagtaactgttatcgagctcacgtgaccgttctcggtgagttcagagataatgttagacttcctttattagcctcgtacgggcacctaaagggtttgtctgagtcaatctccgacgtcaaccaagaaagtacagagcatacaattaagtctcccgtcttgctgtaatcgagaatttggattgaagtcaagaaattttatctcggcgggtacaccatcttttcattccgtattccttgccgagatccaccaacctttctcgaatgatcgagaaggcgtaaaatctgcaacgaagtcttgtcaacatttgtcgtactcgccttagtcgattttggtgtagaacaatagatacatgaagtcttcgataatgtcaaatagaattttcctgaaatcaatactcagataagaatattagatagaaatagccccccgagcgaacgctcaaagggtgacatgttataatatgtatggaaaactgaaaatgaattaaacttacagaccaatgttttgtatatgagcgtctactcttttatcgacttcgatcagtcagtttgttcagttatacacttctccctagcccgcagccttgtcgtcggagaatcgttcttggaggataaggctcttggacctttgacctgcctcgtttgaacaagcactgatcctagcccccagccgtgaagttggaaaacccaatttccgattacacggcttggttaatacgcacgacgagaactcttacacgaccagatcttacatggtctttcgtctctaaaggatccgacaaggccttatccactctgggcgtccccagccgaagttcccttaggttcctcagaggccttgtcaagacggcgtaaagggacattaggataggtttcaatgctaggtgtctttgtggtaagggatctctaggtaaaacacttggcgatattgtgtacttgatatcaactttgttgaagtagaggtaatgggagaatcgctacacctctggtcaagaaccaggtagtagtcgtaactcaaccactagaagtaaatgtacgagagatcgctacgattgactggttgagaaccagtgagtaggtgtctctcgatcatttgaagtcgtggtaagaggaccgctgcattattgctgtagtcgtatctcgaccatctgaggttgcggtgtgagagattgctacgtactggttcgaggaccagcgaacgtgtagaatcatatctcaaacaccaatggagattgcggtgcgagagattgctacgtactggttcgaggaccagcgaacgtgtagaatcatatctcgaacaccaatggagattgcggtgcgagagattgctacgtactggttcgaggaccagcgagcgagtacaatcatctctcgaacaccaatggagcttgcggtgcgggagattcctacgtactggttcaagaaccagcgagcgagtagaatcatctctcgaacaccaatggaagttgcggtgcgagagattgccacgtactggttcgagaaccagcgagcgagtagaatcatctcccgaacaccaatggaggtttgcggtgcgggagattgctacgtactggttcgaggaccagcgagcgagtagaatcatctcccgaacaccattggaggtttgcggtgcgggagattgctacgtactggttcgaggaccagcgaacgtgtagaatcatctctcgaacacgaaccagcgagcgagtagaatcatctctcgaacaccaatggaggctgcggtgcgggagattgctacgtactggttccagaaccagcgagcgagtagaatcatctcctgaacaccaatagaagtttgcggtgcgagagattgctacgtactggttcgagaaccagcgagcgagtagaatcatctcccgaacaccaatggaagtttgtggtgcaggagattgctacgtactggttcgagaaccagctagcgagtagaatcatctcccgaacaccaatggaagtttgctacgtactggttcgagaaccagcgagtgagtagaatcatctctcgaacatcaatggaagcgctatagttggtttattacatgtgcatctcatgtggccaacatgacttacacacccaacttgtagcatatccggatgtccgttcgcaatcatgtcgggtgatcaagccgacagcgttcgcgaggaattatccgttaacaaccttttctcgagtagtccagccatggccggtgctgtgagataggttgtcggtcttcgttggcaggttgggcgcgacgactctgcattcgtcgagatcgttctcgataatgcggtgtacttgaccacaacctactcgagtgctcaattgttcctgaaaaatattttctagaaggcaagacatatagcagataatatcgagtatgtattcgaaaaactgcatggatcttctagtattatcaggatataacgagcagatgtaaatatcaggtattatgtaaaccgtaaacaaacatgattcatacagaagagaatagagcaagcccccagcgttagaccgtagtcgatttaacatcggggacactcacgcaatagatattatataaaaacatgctctaggtaaacataataaattataaatctgacaatgctgtataagtctaaaaaaataggtacgataaatttatataaaatattgcgtacctgtgtagatatatgccggatatatatatgaaattagtagattaattagattaatctaatctactaattaccttgttagtggtctactacacactgcagaagacacatgtatgcagtaaacttagacttgattgtttgttggtcttgtggagcatgatgacccgtcatatgctcgcacgcgtgtgcatatgcacgtgacgtgattagggaaataccctctgttgatcatctccgattagaacacagtaatacaaaggcataggtactcgaacgagtccccgtgcagtatgtagcattgcactgtgctcggctcggacacggcgtcgtgttcggcctgggctgctgatgcttttgcaccagccataccagccgatgtcgtgggcggagaacttgatcagcaactctgcacgaaggaagatggagcactgattgatcccgatccagaacaggctcatatcaaatcgattccgtatgcagcgaatattgttgattctctgcggcgacgatttcctg

SEQ ID NO: 26955 - DNA, 586 bp, Oryza sativa
  unsure (1)..(586): unsure at all n locations
gagcggaacaagggttttcatcaaaagaaatccggagcagtttcattcgatttgttgtggattggatgatggaaaaactagcaagcagcaagcgtaggctatgttgccgtagcgcgccctacggagttgtacaaagtcagcaaccattttggggcgcaagcataggcaacacaggactgatgacggggtggggcgcgcagtgaactggttttctaaaaagattggaagatccggccaaagaaggtgatagccctgttcatttgttcccatggttcgatccttcccagtaaaacgcggcgtgttcgaatgatgatcgcttttacgcgagaaannnnnnnnnnnnnnnnnnnnnnnnnnnnnnnnnnnnnnnnnnnnnnnnnnnnnnnnnnnnnnnnnnnnnnnnnnnnnnnnnaatcggggagtgcaatagagaacttgagatccgatgcgaacaatcactcgaaggagcgaagcgcgggcgcactcactctaacggcgtacctttcgcatgatgggtcagcgaggaaatgggaacagcggcttaaccattaggtgtaagccctttccagaggtggaagatttacgt

SEQ ID NO: 26956 - DNA, 26253 bp, Oryza sativa
cagatttggcaggaaaacggtcagacaataacaagttcagtagtaaagttatttaggaagatgtcaaagcatgtcaagtgtgataagttggttcttttgagaaacgtaattcaaaggcaaaagttatcgacccttgcatcgaatagcagtagtatctagcacccggaggctaggaaagctaatatgatgcagttagtgacaagttgtcaaacatggtatgctggataagcgtgacatcatactccaaagcattcagtggcaagttagaagtaaatgataagcatgacattcttatgatgacaaacatggtatcctagtaatgacaagctagtgttgacgcatgacatgaagtggtaacttgtatgaggttgactccaaagatacgagttataagaagttatggaactgaagccccatcttccaatgccgcatcccagtcgaagtcagctagaggtacaaccagggaaaagtcaggtgaagagaagattccatctgcaacaggagatcgagccaagcagtccagagtggagaagttttgttaggcaagtttgttatagaagacggagcggaagaagtcagacaagaagaaaagaccgcccaacctatcttcttgctagcctcctcgaatctcggggacgagattcttgtaaggggggtggatttgtcacgtcctgataaattcatcccgaaattaaaaatcattcgctaaaaggaataatagaattaattaaaattcgaaaagaaattggcaaaccctaaaatacgtacaagaaaaattcaaatgtggcccggagaatttttgttaaattctccttggtctaaaaggagccctcaaattttacttgaattttcagagcaccggaaataattattaagcaacaaaaacaattatcaaagtttaataaaaagaaaaacctaaaaataattctcctcttcctcctttgggccaagcccagcccgaagtctctctctcctccctctctttctctccctctccttctctccctcctcttgggcccccttcccctcggcccagttccctcctccctctctctcccgggctgcctttcccccccctctcccctcccggcctgcccggcccaggccgtctccccctcctctcctcctgggccgcctctcggcccaagctgagccgccccccctcccgcgcacgtgcgctgaccgcgcgccgcgcgcgctgacgccgcccgaccgcgtggggcccacgcgtcaggccgccgtcgccttcttcctccagccgcccggccgtcctctttccctctcccgtgaaccctagcacccttcctccctcaaatccgcgcgaatcaagcatgggattcccaaattgattgaggggaattaatcccctttccctcctctctctttcccccttaatttccccttgaatggtgccttcaatccccgggaatggacgcgccaagtccggccaccaaccattgccgccggccgtggttcccgccgccgttcccgctcctcccgtggccggctccctcccccatcctataaaatgggatcctcatcccccgttctctcgttttagccccatcccgagcctccccgtggtccctagctccctccctaccgtcgccctctctctcccacgccgccggccgcctccagccgccggtgccgcctcgaccgtgcgccggccggccgcgccgtcgcctcctccagcgtcgccgccacctcctccaccccggcttgccctccgtttcgcgaggtgacccccggagctgccttcccgccgtcgccctcctcttttctccgcgccggccgcctccagccgcctctcccgcctcgcccgtgcgccgtccggccgcgccgtcttctccctcggcctcgcagccaccccctctccctcggtcagccctccgtttcgcggggaaaacaccggagacgcgttctcgccggcaaaacagtggcgttgccgccactgttccacctccggccgcctctgccgcgtccccggtgcgccggccgacgtcgccaccacctcccccggcaccggagtgccgtcctctctcccggccaggccacggcgtcgcccgaatttcgccggaacgccatcgtctccgcgccggcctctccttcctcctcgtcggctcgtcgccccgctgcaccaccaccttcaccaacatcgcagcggcgtgttccacgccgtcccctcctccgctcagccgctgctgcctgccatcatcgtttcatcgtcgtctccgatcgttctcgtcgtcgacgtcccatcggtcgcccggctcgtcgtctcgcggcgccgcctccgtcatcgtcatcgcagcggcgtgttccacgtcgtcctcgtccccgtgcagccgctgccggctgtcctcgtcgcctcctcgccggccccggtcatcgtcgtcgtcgtcctctcgtcgttcccggtcgtcgtggcgtttgtccctccgtcgagccgttctcgttcgtcctcgcttcgtcaaggtcgctgcagcccccgtcctcgtcttcgtcctcggctccgcgtcgtcaagcctcgtgccggccgcgtctcgccttcgtccaaggatcgccgccgaagccgtcccctcgccgttcgtctccgttgtgcccgtctgtctccgccgcgcccgttcgtcgttgtcgttcccacgcctcgtcgcgtggtggtaaggttccctctccctcgctgccctgtcctcgtcctttcggtgtcgcccgtgcccgttgtgcggttgtcggccccggtacccgtgtatcggcgtcggcagtcgttcgcttgtgcgcgtggtgaccgtgttagtgtgtccgctcggtagccgcgtggtttccacgtgtgcagtccgtgtggtgtctagtggagtccgtttgtcggccactcgcctcggttgacacacgggatccgcttccgtcgacccgtggaccgactctgtgtactcggtctaccgcggtcctttaggttgacatgtggggtccgcatgtcaacggcgcagccttcctgtcttttccaggctagcgcttacacctgttttataattgcaaagcttaattataataatccgcaaatctccatataacagcattaaacttcggatgatcatatcctggtcatacgagctccgaatcgacccgttcaagtctcctaatgtttgttacaacctaaagaactgtgtgctttctttttatgtgttgttattgcttctttataggcttgtagctttgcttgtgtgcttcgcgtagctttcgtcgttccggaggttcccgaagcgtggttcgcggtcgtcgccgaaggttcggaaggccgttctctctgagcaaggcaagtcacatcatccttgagcatattgaatcccagtttataaaattattttgatttaaattaatgcattaccgctttatttaaattcccgcgttatcactgttttatttagccatgcctatttacctttgttaagacattattattgctattgttattattaccttgttcaccctagaataaacaaaaccccatctagtggacactctatttatggttccactagtatgaatttaggtagatgcttcgctgattaattaggcaacattaggtggttttataattttagactttgggaattctcatatcatttggacactatggaattgttggtttatggtggaattggacatacacctctcttcctctttcaaaacccctaaaacctgttttcggtggggtttgggtgcatgccagttgtgggaagtagcaccccggccactataaggattaagctcgggcctctgttgcaaagcactaccgtacttccacatgtctagtgggtaaggcttagtttgtggctcagtctagtcataaacaaaagtacacggattggagatggatgaagtcgggggtcgatggacattctccagggcaaatgaaggctacacgagctgcggcccggtagtcgagatgtcatggcagagggttggtgccctgctgctaggggctcagtcttgcctgcctgtcccgggggttccggccgtaggcaggattgggtcggtactcttgtctatggctaggatgggttgggaactatgtcacgtcttccgtccgtataccgtggtggtatgtggcacgtggttgcacgtgaggaagatgtgtcttgtgggtaaagatgtacacctctgatcagagtataatctattcgaatagccgcgccctcggttatgggcaagccgagcaatgtacccaagtcagtgttctaattcttaaaatttgctcaacaactaaaatgtgcaatggttggcctgggttggcttgggacgagctgggacccagggtcgggttgccagttcggtctgaatcatcgtaggccttgggttagggcaggttcgtgagggttcacggccttgtttaataatactgtgtagctctaggatcgtctttataaatggctttgggcaactaagtgacttttaaatgccgtttattgcaaaacttaacccctaaattattatctccttgtacccccccttgcattaattatgcatctccggtgtggcttgctgagtactgtggttgcactcattcttgctcaatctttcccctcttcagtaagagaagctttggagaatatgtcttaggtggagtcctggcttataccccagttgagcgcctgtgaagattgagccgtaggcccgctagtccgctgctgtttatttttgattgtcaggcctgaagcgcctttgtaataatgtaaatattatcgatgtaataaagatgtgtcttttatatcatgtttgtatggtgtaccccggcttttcctgggacggggattaatacactagcgttcgggaaaaggcaattttcccggtcgcgacagttggtatggttgatggctccgattgctttgatgtttgaccaaatctcttcctacgagatgatcttggtcttttcgaatcactagtttggttatcaaatcgttgaccggctaatcctctcttgtatttagccataagcatctcaaaagtgagcttcggctttttggtcttttggaaactagatgactcatcatttgcaactttatgatctttggccttcgcattattgattctagtcttgggccgaggatccccaataataacatttttccttttctttttgttaacatcaataggactaatagggagaggattactatcaattccggtcttaggcatagatgtaactgaaatcgtttcacaagtgaccgatgaagtatcaatcggtctttgctccatcaagcttgcatctttgaaataatcttgaaacttatgctccatttgtgaccatgtagaaattgaattaggagcaagcaaactataccatgtagatgcaaagtttgacaaagaaaggggaaacaactttaacttaagcaaatcatcgctactggccttaccacattgatcaataaatcggccgatatgctccattgttgttctagcatcctcatctgtgaatttcgtgaagttgggcacctcaaatccttgcgggtatgggaccgaatctatgtgttcaggatacggcctttgatatgtatgcataactattttagattctatctcattactatcccgcaagacattatcatcatcttttccaacatccacatgaccgatttgtgaattggtcttaggtgacaatgctatttcactttcgcttgtaatacaatccaaactgtcatttagttcggctatatcttcgatgatgctattgtctaagctagcaacacaatccgaatcatcacttgaattggctattccatcattgtctaaactagtaacacaatccgaaccaacacttggttcggctataatggttgttgcattattatccaagctagcaagacaatctgaaccaacatttggttcggctataattgctatggcatcattgcataaatcattaacacaatccgaaccatcgcttggttcggctatacatgatattgcatttttatctaaactagcttgtaagctattgttatccactcggctttcctgagccagagcttcatgcaacacatgatcaacatcaagaaatatctggccattcaatttctctttaatagaatcaagcaatccatcatatgcaatgtcggccaaatctttgtcagttattttcaaattgaaatatcggtttttaacatctctaaacctttcaatataatcaacaacagattcattgtatttgtgcctaaccgatgttaaatcagacaacctaagctcagttttagcagtgcaaaaatgatcatgaaatttttgttctaattgagcccaagtataaatagaatttgccggtaaagaagtaaaccatgtaaaagcagtaccggacaaagataaagaaaacaagcgcaatttaaaagtatcactattagcctcaccacattgcgctaaaaattgacctacatgctcccatgtggtcctactatcctcaacactaaatttggtaaattcgggaactctataattacgaggatatggtacattatcataataatcaggatacggctttttgtaagatctagcacgattcctaatttcaatcccgaatctatccctaataatatcactaattatatcctccatattatcagacctatgttgatttggtggtggatttagtgtcctaataggttgtgtttgcggcgcaatatggttatattggccttgtctagtatcgggaggataccccctagcaacatcattataagcattaggaacatgtgggggaacttggggactatttgcagcagtagatacaggaggatcaaatgttttaaaatgatataaataactagcattagtcattggatctatagcctgtattgggacaattgcgccggtctgaccggcccagggcccggtctgaccggcgtcatgatgtgcagtcggaccggcctgagagccggtctgaccgccggggtaatacccggtcggaccggccgtctggctggtcggaccgacggctgtgtagcggtctgaccggccgtcaggcccggtcggacaggccgtgaacgccgttccgtcggttttactacccgtttgatctataggaggttgattagcagtggtataggctttatcctttaatgtgtaatcattcataagagggccgaatttaatccttaaaaacccatcaaatttatccttaaacattacatctaacttatttttaaaagcaatcgtagatgaatctattgtagatgctacttgttgttggatagattgtattacctcgtcattgcttaccaaatcgggagcgagcttaggaaggcccgggcttgatgatcacgccttgacgagtcctagtgcacgccctcatcaacgcctcctgtgtgatctccttgatgtactcctccatggacttgcggtcttctccttcgaaatcatccaatgtgaccgacatgatctcgttcccgctcatcatggttgatgaagaaattccttgattaaatccggccatatagctcatagccgaaatatttgaccgaatagattaatatatggtcttgatatgttactgtgtttagccaattttattaaaactagcctttgttgatttttctggacgtaacagtaacttcggtactgtaccaaaatataccaaagatcaaccgatcttagattagatcggctgctatgttttttttttttgggtacgtgagcagtaatagatcggctgtgatagcctgatccttttttttcttctcttcttttacacagcaaaccgaatagatttgatactcaaaatttctggccgtgcacagcaaaactctgccggccctgctactgcttctcctcggtcagggtacacgcgcatgcacctgtatacgacgttgctacgacttgatgaccctaagcactaagcggcagatgagacacgtcgatgcagatcgcagctgtagccgacaagcagatggcgtcgatggcggcgggctgctgcagatcagtactattgcaatcaatttcggccacacggccgaaagttgcctcaactcgatgaaacgatgacagtgtagattgatttcggctgtttagccgaaattcttaattttgacgaaacagttattactagattaaacaaaattcggccgtgatatggccgattagatcgttccccagcggagtcgccaaaaatcgtgttggcaactttttgtgacaagtcgacaagcacgatcgcagcacctaaaccccttgcggtgatcctagagtcgccaaccacctcgatctagctaaagggccaaatcaagatgggttttgttgaaaaacagctaaaccagctagcggagccgatttagagatcaaaatcagcctctaggccgatttagatcaatatgaggataactacccgtctcgtgggcaaaacggaaggttttcaggacaaacctacaaagaggtgttgcactctcgcagcggcggcggacggtttacggcgcaaaccgacaaagatggactaaactagggtaaaatagaaaacatagtaaaagaacgattcaagtagattgtattcgggggttttacaatgaaccggccttgtcccttatataggggttggtcttgccctctacaggcccttctccacgtccaactcgggatagaaactaaaggaaacacgaaacatgccttcccgagcaaggaaacccgagacccgacgaaaatagagtcggactcggaccctgacagtctgaccgcccacatacctgtggtcagaccggccctactagccgatcagaccgcccacatacctgtggtctgaccggccctagtgaaggaaacccggcactttccaaactttggcaatttttccctatttcgttcataggtgccaaatttggatgtaaacagcgcagtcgaaatctagtcgggccatgtctggagggacctctagcgcgtcccctgtgacggcatctaccgacatcattcccgcgatcgggagtcgggaggcgacgcccagcggccctgccagcgatcccgctggaggccgtggtctgccagaggctatcctcacctgggaggagctccaagctgagatggggcgtcttctcgaggccggtgctcgcggcattggccgcgaggtctcgtaagctagggcggagacggcggcggccaacgcgcgcgctgagcgcttggtgcgggaactggccgaagcccgtgaggacttcacgaagatgagggagctggtggccggcaacgagcgctagcgcaaagggctcgaggaccgcatgtcggaactcggggataacctctccgagatccgaggttcgttgcgggtcacctacaccggtctccaccaacttgccgaggagtgtggcatcaagtccacgattccggcgaaccccgacgagttttcgttgacctcttctcttgcggagctagcgacggcgatggggaaaattccctccaagcacgcggccaggatcgcggaggagtcgtctaacggtatctataccggggcgtgtcacatcctcgcttgcatgaagttgtcgcgtcctgagctcaacctgcgtgaggtcttggatcagggagcggcaagcgacgcgcggaaggaggtgatggaggaagtcagtgatctgggggaatctgtcctcccccactttgaagagtaggacctcttgtatttttctgactcgtaaattttaaactctggttacccttatgcgcatgattgccatctttgttcaccgttgatctcggaagtctatcttgtcgattgtagagatgccgatgatgaggatgtccagcagcgcgggcagcctgagtcgctggcaataattccggtactcgagtttgaaccgcacgcatcgcataacgtcgaggaccaaactcttgacgcggaggtcgaagtgacagcaactggcccgagtgagtgatcctgtcaaccttgatgctgttttgggggtttccgagttatcttagtagtcgttatgtttagcagatctcgaggattcccttgcgacccaagatcgtcgtatccaatattggaagacaaaatttgaagtggtggaactcgagagggcaatgctggccgtgaagaaagatcaagctgtggaaacgctccgaggccgcgaggtgtggttctcatcttacttgaagagttgttgcacctcgatggagagggtgtgtcgggatcttcgggtagcccgcggtgatcctgaaaaatcggcggccgggtacatctcgtggctcaacgaggcctgcgcccaactcgatggcattggtaagcgtatcgacgaggccttgaagcaagagtgttgtcgagcgagccgatatgccggaggacatgtgctggcttgcatacgagatcactgcccacgcatggatcttgaatttctccgcgaaggttttggtcgttctcggagggatccggcggagatagaccatctcgcgagatcgatgtcgccgttggccgagaagattttccaatcaatggactggcgttggccttcttggtaggattcgtaccctgcaacaagatatcttgggaaaagatgtaatgtgacaaaatatttatgtacaaattgtaaggaatattttgtgaataaagaaatctatctttaacaaatgtttcttactcagggtgtcgtgtgtaaggccgtgttctcagttaacgaccttagttagccgtttgagttgtacactctccctagcccccagccttgtcgtcggagggatgtcctcgggtggcaaggctcttggacccctggcctgtcttggttgaataagctctgatcctagcccccagccgtgaagttggaaagattggtttccgattacacggtttggttaatacgcacggcgagaactcttacacgaccagatcttacatggtctttcgtctctgaaggatctgacaaggccttatcggctctgggcatctccagccgaagatcccttgggttcctcggaggccttgtcgagacggtgtaaacggacataaggacaggtttcaacgctaggcgtcgtcagagtgaggagttgttgggtgaaaacactttggtcattatatgagaccaagaagtagtctttattgatactgtaagggtgcttacaggtacaatggtattgactcatacatagaatttacgtagttggtcaatgttccatgaatttgctaattcgcgaccgtcgccgtctgcgattttgtatgcgcctggccgcaaggcttgtgtgatcatgtagggtccttcccattttggtgagagtttgtttcgccctgcttaggtttgaactcgtcggaggacgtagtcaccgatcgaaagtatgcgtgctcggatgcgcttctcgtgataacggcggagggcctgttggtagcttgctgctcgcacggcaactcgctcacgatgctcctcgagaaggtttacatagatgtctcgctgttcatcctgcttcttgtcggaatgcttctgtactcgtgtactttgatgtcgtagctcaccggggagcatggcttcagagccgtacacgaggaagaagagtgtttccttattggacgttgtcggtgtagtgcgcacggcccatagtactgatgggagttcttcaacccattttttgtcatgtgacatgagtctgtcgtagacgcgggtttttatcccttctagtactatgtcgtttgccctttcgacttgtccattgctttgagggtgagagaccgaggcgaagcatattttgactcctaagccgatgcagtaatcttggaaatcggcgctgatgaattgggagccgttgtcggttatgatgcggtgcggtagtccgtatctgcaaaatatccctctgatgaacttgatggcgttgtcggccatgatttctccagtgggtgctgcttcgatccatttggtgaatttgtcgatcgctacaaataggaatttgtagccgccttgtcctcgtgggaatgggccaagtttttctagcccccagcacgagaacggccaaatcagagggattgtttgaagcgcttgtgcaggtagctttgtgtgtttgctgtggaattgacaggcttcacatcgctggaccatgtcgcatgcatctttgagggctgttggctagaaaaacccttgtcgaaaggctttcccgaccaatgtccgaccggcggcgtgggacccacatatgccttcgtgtatgtcgaggaggagttgtctgccgtcgtcggtagagacgcatttgagaagtatcctgtttggcgcttttttgtataagtcgttgccgatcatacagtagatttttgctttacgggttattttctcggcctctgtgtcgtcttcgggtaactcctcgctgctgatgaatttgattaatggggtgcgccagtcatccgttgtttcaatgtcagccacggcgcgttctgccgcgatgacctccgagctgatgtcgagggtgcttgggccaacttcgccgcttacttcttttaccgaaggttttgtcaggatgtcgagaaaggtgctgggctcgagcggttctcgtctggatgcgcgtcgggctaggtcgtctggctcgacgttgtccttgcgatagacgtgtcggacctcgatcccgtcgaacctcttctcgagcttcctgacttctgcaaggtacttggataactcggggttagagcatttatagtctttgtgcacctggtttgcgactagctcagagtcccctttgacgattagtcgcttggcgccaagtgcggctgcatctcgtatcccggcaagtagtccttcgtattctgcagtgttattcgttgctctgaagttaaggtggattgcgtgtttgaattgatctccggatggagatgttaagataaatccagcgcctgctccttggctattgagtgcaccatcgaacgccattgtccatgtctcattgtcgccttggttatctgacttgttatctggcatggtccaatcggccacgaaatcggcgagtacctgagatttaatggctgttcgcggcacgaagtggacatcaaattggcttagctcgactacccatttcgcgatgcggccgacaacgtctttgtttctgacaacttcgccaagagggaaggaggaaacaattgtgaccctgtgggcttggaagtagtggcgtagcttccttgatgtcataatgactatgtagagcagtttttgaatctgtgggtatcttgtctttgcgtcatggagagcttcgctgacgtaatagactggtcgctgtactttctctcgctcgacgacaatgacagtgctaacggagtgtggcgtagcggcaatataaaggaataattcttcattaggttggggagcaacgagtacaggggggtttgataggtagcgcttgagtgcaataaatgcctcttcggcttcctgtgtccatacaaatttgtcttgtttcttcaataaggcgaaaaaaggttgtcctcgttctaccatcctagcgacgaatctgcttaatgctgccatgcatccggttagcttctgtacctccttgagtcttgtgggcgacttcatgttctcgattgctttgatcttctcgggatttgcctctattcctctgccagaaacaaggaatccgagtagcttgcccgacggtactccgaacatgcacttctctggattgagcatgaggcgatatcgtcggaggttgtcgaacgtttcccggaggtcatcaatcaatgagtcgcttgtcttggttttgacaacgatgtcgtcgacgtacgcttcgacattgttgccaagctgattgctaagtgcgccctggaccgtgcgttggaaagtattcccaactgttatcaatccgaagggcatcttgacgtagcaaaataccccgaacagtgtgatgaacgttgttttttcctcgtcctccttcgccatgctaatttggtcgtagccagagtaagcgtcgaggaagcttaatagttcgcatccgggtgtcgaatccaccagttggtctattcgagggagaggaaagtgatccttggggcacgccttgttgaggtctgtgaagtcgacgcacattctccattttccattggctttccgcaccataactgggttgacgagccactctggatggaggacttctctgatgaagccagctttgagaagtttgtcgagctcttctcgtatggcttgttttcgatctggtgcaaatctccgcagtctttgttttactggcttggtatcgggtcgcaccattagtttgtgctcaatcacctccctggggacccccggcatgtcggacggttgccaagcgaacacgtcggcattgtcgcggaggaaggcgatgagcgcgagttcctatttctcgtctagtgtagccccgattttgacagtcttgtcggggttagcactagagagcggaacgatcttgatggcgccgtccggcttcggcgtcttgtttggcttgctcactttcttgggtggctcaaacatggcgggtggagtgggcgtttgctcgaccatgtcgaggcttcgcttgttgcactgcaccgccagctttgcgttcccttgaatagtgattgttcccttcggtcccggcatcttgagcacttgatatgcgtagtgggatgcggccatgaacttcgcaagtgcagttctcccgatgatggcgttgtaagctgtatcgaattcagcgacatcgaaggtgatctgctctgttcggaagttgttggcttggccaaaggtcacaggcagcgtaatcttgcccaaaggtctggatgatgattggggagtaattccatggaagggttgatcagttggtgtcagctcactttgtggaattcccattgcatccaaagtggtggcaaaaagaaggttgatcgagctgcccccgtcgatgagaactcgtgctaccttgatgttccgaatagtgggttcgaccacgatcggataccgtcccgggataaccgaggttttgggatggtctgcttccgagaactccatcttctgctcagaccacttcatcctgggtgcagccccctgccatgtcgaacaaacttcgcgttccactttcttgtattctcgcttggaggagtacgtcatggagccgccgaagatgtgtgaaacatggaggtcggagtctgggtacgcgaagtccgattcgtgaggaggtgactcctcgtttttctcgacaacgcgtactcgcttgcctttttcaaacgccatgtgcttctcgggcgactttttgaaaacaaggcaatcctccagagaatgtctatctgttttgtgtatggggcaccaagatttctttgtttcgcttccttgtgggtccgggtgcttgggagggttcgcgtattctgctgcgaggacttccgcttgagctttccttttcccgtttttgcgatttttcttcttgtttgactcagatgtgtctgcagctgatttcttctctcccccagtcttcggcttgtcgttcttgcgccttagtgcatcatccacgtgggcacacctttccacgatctcgaatagtcttcgagtagttgtgatgcgtcttgttgccaactcctgggtagtgtagcgatctctgacaccaaacttaaaggcgcgaattacataagcgtcggtgatctcggggatggtgttcctgcactcgttaaagcgccgaacgtattccctcaaagattcccctgagttatgtgttaacgcgtgaagatcgtcttcgatcgcatgacgcttgtatgttccttggaaattggcgacgaactgctgccacaggtctgaccacgaagaaattgagtaggggggagatacatcagccacgaacgtgcagaacccttcaacgcggttggtaaatagtttgccaacgcattgtcatctgctccagcggcataaatgtaacatcctgaaaatgtgtcattttctaatcctgcatcatgccgattcttatgtttttaataacctcctaaacttaggacagtataattagagggacctcctaaaactaactcgcacaaaacctctatagtatttaatctcttttgtgtttttcattttaaaatatatatttggttaaattgaggtatttcttgatttggtttaaaaccttcttttgacaaaaattcttttattcaaatttagtttgaaaacccctttctattttttatgaattatggtccaataaattctccactattatcctataacttaaaccaaatgattccaattggattcaattgtcgacccgtcctttgatcttaaacctatcctttgattccaaaccggcctattcttatttatcgccaaatatctaaattcttcattttgatctagccgctaatttaattcctgtggcttgatttctttctcggcacaagaatattattattacaaatattgtgaataattgctctcgtgctaagaaaataaattatatccttgtcacctaaatttccttttagcctcaaacaattccttgaaacctatgccatatatattagggttcaaatcctatccttttgcctccacctattttcctaccatattcccaaaaatattttgaggaatactattaatttccttttctatttgagtgcttccaaataaattccctcaaactccacctctaaatattgcactcaaataaattagaaaatctcttttgtgaattctctccgaattcaaattcttcgcaaaacctagttatccaaatcaaatatataaattagacttctttctttttgtcatcgggccgaaactccgttctttcttccttttggcccaatcctttttctttctattttcctccttcctcttgggcttccggcccagctaagccgagccggcccaagtcagcccacaacccagccgcctccctcctcctcccagtgcgcgtgttccacacgcgcacgccgccgcaaatgccgccgcaaacgtcgccgctaaggaatcaagccggcgccgtcttttcttccttcacgctagcatcaccgtgaccgagttgacgaccgcctccacaaccgcctttcatcgcctatataagaggaggaaccccctctgtttatccccgacatccgagcttgaagctctcctcttttctctctctagccatggccggccgtccaccgatctcccttaccggagcgttgtcggccaaatcctcgcgccactaaatccgccccgtcgaggtgattccattttgcccctttcccccttcccttttcttttgaatcaaaccaccaccgctactctatttactgccgcggccgagcttttgtcgccgccgttccagccactcacctcttcccctcttccttccacatacctccccgagttctcaatgttcgggaacacactttaccaccgccgtcgaggccgttccatcatcagtgcatcggcgccctattctctctctcccctctgttaccgggctggaaggaggagaagaaagaaagtgacgggaggaagaagaggaggagagagaaagaaaagaaaaagaatagaaaggctgacaggtgggccccatgaatagtaacctttcatattttctagatttaattcaaatcctattctttaaaagcccatatctcctaaaccgtagatccgattccagtgaaacttggacctaaattcatataaattcaaatgcttcattttgatgcctaattgctattttataattttatttgaatttattcaaatatcatttgaatttatatttgccttttgcaaatattttcttttaccccaaaatacccattagccactgaaaagctgccggttggaactttacgccttccacggggacgttcgtgtggtttactatcctcgacgttggactattggttgtaaagcccggcaaaaccaaacctaaggtcgaagtgctgctcctggcaccccacgcctcgatgcgtacagcggtcggagcttcactattccctcgacctccacagtacgtcgcgcagttagatctcgagctctgtgtaatcctagccgctccgccgccatccacggttgtcggagtaacacttccgcctcgctaaacttgcacaaacctcccatccctctagccgttatattgtctatcgacaccagctagagaagataccaaacctagtcgtcatgctttagcgacgactagagaacactcaaactctagccgatatttatcttacctcaatatcggcttaaacaattgaaaccatagttagcttattaaccagactccccgccagctataatctcaaccatttaccctccaactacctagaacatatacataaaatatagagcctggccgatatattgtcccactccacaatcggcttaaatatgactaaaccctaagtataatgctacccaaacctactatcagccaataccagtcacatatctgctcaacctgttcaattatccactatactccctatccaccaaccaatcagagcctgcacataaaatataggtgaccgtagccacttaattccctctccaccccaaccaccaactctttagaacccgcgtataaaatattagcctaataatccttataccctataaaggagataggttataccctaaaccctagccctctgtactgcttatctctttcttgctattttatggcttttattgaatttggttcttccttttctttagtagagtctgttatattttagatggcaacctgtggtatttcaaagatcggataatcaggttgcccatctcggatttatttgcgttggagcaaggcaagttattattcctctcctttgagcataactaccctatattctatatctctgttctatgcattagtcatacatgatttcaaatgcataacctgaacatagcaaaccagatatgctagattttgcttagccatgcctagttagattgcataaaatataataaacttagattgggacagtacggtagaaatggttgatttccgggtggctagtactgttccaaccgacataaaactgccaagtacatgtgaagaacatacgagtacgaccacaattctcgtatgggcatagacctagctgattaagttatctagcaaaggtggtacctctgtatagtggttcttcttaagtcctcgcgcaggaggcaaacttacgccgagcagggcgattatgatatttaccgaggcgcaggtaaatatcttgattatctcgcgagctgtgtgtgaattatgaaaacctgattgagatgacgggggtctctcaaccagttctctctgaaaaccccgggaacgccagaactcctcttgctgctgataacgttacgttcagagcgcatggggactagagttcatggaacaggtaccactgatgttagtaaccgaaaagctttgccatgacaaggctaatgtgtttggcacgtcatggattgcgggtaaagcgtacatctactgcagtatgaatattattaaaactattcaaatagccgtgctcgcggttatcgagcattgggactcacaatggcatcttggttagaaacataatttcaaactctattaaatactgttgcatatcaaacatttcaggatttctacttctttattctcagctttctgcaattaaacctagctctactcaaatattaccatttcatacatttattattgaatataatagcttgctgagtacgttgtactcacccttgcttcaacccccttttccagagtcattttggagttcttgccgaagccgggagttcaatcataagttagtctcattctaacttaattctcaaatatagattagatagatagtttaagtctatagcaaaacactagagttgagtcatcgtatagcttctactgtaatagttagccacaagtttgtaaataccctatcattttatgtaaaggaatctcctttaaaaccttgatcaaatgtatgcaatgaagatccagatcgttgaacctgtatcaatctactgatccaggtcttgatacagtctaaacatgtcggttttcgaatcattagttttgggacccgacaataaagcactgtcaagtagacttggaggaattcttctgggtcggtgctcccatcatacttttcaatagctccgggtcggaatctctcaggccatcggacatcacgtagggaacgaccgaaagccctgcacccagcgcttggagcggcgggttgtcggcggtcgcgtgaccttcgtggatcttggtctgacgatgaagaggactcggatgatgatgatgatgacgatgggtcgcttggttccggcgtacgattacgagggtgacgacctggatctcgggaatcttgtcttcgtctctcgctgttgtctcgacgccgatcttcttcatcttcgtcattacggcgacggccatgaccaatgctgtccggcccccgccggtcgcgatcgtcgtagtctcggtcctcgtttggacgacttcttcgatcatggtgtcgtgaggagacatgacgccgggagtggttcacgtcatcccgtgctcgccgtgcttctcgacgaccattgatttgatctcgaagatcgccagtaccacgaggtggaggggtagcttgtcgaggtgattctctccgttctagaatttcaccgttagcatcgccgacgggagatcggttttgttgggctgcggtggcggcttcttcgaacgcgttgctgaggttagtcaccgatgcccgtagttgttccgtccaacgctcgaggtcgtcgtttagaacaggatcgtaaggtgtttccctcagtatggcctaaacagccctgatgtgttgggctggggtagtcgattgattcgccgtctccgcgttggcttgtgctgacgtgccaacgccatcgatagccaacacctcccgcgccgcgtctgatatcgatgaccccaacgaatcgatctggggccggagtcgctccttgttccttgccgttatccctgacggggacgtatgacttaggagacggagttttcatagcgccgagtagaactttgcaactcgagaggtcgtgattctttgtcttatgaataggacaatagacgtcccgagttggagaagtacgttgaattccacgttctttgcaggcgcggatttcagcatggacgttgatgaatacccagcaatcttgaagagtatgtttcttggttttatggataggacaccaagacctggtagtttcggaagtcatctttgttggcccgtgattttcgtcggggggacaaggcttggccgcatcagaatccttcacgagtttgggtgtagtcggtaatccgttctctgtttcaacgggtggatttttcgacatgtaggcgtctcggttcgtagccactgcgttctcgttgccagttattgggggaccggttgagatcggcatagtggtgtaaaccgggtagacgatttcgccgacttgagtccataccagcattgttgaagtaggaagaacttcaccgaagctggtgttggcattgttgtcgacgaagcttgatggcatagtagtagaaccttgaataccaggcccccctacctggcgcgccactgtcgacgggggatacccgtagaccggatatagagggtattggggtacgctggtataaggatctacgtagtatgacatcgagcaattaaaagacaagaattatactggttcaggccccttgataggtaatagccctaatccagttgatatgggattatatggtggaaaacacagattacaaaggaaaagacggaactcaggggatttggcgagattgtagtcgagatgattcgactagctctcgtcgacttggctccttgcaggctccgacttcgtaggctgtgtgggttgtgttggctctgagattcgatgatctatgccctccccggggggtcccttttataccgtaggttgggtgctctccgagtaggactcgaacataccagacctggcacgatacgtaggtaacccaattcttgtccgaggaggtctctcttcgtccattgactttacgaagagtttccttagacgccaaaggatttatccgtgcacatgtgaataggccttgtcaatacgtgacgtatgtcgaggggtagagggtatgcctgacccgtaaccctgacaaaatcgaagttcgaacggataagttaagacctcgagaagttcaaattcagagaaaatctaatgacagaaagaaaaggaatattccaggaatatcctatggatattaattctttaaattgaattatttttaataagaaaattatagtggggcccactgattagtggctcaggttttggtggactcggtgtatgatgggtcggctggcgtggatgcctcgtggtgacacgtgtatagagatagatgacatggcaatgacgtgggtggatctagggctgatgtgccgagggaaggagttatggtaatctgactctaaagatttaagcaaggagatcaaatggctgtatgttcctcatgtttgatacccttggaatactctaagggaaagtgctaccgcggtattctgtgcgcctcagatttatctgtgatcgtatcacataccaataattgcattatagcggaattatagctagatattactgttatattcatataaatttagcctaaattaattcactttcactaaattatggatagttaaaaagagataatgaatatagatttcgacttgtcacgatgtgttaaaacatattagaaattcaatataataatactttaagagatattgtggccgggagatttgctaagaagcaaacggagactggagaccatactgaaggacgcacatttcgttgaggtgattttctcatggaactgaacccccatatacctgaaatgctatattctattttgggtttttttttccttatatataccatttacccaaaatacaatattctattttggggttttttccttactagcaatagtgtctgtgcgttgcaacgggaaaaacaccgtttgatagtgtgacaccttgaaaacctcgaatctgtaaaaatcttgatatattaatcaattcgacggcccgcaagctgagcagttgagcgcggcccacatatgcggggacggtccgatgcacttccgcagcccattgggcgcagcgtaatcaacggcggcgacagcccgacgctaggcgaatctgagccgtccgatctaatggacggctccaatcgtacccgcgctggatgaagcgccgatcggggagaggggcaaaaccctggctcccaaatccctctctcctgataccatttatctccggagacgagcgagcaaaacgatggcggtccggcaagctggtgcgcgcgtgcagcgacgaccgccgagcggctcctgcttcgccggctgggggccgcacccgagggcagcgcaaagccatgccacgacgtcggcggtccggttaggtggtcgtgcaaacggcgacgagcgctgagcggcttggacctcgtcggtggtaggggcgacaccaagccgacacttcccgtcttcggcaaaggacggtggaggggtgctccaggacagcgtgcgcaggaaacccgacacgactgcgaggaggtgaaggtgcggtggtgccgcttcccagaaagctccagtgagctcaggggcttcaagtctggtaagtaacccgaacccttagcttaattgatttggatttgactcttatggttcttacccgaaattagggttgttcgaatttagagaattttgtcgggaaatttcaatctattttattccctcttttcgagttaggggtgtttcaatatcgtttattctcttttaatttcgggaacttcaatctagtttatccctttgctcaattttgtttttttagcttgcgtttcatcgcgcaagcggggatggagggcgccgctcgtccccacggaaagattgaatcggactttcttttatttgttttaatgtttttttggtcctttttttcgttattacggacaacagaaacatttttaattttttaagcagtagagatagagaagatagagatatatagtaccgtgtcaaatataataggattcgatttttttaccgcgtcacgtataattcttttttttttggaatcggacatatttgttttttttattttttttttctcctttctttttacagcgtccacacggattcttttttttttggccggtcttttttttcacctgttttttttttcgcctgtttttttagaatcggacagattcctttttttttctttttgccctttttttttactgcggaatcggattcagttttcttttccctttttccgcccgtttttttattcttttttcgtccggttttttttgcccgttttgttttggatataggattgcatcggttatagtcggtttcgatggtagggattaatgtagggacaaacctacttttaaagcagattgcttttctcatattcaaccttttccacatgtggtaggtgttgtgtaattgtcttgagagatggacccctaattggttgctgcaattattgtctgtgcatgtactatttatcatatttatacaaaagatattgtacggcttgattcatactgctttcgtttttttaatagatgacgccgttgatttttttctcacatgtttgaccattcgtcttattaaaaaaaattatgcaaatatataagatataaatcacacttaaagtactataagtgataaaacaactcataacaaaataaattataattacgtaaattttttgaataagacgaatggtcaaacatgtgagaaaaaattaacggcgtcatctattaaaaaacggaggtagtatgattcaattttaacttatcgcacatcaatcttattactgtaattttacattatcatactcacgtattttcctcatcgtctcatatttataatgcagcccctcgcaacgaagtagacggtgttaataagcagtagcagcccaaggatgatatatgtaagattcttgtcttgtgttgtcacctcaataacctgaaacattgtaagggctcggtttgggaaaactggtagaaatgacgcttgacgggttgaggtagccttaggccccgtttagaccctcgggactaaacagttttaagtccgtgtcacatcggatgtttgaaaattaattataaatattaaacgtagactattaataaaacccatccataatcttggactaattcgcgagacgaatctattgagcctaattaatccataattagcctatgtgatgctatagtaaacattctctaattatagattaattaggcttaaaaaatttgtcacgcgaattagctttcatttatgtaattagttttgtaagtactctatatttaatactctaaattagtgtctaaatagagggactaaagttaagtccatggatccaaacaccaccttagttcccaattttttttccaaaaaacatcacatcaaatctttagacacatgcatggaacattaaatatagataaaataaaaaactaattgcacagttgggaggaaatcgcgaggcaaatcttttgagcctaattagtctatgattagccataagtgctacagtaacccacatgtgctaatgacggattaattaggctcaaaagattcgtctcgcgatttccaggcgagttatgaaattaattttttcattcgtgttcgaaaaccccttccgacatttggtcaaacgtccgatgtgacatccaaaaattttcatttcacaaactaaacatgcccttagctgatcacctgctggcttatggaccaaactgacccgaacacattttttaataaaatcataatttaattgtgtaggatagggaatctataagatatactcgatcagtctgaagtccctcactttaattactactccgtattttccttagcaagcataccattaattcaatataagatctatctttcttagagttatgcctatgtataaagagggaagctatatagcgcacgcgcgccaggaaaataagttgtgcacaggccttatccactaccaaccgattcccccctccctgcattcgcatggatgagacgtctagcgctgccgctattcctcctcttcgtcgtgagcgtgcacctccatctccaacctctccatcgagacatcatcaagcccagaatcggttcctctttctttcacactggtggagacaccatctttgatcggtcgcccaaaatccacaatagtcccggttcgaataaaaaccaggactaaagatgatttttagtcccggttaaaaactttttgacctaccaaccgggactaaagatcatttttagtcccggtttaaaaagttgtcgggtcgagttaggccccaactcatttttagtcccggttgggggctgcaggaa

SEQ ID NO: 26957 - DNA, 6203 bp, Oryza sativa
aacaaccgggactaaaaatggatctttagtcccggttgtttataccaaccgggatcaaaaatcaaccgaaccgtgcgccagtccaccgtcctctcctctctcattaattatcccttatcccttcgatcccaccgtcctctccatcccttcgctattagccctatccctctcagccttcctcctcctccatccattctcctctccccttcctcccccttctcctctcttcctcctcctcctccttccacgtgaggccgggctgcggcgatagggaggcgggcgcccgagcaggcggcgggcggccgggcaggcggcgggcaaggccggcgaggcccgcgaggcggcgggtggccaggcgggcgaggcccgcgcggcggcgagcagccgggcaggcgggcggcgaggcggcgctccccgggcgggcggcagagcccgaggtggcgggcagcggtgttcccagggcagcggcgctccccaggcggcgggtggcggtgctcccggggcggcggcgctccccaggcggcggcggagcccgaggcggccgggcgggaggccggtgaggcggcggacggccggcgcccgatctctgtgatgtagtttttttccctgatccgtgtgatatgtgcggtcgatctgtgcgatgtcgattttttttcgatctgtgtgatgtgtgatgtgtgaatgaatttgtggagatgttttttgaatgatttgcgatgtatttggagataaaaatgcagcttgatgtatttggggattttgtgaatgatctgtgatgtatttgggtttaaaaatgtagcttgatgtatttggggattttgggaaggatatgtggtgttaaaatgatttgtgaataatatgaatggtggtgctcgaaatcatgaaagcatgaaaaaaaaaagaaagaacattagtcccggttgttaactctaaccgggactaaatctttagtcccggtttttaacactaaccgggacaaaagatggatcttttgtcccggttatttcaaccgggactaaaaataggcatctttagtcccggattcgtagtcccgtttgtataaccgggactatagggggttgcgaaccggtattaaaaagggtttgtccaccagtgtcatctccctgccagctgcttcccctacctctcttcccccaccccttctcccgcccctccccctcctgatgggttcccctttatctctccttcagcatttgttcccctaccatttgttcccctaccccgattcctcatgttgttgagacatcagcgacttccaccacttctctatagatttatccaggttttgcgttgaattttttttggaatttgaagaaggttgattgaaagtttaggctttcactgcttcgatgaaagttctatgatttttgagatgaaagttttgtgattttgagatgaaagttcaagttttcaatcaaaaatattttcagatgaaagtttcagatttttaattaaaagttttgtgattttgggataaaagtttcaattaaaagtttcttttttgagatgaaagttttgggtttctaatttaaatttttataattttcagacaaaagtttcatttgagtcgtttttttcaattttgatatggaagttttagattttgagttaaaagctttttaaatttgtgataaaagttttagcattcttgtggtcaggtggcatcaaggaagaagaacaagctctcgcctctgaatcaatggggagtggggctgaaacatgcgcacgacagcgggcctcatgggcatgcttgtgcacctgcagcggagctgcgccaaagcgctaagcgctagcggtgtcttgacatatactctgtatgttgtcatcatccaaacacccccggtggtacttggatcatggactaaactgtccctgtcctatcggatgtttgaaaattaatttagagtaataaacatagactacatacaaaactaattacataaatgagagctaattcgcgagacaatttttttaagcctaattaatttataattagagaatgtttactgtagcatcacgcgggctaatcatggattaattatgctcaatagattcatcttgcgaattagtccagagttatgaaataggttttgtcagtagactatatttaatacttctaattagtatcaaacatccgatatgacgtgtactgaaaaatttttagccccatccaaacacccccgatatgcgtcactgtattgtgccagatagatgaatatatctgtttaaaaatttcagtcccttaacaactgacaaaaggacatttcaattaattatacaaaaggacatttcaactgttaagtgtgcatggatatgcgaagggacgaacagtagctagtactacactagagattttttttttaagtacagtaaaggtctagatctttgaaagacatacaccacaccataaatagagcacggtaccaagctaatgagtactgagcagtcgagctagtgcccagccttgcgttgaacatcacattacgtacgtttcagcaagcaggtgctcgatcgatcggccatggcaccgcccacggtgctcaactccggcgagcccgacgcccgacgccgcgagcggccgcacgtcgtcttcatcccgagcgccggcatgggccacctcctcccgttcttccgcttcatcggcgcgctgtcctcccacgacgtcgacatctccgtcgtcaccgtcctccccaccgtgtcggccgccgaggccgaccacttcgcccgcctcttccacgacttccccagcatccgccgcgtcgacttcaacctgctgccgctcgacgcctccgagttccccggcgccgacccgttcctgctccggtgggaggccctgcgccgctccatgcacctcctcgccccggccatcgccggcgtcgccccgcgcgccacggccgtcgtcaccgacgtcacgctggtgtcccacgtgaaccccatcgccaaggaccttcgcctccagtgccacgtgctgttcatctcatccgtgaccatgcactggtggagaaaccatctttcgtcggtcggccgatttccacagtagtcccggatgcaataaaaaccggggctaaagatgttctttagtcccggttcaaaagggtaacgggcatatttgatctttagtcccgggttgtgttaccacccgggactaaagatgatctttagttcccggttcaaatgctgtcagggtctgtcaggccctcccggtatctttagtcccggttgataacaccaacggggactaaagatgttaactttagtcccggttggtaataccaaccgggactaaagatcccggtgatctttagccccggttggtgctaccaaccgggactaaagtcccacccctatatatatgtcttcttcctcctccagctgcccgagcaagcttcaaaatttcttcaaaaaagaggggaggtcatgccaaaatttctattgaatttattttggtgattacatacaaatcggaggtgcctaaaaggtttgcaacttcatcctccaatgttttttttgtcatactacatttgcacctatgttttgcacactttttttgtctccaaaatgtagttgtaagttgatgagagagaaaatgtgtgtggggaagaaagaatatatagaaatttagttcatttgctaaacaaggttttataaaatagttgagaaggaaaactctagtgaaagttaatcttaaataatagaaaacaaactaaaatgaaaattaaaagaagtaaaacacattaaaattagtttattacttaacaaatagtttttaagaattatttggtgtaatattttatgatttttgtatgaataaagatatcttataattattgtatgactgtcattattgtaagaataattatttgtgtacggtttttttgactcatgtagatggatcggcaatggatgtacgctgaccggcggtccaaagagtttattgacggcgtgcactattttttgagagtggccgaagctaacaggaaaaggggttttatttgttgtccatgcaataagtgtaagaatcagaaggagtattctgcatccaggactattcatttccacttgtttgagtcggggttcatgccaagctataattgttggacatcccacggagagcaaggtgttgaaatggaagaagatgaagtggaagacgacaatattccggactttgctcaatttgttggatttgaaggaaatcaaacgggcgaggaggaaatagctgctgatggtaacgacgttgcggatgatcttggtcaaatgttgcaggacgccagggaggactgcgaaagtgaaaaggaggcccataaattggacaagatgttggaggaccacagaacttcgttgtacccaggttgcgagcaggggcacaaaaagttggataccactctggagttgttgcaatggaaggcaaaaaatggggttagtgacaaggcatttggcgatttattgaaactcgtcaagaacattcttccggggggaaacaaattgcccgagacaacgtacgaggctaagaagatagtctgcccgttaggactggaagttcataagattcacgcatgtccgaacgattgtatcctatatcgcggtgaggagtacgagaacctagaagcatgccctgtttgcaaagcactacgatacaagattagacgggacgatccaggagaagttgacgggcagctaacaaagaagagaattcctgctaaggtgatgtggtatttccctataataccacggctaaggcgtttgttcaggaacaaggggaatgctagaatgttgcgatggcacgctgaagagcgtcaacaggacgggatgctgagacaccccgccgatggttcgcagtggcgaaacatcgatagaaaatttaaagaatttggaaaggacgcacgaaacatacggtttggtttgagtacggatggcatgaatccttttggagagatgagcagcggccatagcacttggcccgttacgatgtgtatctacaacctccccccctggctatgcatgaagaggaagtacataatgatgccgattattattcaaggccccaagcaacctggtaacgacatcgacgtgtacctaagaccactggtcgaggatcttaaacagttgtggaagaaggaaggtgtccccgtgtgggacgaggacaaacaggaggagtttaacctacgagcgctgctgttcgtaaccatcaacgattggcctgcacttagcaacctatccggacagtccaacaaggggtacaaggcttgcactcactgtatggatgaaacagaaagtacgtatcttaagcactgtaggaaggttgtatacatgggtcatcgtcgattccttgcagcaaaccacccggtacggaagaaaggcaagcacttcgaacataaggccgaccaccgtacgaagcctaaacatcgcagcgggaaaacagtgtttgctatggttaaagatcttaaagtagtgttcggaaagggccctggaagccagcatatagagagcgaagatggtcacgcggcgatgtggaaaaagaactctatattttgggagttaccatattgggaattcttggacgtacgccacgcaatcgacgtgatgcacctcactaagaacctttgcgtaaaccttcttggcttcctaggtgtatacggaaagtcgaaagatacactggaagcacgtaatgatctgaagcatatggaacaacgcggcgaccttcacccggaaccaaaggagaaaggaagccattacttgagtccagccagctacactcttagcaaggcagagaaggaaagtatgtttgaatgcttggagagcataaaggtaccgtctggatactccacgaatatcaagcgaataataagcacgaaggagaagaagttcacaaacctaaagtctcatgactgtcacgtgttgatgacacaactgctaccagttgtaataaggggtatccttccagacaatgtccgggcaacaataacaaagctatgtgcattcatgaacgcaatttcgcagaaggtcatcgatccggatagattagatgcccttcagaatgaagtggtgcaatgtctcgtcagttttgagttgatatttccaccttcatttttcaatataatgacacatctgctttgtcaccttgtgaaagagatccgtattctcgggcctatgtacctacacaacatgtttcctttcgagaggta

SEQ ID NO: 26958 - DNA, 1794 bp, Oryza sativa
  unsure (1)..(1794): unsure at all n locations
gggaccgtcttggtctatcgcgacattccagggatatgacatcaatgggtacacattctacacgagagcccaagacatgaagagcacgaaccaaaacagcgctgttctgtgtcgatgccatgggacacgatggaacaactgccacatattaccgtgccatcgaggacatatgggaacttgactatggtcctctcaaggttcctctgttccggtgccaatgggttaggttgactggtggaggcgtaatgattgatgacagtgggatgacaactgttgaccttaacaaggtgggatactcggacgaaccttttgtccttgccaatgatgtaacgcaagtctttttcgtgaaggacatgtctagcaaaggaaagaagggcagagggcctgatgagcctaagcgtcaagtggttctcncaggcaaaagaaaaatcgtcggagttgaggacaagactgacgaggattacgatcagttggatgggccaccccctttcacggtgacgattgaccctagcatcctcctatcaaatgaagacaccccttactcacgcagcgatcacaaggagggaacaatagtgaggagaaagtacgtgcggtcaaccgtcaccgccgatgtaatgccgtaattattgtgtacacgatgtaaactattttggatgtattgattatccatataaatcaattgatgtatggcatatgttaattacgcacgattattagaggtttcaacaagttcaaatcatgtatatgctagttatatgtgatacttacaatttttaaaagttttaaatcacacaggtggcaatttcatatgtacgttaattagagtttttaacatttaatttactagcattcatatgctaattataattgactattgtatttttaaaagttttaaatcacgcaagtggcaattttatatgttaattagagtttttaacatttaatttactatcattcatatgctaattataattgactggagaatttttaaaagtattaaatttaatatatttttaaaactatcattcatatattagagtttttcacaatttaatttactatctttcatatgctacttatatatgactattcgaatttttaaaaggtttaaatcatgcatgtggcatttacatatgttaattagagtttttagcatttaatttaagtaattcccacgctaagtatatatgatgattacaatttttattaattttaaatcatgcagtatgtacatacatattttaattagagtttttaccaatataataatatcattcatatatatgctaagtatatatatatatattggaatttttattaattataagtcatatatttgcttattacgatttatccacttaatttattacagacaaaaataatttttcgaagtaattgtcattaatctttagtactttaaataatgttaatgcattaacttctattttataaacacatatgtaagagaaaatcatatgcagtgctataatctttagtcccggttcttaaccctaaccgggtttaaaaagaatttcgaaatagcgggaaaagatatttactcccggttgttctcaacaaccgggactaaagatatctaatgtagggtttgtgtagggttctaatgtacgacatttacacttagcatacatgacttagattgttaaaacataaatgtctcgtgacttagcagatgtttcttgtatcaacagatggctgaccgcgatgaggaacagatattgtacgatacaatcgcggagggaagcagccagtactggaatgaagaagaggggaacg

SEQ ID NO: 26959 - DNA, 15187 bp, Oryza sativa
gacacattcccaaagctaagggatcactgggacgagttcgttgcatataagacaggtgaacaagggcaggcgatgatggaaagaaacaaagaaaatgccgccaagaagaagtaccatcaccacttggggtcaggaggctatagcgtcgcgatgccgaagtgggaggagatggaggctagcttgattgagaggggtatcgaaccggcaacagccaattggccggaacgatcgaagttctggtactatgctcacggtggaacgctcaacccagctgatggctcactggtattcggcgttcagatacgagaggctgcgcaacgactaacagatgcagtggaagcctcctctcagggcacgttccgacccgacagagatagggacgagctgacactcgccctgcagactccagagcatccaggacgaacacgagggaaaggggtgattccttggaagattggtttcaaggaggacatccacacgtacaggagtcggatgaggagcaagagagataccgaggcgaagattgcagacctagagttccgggtatcgagctacgaactcaacatgcaagaggaggtggcaaggaaggttgatgaacgcatggccgcacatcggtcccatgatccccagccgaccattcctcctgcaatggtgagcccgtcaggaaaccgtagcagctgcgcctcaacggggcaggtaggatcgcagagcatggacgccatgcaaacacaggacgaatcgacctgtcccgttgatgacatcactcagcggacaccatgtgagctgcatattcctttcaagaacttatcaataaaggtaagatttagccattccgctagttcctgcttatatatgttgattactaataaataatctctcacaacatgaaggtggcgtcggcatggccatcccaacggacccttcaggtacttaccactgcaggccgattccagcaggatactcgaaggtcgaagttgagttggtcgaaggcgcgtacgaggacctcgagctggattaccctggaggagacggtgagacgcatctacgagacacaagccatgccattattctatggcgcaggcggtacatcatcctccctgggcgacaagcggcgtctcgtgcaccatctcctccggctccgccatctcctcctcatgatcctgcaccgtctcctcctcatgctccgccagcaccgtctccacctcaggctccagcatcgactcctcctcaggatcctgcactgactcctcctcgtgctcctacacctactcccccgcaagctcctcttccggcaccttcaaagtcaagggcccccccagctgcaccgcctgcccacacaagggcaacgaagaaggcgaaagttgacgccgacaagaacaaggacccggggtacgattgcacgcaagaggagcttgacgcttacgttgcatcagaagtcaagagacaattcaagcctcgaagtccagaaaagaagattcctatagaccccagtgtcaggaacttcttcaggggtatgtctgcatctgccaaggaggccatcaagctatcgaactatgagcgaacgctgaagaaagcatcttctggaaagtccaaaccagtccctcagcttggagagcaaccaaaacaggagatcgagccgttggttaccggtaaagaaatgacgatagaacaatttattactgacaccggtctaactacggatcaattgctaggagtcgcaccaatcgaaaaggcggaagtgaaatacatgtacgaactcggtaaaccgcttgtcaagcctgagctgctgcagtccctacccacacaaatgtacaaattccatcagctgtacatggagatgagcgccgccggtagagagatgatcggagcgaggatcagggacacggacttcttgcaaggagatgacattctctggatcaatttcaagggaatctacgaactataccagctggacgccctcgacgtctctattatgagttgctggattttgtaagtatatcgttcggttagatttcttactatacgtctcctttaataaattaggtccttgtatataagtagactatagaaaataatatactcccttttatcgttgtaaaatggagattcaaagggcccgacggcggagggttttcgatactggattcatcgaccctcggagagtaaacgtcgcattgctcgaccaatatccacaagaaacagaggacaatctcgtccatctcctgaaggcgcagcattacaagacgttcatactgttgccatacaacacagagttagtttaattttactgtcttcctacataccaaatttcattcccgtacgaacttgctaagtgtttcatatgtaatgcatcccacgcacattgcagattccactgggtgcttttactcttcgacctggaggcctgcaccgtcaacgtatatgactcaatggataaaaaagagtctacgtttgacaaggttttcgaacttatagacaggtaccgtcataagttcctttgttaattaagaaaatcttgttatgttaattgctactacgaatcatagctttaaactccatgtagggcttggtatcggttccgtcatttggtccgcggcaaatggagagaaagacttaggcggaagttcaaatttcctgtgagtacacatgctctatatttatatttctccgattcaaatacatacaagtgtatattaattagatctctcgttgtttgtcatttatttgtagtgcgcaaagcaaaagcagggaaataacttgtgcggctattacgtgtgcgagtattgccactgccttgcaaaccaaatcatcaccacaagagagctcgatgtacgtacaaataaattcaaaatttcattacgtagcgatttcttgtttaattactaatcaatttcatacattcatatagtttattcgcatgagggataacctgaccacacacaaggaatttatcacggcggttcaagaacaactcatgggattcatcaacgaagaaatccttaatcccaagggtgaattctactacgacggaaacacaattcaccggtccttagcttctgagctagcagcgagtactactacgtcgaaatgatagctagctagctaggacatataatggattgtaattaatacatgactacatatgtttctatatgcatgtgtacacattttctataatgtaaatatattttggtcatatatatatatatctatatacatatgcattaatttgcataacatatatatgtgtataaatacatatatattatgcatgtatatacatataatataatataatatatatatatatacatatatatatatgtatgcatatatatgtattgaaacatatatatgcatggtttatatatatatatatatatatatatatatatataaactatatatatatataaaccatgcagcaacagggccatgcaaaaaaaaatggtcagctcgatctttagtcccggttggtgttaccaaccgggactaaagatcgatctttactcccggttatttcacccgggactaaagatagcgatctttagtcccggattggtactcccggtttggaaaccgggactaaaggggggttacgaaccgggactacaaagggtttctccaccagtgatgatgtccctctgctcctacttccccatctacctcgacaacaaggatgcccaggccgacgtcggcgacgtcgacgtccccggtgttcgtcacctgcagaggtcctggctgccgcagccgctgctcgacctggacatgctcttcacgaagcagttcatcgagaacggccgcgaggtggtcaagaccgacggcgttctgatcaacacgttcgacgcgctggagccggtggcgctcgccgccctgcgggacggcaccgtcgtccgcgggttcccgccggtgttcgccgtcggcccgtacagctcgctcgcgagcgagaagaaggccgccgacgcagatcagagctcggcgctcgcctggctcgaccagcagccggcgcggtcagtggtgtacgtcgccttcggcaaccgttgcaccgtgagcaacgaccagctccgagagatcgcggcggggctggaggcgagcggctgccgattcctgtggatcctcaagaccacggtggtggaccgcgacgaggccgccgcgggcggcgtccgcgacgtgctcggcgacgggttcatggagcgcgtgaaggggcgcggcatggtgaccaaggaatgggtggaccaggaggcggtgctcgggcacccggcggtgggcctgttcctgagccacagcgggtggaactcggtgaccgaggcggcggcggccggcgtgccgctgctggcgtggccgcggggcggcgaccaccgcgtggcggcgacggtggtggcgagcagcggcgtcggggtgtggatggagcagtggagctgggacggggaggagtggttggtgagcggggaggagataggggggaaggtgaaggagatgatggccgacgacgccgtgcgggagagggcggccaaggtcggcgaggaggcggccaaggccgtcgcggagggcggcacgagccacacgagcatgctggagtttgttgcaaagctcaaggctgcttaattaattacaatgcatctaaagatagtacaagtactatagtactacaagctcgtagtacaaaataaaagcgtgcatgcatgcaggctgagtcgttgggtcttgatgagtgggtgcacgttcgtgtgtcgtgtctgtatactccgtgtcacgtgaagttggttgattctcactccctttgttcgaaaacaaatcaatctactacgacatataataaaccaacattggctgccatggatatatggatgaagttagagcttattatacctccgtcacagaatatatagacttttatttttacataatacaattattatattaagacagtagataaaatgaaataagaaaaaggttgtgattgaatgaaaagtgaagataggtaaaagaatttactaatggagggttgtgattagttgggaagagaatattggtagagaagttgtattttaggattgagagaatagattttgtgtcatgtgtactttttttttaagtttttctatatattttcaacaatttgttttctaaaaatttaacagatgtaacatgatgtaactacattgtaacttgcatataactataatttaacttccgcgtagttttgaaccgttagattttgttgcacaatgtgagaggatggaaaaaatcacagcgcacacatgtgaacacatgtgagaggatttactctcactttcatggaaatagcatgcaacaaagggactttttttttaaattgtgtaaaagtcacgtttgtaaatacatcatgattgtactacaatcacaaatgtataggcggtctcaattttttgggaaaaaacgaaccatttagcagtttagaaaatgtactaacagaaaacaagaaagttgtactccctccatccacaaaagttacacctattacttttgtcaccaagactaatgtcacgcccggaatttctatccaaaattccaaacgcttaaatgtgtgtgaaccctcgtccaggaatcagccgaggcacacaataacaaattgataatagagtacaattattactctaattaataagcgaataaaatgtcattacagaggtagatagttcctctcaatcaataaggatctaagcagcggaaaataaataaacggcgcagacggctctactccacaggcagcttgaccaaagctacacctattcctccactccatcagcctcattgtagaactcttcctctgatgaatgattgcaaggtgagtatatgacatactcagcaagccacgcagcaaatatgcaagtgcacaggataacaaaggatggcataatagggttgcatttgcaaaagcagcatttagcaaacatttgagaatttgataaaacagttaagtaattaaacaatattaatccaacgctatacaacataccctgttgtataggcccaaccattctgaacaaccaccccggctgcacagttctatctccaaaccaggaatataccattccaaaccaggagctaaacaaattattaccagtttaagcatcttttacaatgatgagaggtgtgagactaatcacgaaagacattgttagacccgcccataaccgcgggcacggctattcgaatagttttactctgatcagaggtgtaccactgtacccacaagacacaaccccacatcatgtcaccatgtgcctcaataccaccacggtatctcggaaaggagttgtgacaatacccctcgcataacacaatccactgcagcgcaccttcctggatcataatcacccccttataaacaaggcatggactccccagcgacccccgtgggcttatctccgccacttctcagtctggtgccccacaatgaaccatgctatacaaaagataaagccgttgcccatgctggcttgtggttggcacgataaatgtttcacaaccgaaactcgtgaaccggtccttaattgtcatgagcacgaccatcaaaaccatgtgctcacaacccaccattatcaggttttagttggcacattaattaattaactaatcacgatcgaccatcgtgaactatcattaagccatcatgaaataatagtgaatcattagttatcccataaatgtgctaatgtttctaagcagggctaagcaattatatctaatatctagttgaaccaatataaataaagctcaactagtcaaattgtaataacccaaggtatcaaggaataaggtaatcaagtacaaaagggccataacaaagaataggtcaattccacccaatgacattcgaaaatagatgcaatagttgaatagaaacaatagctttaaataggatcaacatgctcaaagggttgtttgggatctgtgtgacttgccttgctggccttggaactcttcaaactcttcttctgcgaaaacggactctccggaaacgacggaatctaagcagaaaagagcaaaatcaccaaaacagcacataaacaagcatgaacagtacatgtggatatttttaatgtgtagatctcaattttagaaaaatttagagacttgaaccaactaaatcggagctaagatgaattagttatgaatttttaaagattaaatcggattaaaacacttatatcggtttaaattgaattatgacgcaataatgaattatttttgaaaaggaaaagagggtttattgcgtcagcgggctagggtttggtggaccgggcgcacgggcggcggttcacacgaacggacggccgagatcgaaccaatccaaaatggacggccgagatcgatcgggtccacggcggctcacggcggacgaccccgatgacgtcagcggtgacatcaccgacagcggcggcggctcggtggaggagacggctcgaacggcgcacgctcgccggcgaacggcggcgcgaggacgcaaacggagggcaccaagatgaagcgggcggcacggcgaactcaccggcgaccaaaacgacggcggaaggtcaacggacggcgacggcgacgaggaggaagcggcgaagctcttcggcttgacgacggcgacgaagctccgacgatctctggcgacggcgaaggggcggacgaggacggcgacgacttggcgagcacgacggtggtcttcccgagcgacggcgacggctgaaacgacggcggcgcacggctggagcgacggcggcgacggcaaagctagggcacacggcgctagggcttttccgacgacgagaggcgaaggcgaaggtggcgacgggtagaggagacaccgggggtccttttaaaggggctcagaggcggcggcgaaggcccatggcggcggcaacggcgaaggaaagctcggcttggagagagggaaaccgatccgaaacgaactcgattccacgaacttccaaaacgatttagccaaagattccaaaggagaaaaggtagaggagatcccggagattgtttcgcctcaaacaattcggccggagaaggaaaggaacggccggatttggaaaggaacggcggcggcggcgcgctagggtttcgggcggcggcggccgaaggtagacgatgggtccgacaggtgggacccacctgtcagcgaccgaacgcgcgcgcgcggcggctgcggactgggccgaactgggccgaggagagagagagcggttttgggccgactttcggcccaaagccaaaagagactttttaaaacctttttcaatttaaattattccttaaatgcaattccatttattaaaaatacttccttagctcaaataaatcccagaaaaatctaggaattatagaattaagccaagtatttaatgaaattttatctggccccattttatattggaatttattaattaaaattagattttcttttcaagacttttaaaattatttctaaaaattccaattaaacaacaatttatatattttgaattttcagggtgtgacaaacctaccccccttaaacagaatctcgtcctcgagattcggaagaactggcaaataggtgcggatgagctgacttcaattcatcttctcgttcccaagttgattcttcttccgagtgattactccattggagtttgcaaaaacggataactcgattcctggttcttctctcatttgtttccaagatacggattggtttctcaacataagtcaaatcctcttggacttctatctgttcaagattagcttcttcggtaggtactcttaaacacttcttcaattgcgacacatggaacacattatggactcctgccaaagattgaggtaattctaactgataagcaacctctcctcttctactgacaatcttataaggtcccacataacgcggtgccaattttcctttggtgtgaaaacgatgaactcctcgaagaggcgtgacacgaagatacacataatctccttcttcaaaactcaaatctctacggcgattgtcggcataactcttatgtcgagactgagccactcgcaatctttcttgaatgacctttaccttttcttctgcttcccttaggatatccgtcccgaaaacctgacgttctcccgtttgatcccacaaaagcggagtgcggcacttccgaccatacagtgcttcgtaaggagccatctgtaaactagcttgataactgttgttgtatgaaaattctgcataaggtagattcttatcccaacttccaccgaaatctaaagcacaagctctcaacatgtcttccaaaatctgattcaccctttcggtttgtccgtctgtctgtggatgataagcagtactaaagttcagcttagaacccatctcttcctgaagtttcttccaaaaatttgaagtaaactgactgcctcgatcagacactatcttcttagggacgccatgcaaacacacaatccttgccatgtacaattccgccaagcgacttccggaataggttgtctttaccggaataaaatgagccactttggtaagtctgtcgactatcacccaaatagagtcatggcctgatgacgttctgggtaaaccagtaataaaatccatacctatttcttcccatttccattcaggaatcttcaatggctgcaacaaaccggcgggtttctgatgttctgccttgactcgctgacaaacatcacatactgctacatattccgcgatttcacgcttcatacttgcccaccaaaatctttccttgagatcctggtacatcttagtactaccagggtgaatggagtataaagtatcatgagcttctttcagaactgcatcttttagatctttgttgtcggggacacaaattctctcacccaaccatacagttccttgctcatcctccaagaaaccaatagcttttcctcttctcatattcttcttgatctcttgaatatcaggatcattaatttgggcttctctaacttgatcaattagagtgggcttcgcttctaaggctgcaacgaaacctctaccgacaattcccaaatttaatctttcaaattccttgcataattccaatggcaactgtcgtccttctgtagcattgcaatagccttttctgctaagagcgtctgctacaacattagcctttcccggatgataatgaattcccatgtcataatccttaattaattccaaccatctccgttgtctcatgttcagatccggctgagtaaagatatactttaaactcttgtgatcggtgtacacttctgtacgagtaccgaaaagataatgacgccaaatcttcaatgcatgaacgactgcagctaactcaatatcatgagtagggtagttcttctcatgcggacgtaactgtcgagaggcataggcaaccaccttcccatcttgcatcagaacacaacctaacccaagtttggatgcatcgcaatacacttgaaaacccttctttggatcaggcaaaatcaaaataggagctgatattaagcgacttttcaactcttgaaaactctgctcacattcttccgaccacttgtacttcacatctttctgaagcagtcgtgtcatgggcttagcaatcttagaaaaattctctataaacctccgataatatcctgcgaggcctaggaaactgcgaatctctgaaactgtctttggttgcttccaattggttacggattccacgttactaggatcgacggcaactcctccggctgagatgacgtgaccaaggaatttcacttcagacaaccaaaattcacacttgctaaacttagcatacagttgatgttctcgtagcttctccaatgcaaggcgaagatgttcctcatgctcttctttggtccgagagtagataagaatatcatcaataaagaccaccacgaacttgtctaggtattccataaacaccttattcatcaagttcatgaagaaagcaggggcattggtaagtccaaaagacataacagtacattcgaacaacccatacctagtggtaaaagctgtcttaggtatatcttcctctttgattctcaactgatgataccctgatcgaagatctatcatggagaaaacagtggcacctttaagctgatcaaacaaatcatcaatcctgggtagtggatacttattcttgatagtcacatcgtttagtgcacgatagtccacacacattctctgagtatggtctttcttttccacaaaaataaccggagctccccatggtgatgaactcggtctgatgtatcctttctgtagcaaatcatctacttgcctcttaacttctgccaactcattggctgccattcgataaggtctcttatggatcggagttgttccaggtaccaaatctattgtgaactctatatcccttttaggcggcataccaggtaaatcatctgggaacacatcgggatactcccggactataggaatctcttccaaagttatttggttcagtcttgaccttaaagactcagatgacaatgcatgaacagttacaactcgaccatcatagctggtgagagttacttttttgttggcacagtctatcacacctttatgtctggctaaccagtccatccctaggatgacatcaaggtctttggattctaacaagataagattggccagaaatggtactccttgaatttctattctgacagaggggctacgttgcaaagagagtgcttgattacttggggtactaaccatcaaaggacgtctaagatcttctacttccatcccatgatttcccgcaaaactcatagataagaatgaatgtgtagcaccagaatcgaaaagtactgttgcaggaactgagttaacaaggaacgtacccaaaatcacatctggagcatcttgagcttctgcagcagcgacatgatttacacgagccttggatgctggtacagcagagttattctgggcagggacaaccttcacgcgtcggggcttcggacacttgtcagcataatgtcctggatctccacagttgaaacacaccacgggcttgctgccttgctccctcttggcaggttgttgctgtgctggagctgcaacaggacgtggagcttgattacggatgttgttgccagcattgttgttgaagaaatgacgctgcggacgaacaacagacgaagaacctccctgtggcatgggctggggtcctaaagtaagacgcggcttctgattattcccctgttgtgtcttgaattgagcaatccgacgtttcttctgctccatgcgattgtacttgtcctcctgacgaatagccttatccactaatttctggaaatcaggataatctccaaccatgagtgggtaagaaagctcatcattaagtcctcccaaaaacttctcctggcgctcttcatcattgcgcacatcttccggagcataacgagcaagacgattgaactcgtgcagatactccgtaacagagcgagatccctgggtaagcgacctgaactccttcttcttgagagacactactcctgatggtatatgcgtcttccggaaagcagcggtgaattcaagccaagtgataggttcagcagtagtcctgttaaggcggaagtgatcccaccattcagaggcagggccatgcaactgatgtgatgcaaatgagaccttctcctgatcagtacactgaagtaaatccaacttcttctctatggcatgcagccaatcactagcttcaacaggattagtggtactagagaaaacaggcggcctcacacgaagaaattctgctaacttgttctgtggaggtgcatgattatttccttggttttgctgattctgaaattgctgcatcatcatgttcataagctgtgtctgttgagcaagaacttgagcaagagtgggattctctccattgttgttgttattggggttgttgggaccattcccattgctgcgagtgttcaccatctggcatgggcagggcacaagaagagaaaccggggaaactacttaggacagagaattactttaacttttattgatcttaactgagtttcattattacaaactaaagactcacacaccactaaactcaccaacttcctaacactcaaaagcaaacaaacgcatgcacttacatcccaccactgatgtaaatcacatgcgagccacacacaagcaaactttaagcaagcaaactaacacaacgatctaagacaacgacttaacaagtcactctagttcttccaagcatcggaggtcgattgaaggctcgtctttatcatcctgagttgctacccactcaatcttggaattgttgcgcttggattcttcttcttcatcactacttatgatgatgaccggaggatccgcttgagctggggcaacttctttctccaccacacgaacctttggcgccagttgatagcgagggacaaatagagctctcttccttgcggtaagacgaatcctggccttctgcggcggtgcttctcccttcaatgcggctaattccttctccaaacgatccaccttgtcttctaacttgcaaatcttaccacgattccggtcttcacgatcttgagcggctaacacagtctccgcacgactttcatccatagcccacaacatctcaaccaaatgcttcgtggtagcatcattctcaattccttcagtctcaaggtaactgccacggtcacttccctggggttggcgaggatggtagcgatactcagtgtcggccaattgatcactgtagcgatcacggagctctcctatggcgatccttgccacctcctgacatgcatggatgtagtttcttcctccagcttcaaacatcactgaggggatatcttcactattactgttcaaggtgactttgactcggcacttctcttcatgacgatcatgaggaatctgggcataaaaaggggcagtcccaaatccaatgacaaaggacatcgtacgcaactcctggacaaaaccctcaacaccaaacaggtactcaggcttgtaacgcggcatctaaagacaagtgaaaggaggtagttaagacctttatccaattaatagcacaagtttttggattaatttgaataaagttagaaaatcagagtaaaaaggtaagtaaataaagtaaaccaagctttgcgagataagttaaaacagttggaaacgaggtcacaaattttgtaattttgaataactggtttcaaaagaaatgaaagaaaattataaaatcaacatgctaaatttattttattgcagcaagattaaataaaacagtattgtaaaacttttgctggtaaatgagccattagtacagtaatagatgtacagtactaataacactggaataaatttttaatgagaaccattaaaagagattatgaagtgcatgtgccattagtttggtttaattaaaagagaaagggaggagaccagttctacttttccaatatttttagagggcttctatggataaccatttggcataacctagggtcaacctggctctgataccaacttgtcacgcccggaatttctatccaaaattccaaacgcttaaatgtgtgtgaaccctcgtccaggaatcagccgaggcacacaataacaaattgataatagagtacaattattactctaattaataagcgaataaaatgtcattacagaggtagatagttcctctcaatcaataaggatctaagcagcggaaaataaataaacggcgcagacggctccactccacaggcagcttgaccaaagctacacctattcctccactccatcagcctcattgtagaactcttcctctgatgaatgattgcaaggtgagtatatgacatactcagcaagccacgcagcaaatatgcaagtgcacaggataacaaaggatggcataatagggttgcatttgcaaaagcagcatttagcaaacatttgagaatttgataaaacagttaagtaattaaacaatattaatccaacgctatacaacataccctgttgtataggcccaaccattctgaacaaccaccccggctgcacagttctatctccaaaccaggaatataccattccaaaccaggagctaaacaaattattaccagtttaagcatcttttacaatgatgagaggtgtgagactaatcacgaaagacattgttagacccgcccataaccgcgggcacggctattcgaa

SEQ ID NO: 26960 - DNA, 17495 bp, Oryza sativa
tttaaaggggttcagaggcggcggcgaaggcccaatgcggcggcaacggggaaggaaagcttggcttgaaaagagggaaaccgattccgaaacgaattgatttccacgaacttccaaaacgatttagccaaagattccaaaggagaaaaggtagaggagatcccggagattgttttccctcaaacaattcggccggagaaggaaaggaacggccggatttggaaaggaacggcggcggcggcgcgctagggtttcgggcggcggcggacgaaggtagacgatgggtccgacaggtgggacccacctgtcagcgaccgaacgcgcgcgcgcggcggctgcggactgggccgaactgggccgaggagagagagagcggttttgggccgactttcggcccaaagccaaaagagactttttaaaacctttttcaatttaaattattccttaaatgcaatttcatttattaaaaatacttccttagctcaaataaatcccagaaaaatctaggaattatagaattaagccaagtatttaatgaaattttatctggccccattttatattggaatttattaattaaaattagattttcttttcaagacttttaaaattatttctaaaaattccaattaaacaacaatttatatattttgaattttcagggtgtgacaactaaggagaaattaaatcatcttggatgttataaaatcaagtagtgaatgcaagcatgcaaccaacgagtatttagatgactcattgggttctaatcaaacatttaatttatctcatcatttaagtcatgaatgcataaagaccacaaataggaacaacttatttggaagaactcaaatgtgaaatatgtctaacttttatggatagagggagtaatttggagttagaggatagaaagtatgggtgtatctaccccggaccaaccaaaaaatttcctaacctaagacccatgtagaaaaatatagtaagaaagaactcatgtaatgtgaagcgcgaagttgaagtgtggtcgtctcgatgtcatgtcgtgttctttttttagcttcctcactatatcgtgttgtcatagcagtagtcatcatgccagatggcaactatgagtccgagacagggccagggaaacaaactagcacggcaaggatgcattgcgatgtcattgcaccagtcatcacgccagacgaaaactagaagtccgagatggaggcagcaaactggcacggcaaggatgggaggttatcaagtagtcaagccgacatgtcagcaaaccggaaagggcaaacgtcgtgacacggcgtccacgcctctgtggcagccagcagatagcaatgtcacaagggcgaccagggccatgccgtcaaatttgtaggccctgtacaagactctaagtgagacataaatcaagtaccaaatatagctaaaataatatatatactgcagagcaaatgcgatatatcatgaatagtatattttttaactcctgttttgtataattagaaactgtcaaactgaaaacggagaatgttcgttgttgttgctagcttgctgcctagcgccttgcttgttggttgcttgctaagttgctattcgctggttgaatgaaaatgtgaaattggatgagccggctagcagcctggtgctcggaggagacgagacgtcgaaactcgagatgaattgaataagttacagatatgaaaacgaaagagaatacaaaacgccgtggggcctcggggcttggggttgagaatacgaagcgccacgcacgcgaagtcgccgcgcggagatacgcgcggactcgaacagggttctggcgctctggcctcacacgaatacatgggccttcttcggttgggctaattttttgaggccctgtaaatttggaggccatgtacggtcgcacgggccacacgcccctgtgcacggccctgagagcgacgaacatcggtaaatttgacaacccaaacctcaaattatagatgcgccaccgatataaaggggcctagtcccaaactatatataaggcctatattttgttcatacagttattaatgatatgttttgaccattgacttattccatgttttgtttccaacgaatatgaaattagcatcgcataaaactattttaaaatatgaatctagtgatataacatgtataatatttagcataaatatgattagcatgattattatttaaaagtaaccgagtttgaattttcttaaaatgagaacgaaggggctacaaaacttgctgcatactccctccatcccataatataagggattattctcttttgggaaagattaaggatgaaaataaaagactacaatacccctactagatgtgattttagttgtggtgattggatagttggaggttaaaatagatagaaatttgaattagaattgatagatgtgacaagtaatatagcaaaattttttatattatggaactaatagaaaagataaaatatcttatattataaaacggagggagtatgctacatcacgtcatcactcctcatcactcagccgattgtgagcgagttccacgtagttggtctcgcccttctctaattaatcacaggtgcctctctgttttcctatctccaatcaatggctgtgtttagttcacgtcaaagttgaaagtttgattgaaaattggaacgatgtgattgaaaatttgtgtgtgtaggacagattgatgtgattgaaaaagttaaaagtttggaaaaaaaactttggaactaaacaaagccaatacatcatcatgccagtgacaaatcaaataggcacattaatgtcacgactcccaacctgctcattaaaccatctatctgtcccgactggtcatgtctcgattcgaaccaaaatgccagacatccatagttccacgttgcatcgcgcttacgctatgtatattgcatactctagggagtagggagtagttatacaacatatggtaatgtttttaaaaaacatttatgtataactataatataatcagattacaacattttgataatgttttttactataacatagtagttacaatttatatacaactcatatataacatagaaaaaacatgtatgcgacaagttgagtagtacgcattgagtttgtgtcgaggtttgcaataccgccggtcagggaaagatgcaatgtaattcatgggtattcaaaacgcgaattttagggaagaatctaatatcaaataatttgaagaagtgagacttcgaacccatatcatctagcccaccaccttatggagctagccgaaagacccctaagcgtttctctaattcattggtattcagctgaataaccatgaattctagacacaaatctaatacttattgcccataatgcatatgcacaaccataatctagctagatctatgatactatttatatctaacaatttaattccacccctttctagttgtccccagcccacaaaatcagtaagcccgttcctttctttgcaattaatgctgattgaattatcttcttcacatatcggctttcacagttaatgagcaattagttaagacatagttatctctctaagtttatatgcatctagtatatattagcaacagagcttagttgcagcttcacccacccaattgttttttttctatattttgctatgtaattgatgtccattttcatgtatgatgaagttatattcaacggccaatttcatatttgccactagttgaccaggtattgcgaacctgtcattaagggtgcgtttggttgcaaggatggggtgggatgggatggaacgaacccacttttggggttgtttggttgaggggtgagtgggatgggttggtccctggagaggaatattcctctcagatctaggaccaaccgatccgggaaattctggcggacgaactcgtcccagttgggacgagcgaacggcgtgacgacgccttgcttgtgcactcgccctgctcgagctcggggccggcctgcacgctcaccatactcgccatcaggagcagcggtagacaccggcgggctcggcgatgtcgacggcgaccgcgggcgagctcggcgacgatggtggccgtggtgggctcgacgacggcggcaaccacggggggctcggctcgacggccgcgggggctcggcgacggcgaccgcgggaggctcgacgacggcgaccgcggggggctcgacgacgacgaccacgaccgcggccacgggtgctcggcgacggcaaccacggggggctcggctaggcgaccgcggggggctcggcaatggcgactgcgggaggctcaacaacggcgaccgcgggggggctagatgacggcgaccacggggggctcgatgacggtggccacgggggctcggtgacggcgaccgctgggggctcggctcggtgaccgcggggggctggacgacggcgaccgcagggggctcagcgacggcgacggcggatccagtggtggggagggcggtggaggtggatccgcatcctctgcctgctcgccgccggcatgctccttcgcccacccaacacagtgatagcaaacggctgacggtgatagcaaacggcgcccatcccatttctacctcattccttcaaccaaacaaaagaattgggattgtcccatcctacaaaccaaacaagtaaatggaatcatcccaactaaatcaggaatggtttcatcccatcccacctagtcccaaaaccaaacacatgctaagaaaatgctattacatacttgccataaaaacggttggagcccaacatatctgccaccaaaaaggttggaatccaacatatctgccattagattctaaggcttgaaataacaccgttaggagttgagttctcatccaaatcaggacaaggatgtccctgcccacgaaattgcaggattaacgttctttggcatcaatatacaagaaaaatatcaacatgatagcaacaagaatacagtcaattatcaatgctgctagctgtcgctacctcccaagccacgtgctgttgctgtcgccaaaacctataaatgcgtctttagtactggttgataacatcaactcgtgctaaatatacttttagtactgataccttcagagttagttcataagaaaaacatctctattcaagttagatatgtggagtaggtgggatgataatgcgcgtgaaaactgaggtgagaaatcttgagtttgaacctcacattcccaatttttttttacttagtatgcatctttagtaccgattccttcaaccggtacttaaaaatcaagaactttcgtcttagtttacttgtctcatttactacaaccggtacgaaagaggatttagaaccggcactaaagatcatttttttactagtgtgtcgatctcacaaaaatcgatctccatgagttctctcattgccgtctctagatctaagttcattacaacctttttttaagttgatttactctttgatttgaaatggatcagagaatttgggaatttaggattgctgcaaggagaggggaggggatcggttcttgcttcgtatgcagtaagtcgggagagaggggcagggaggagataattttagtcaagggcaaatcagtcttattatgttgccttgtttcttcgcttagttttatgaagtaatttttgttcttttagttacactagtttaaatggtaatggcaaagagaagcacctcaaaccaacttcagtggcaaatttacaattcgtgttttttttaatgtttgtacagagttaggggtgaaagtagtgatatatttgtaattcttcctacattcaatttctagtagtttcttcatggtttgtgagttttcttccttcgttagtaaaaattgaaaataactttgctacataaagctagcaaacctatgctatacaatattcccaacttccgaaattcttgggtacttttcaatcatacttaaatcaataggttcaacacaaaaattcatcaactgaataaaaacagtttgatgccaattatttcaaatcaaagaaagttcaatccatacaagttgaagtaacagtgatgtataattgtgcattgcaccgtcaatgtatcggtcagtatcattatatctaaaaaagctactttagaattatgaatacccatcctacaaatcctagatctgtcactgccatcagtaaaccgcgcttaccatggaggctcgggaagggcaactagcataatgatttagcaaatttcacccgaatccaaatttgagaaaaaaatataaaactcatggaagcggtacttgaattgtataactagttaaaccctatatctatatccaagccctgaacgagtggttcgggtgcatagatatctaaatcgaacggctgaagatggtgacagccggatctgcagcgaattataaacaaacagttttaagtttccaaataaaattgtaaaggaataagttcgctttagttccctcatattaacatcgagtttgaattacattcttgaaccacaatatcatatataatgtgcacctcatctttcgaaactggtataaatatagtcccaaggtagtattgtagattgttttggctaatggggtgctaacatggcacctaaatcaaaacaaataataaaaaaccttatgagctccacataatagtgaaaacaacattttcttcctcctttactctcctctcttccccatctctatccaaatctccagtgtgcgaccaagagaaaggcgaccgacagggagaagggtgcatgacaaccaacagagaggagctgggtggcagcagccgtgtcaccaagctcgacccgcagggaggtccagggatctcctctctcgcctcaccgccacgggcctcctccgctcccgccgcccgtcctccgtggagtcaccatctactacatttttgtgaggaggcaggaggcatgcacagtgtcaccgtccttactctgtatccctgacgctgccatgacctaatcgaaccagccctggtcgaacctctcccatgtccacttggggtaccactcctggctctccatcgggtgctaggtctcgaggtcgcaccaccactcgaggatctcgaacaccaacatgctgaatagctgaagctgtacacgttgcacttatgtgtcactggcaacaatagctacagctctagcgccacgtagccccgcgtgccccgcacgccggtcatcgtcaggtgggtattgtcacggttgcagagcttggcaagccttgatgttagcaccctttgctccaattcaaatagcaaacatatatgcttcaacactcaaatatttggaggaacaaaagaagaaatgggggatacaagttgctagtaacacaggaaggaggaggaggaggaagaagagaagtagatcaacgagggatgcccaccggccgcccaggtcaccgccgccgccgtgagcctcagctcgccaaattgatcaatcgatgcccccatgttttctgttgctgctcatatatgctggtagtggtgcttgcttgggcctgggctggaacatgactaaccgagcccatggtgcagcctagtagaggccctgacaatcccctcttcttaaaatttggcttgtccccaagccaatgaaagaaacctcttggatcccatggtacctttagtcctttaggctgcaaaaactttgcttccagcagataactaattgttgatataaaagctgcattccttggtaaaatctgaatttgctctgtgataagataaaaaaaaatgcatgtttgatagattgcagaggctctgaaatcaccatcttagtctgaaagcttgcccaatggttgccactgaaatcttcatcttgtttcttgactaccaaacgatttctagcctccacatcccaaattaagttggcagctattgatttaatcacctggagcatggaaattgattcacatatagagagcttgagtgtgcgcctatatccttgtgcaactcttctatggtacagtagagctgcagcattaaggaactgaagcagaaccccgccagagtccaaatgcacctccaagttccatgtcagatcaaaccgaaccattatgtctgaacactgggacaagcttaatgacttgatatgctcttgcttagtgaaggaaagggcatttggaatagagtgaacttgtagcttggatagcaatgacctcaaagatccatcatgaattaatgcttttgggttaatacacatcttcccaggacttgcaccttcaaatatacattgcagctctttgttgctcaactgtctttccttcataatacgagcaagttctttagatataatacgagcaagttccatagattggctattcatatgatgcccctgcattgcaagaccatagacctctcttccctccatcccccatgccaaagaacttactagacttggtggaggccatggtttcaacccagccatctcctgtgttaaaatcacggttccaatgactaaaactccaatatcaaaaggctcccatgccaggaagcttactccagccggtggtggccatgggggcatcaatggtaaaccttccaaatataatttggatcctggccaatgcaaaggttgcaactcccatcgtctaatcactccacccaaccaagaaggtggccatgaatttctcttagcattccccattagcagcttcttgtctttgggacatttcatcgaacacccagtgggcagcaatggaataagatccatttcagccatcaaccatggcgagaagactttggatgatgcatcaggtactagaacgccctcgggcacacccatcatggtccgacacgtgaccctggtatggtctgcgccacccttgacatcaaggccaaccgtcgaacagctggcgggcatcaccttggtactatcaagggtgtcgatgtgggtgtcgtcggtggtgctgccagtagctaccatctccattgatgactccacagaagtggcacaagtaaccacaacagccacagtgagatcaggcttggtgtcggagctagaacatatcatcgaacacatagtgggcgtgaactcaggaaggtccttgatgacaatgaagggcatgtgatccttgccctcaccatcctcatgctccaggatgacagtcggagcagtcccctcgttgatgtagatggatctcgatattgtgctcgagctactatcattggggcattccatcaaacagttggtgtgcactggaaggggtggtgccattggtgttggagatgatgcacccttgaggatgacggtgattgccctgatggcagcaatcatttcctcggaaaccttgctcctacgaacctttatcttctccaacttttgaaatatctaattgatcttctcctcttgcatgcgcatggcctccatttgttcaaacttctccaatatccgatctagagctttgtctagccatttctcctttttgttcacggtagaattgatggggacaggcttagatatcctctgattttccttgggcatctcagattggctaggcattccatcgaacaggttgtgggtgtcggtgtcatgagcagcacccttgcccaaatctaacaaccacttgcatggggcgttgctgcagtactctcccatcaactccatgctagaaatcccatgaatcgacagctctgataccaaattgttagcaccctttgctccaattcaaatagcaaccatatatgcttcaacactcaaatatttggaggaacaaaagaagaaatgggggatacaagtttctagtaacacagaaaggaggaggaggaggaagaagagaagtagatcgacaagggatgcccaccggccgcccaggtcgccgtcgtcgccgtgagcctcagctcgccaaattgatcaatcgatgcccccatgttttctgttgctgctcatatatgctggtagtgctgcttgcttaggcctaggctggaacatgactaaccgagcccatggtgcagcccagtagaggcccgacacttgggcacgtagtacatcggcaatgagcagcaccttgcgcaacttgatgttgtaatgcatgatccagtgctggaactcctcgtgcaggtacctcactggccttgcacaccatgccaccgccgctgccatgctcgaacatgacgcagtcaagcgagccgttctcgaggtacttgtaaacaagtgccttggtggtggtgccttgatgtggtaatatagctgctcctcggtgcggcggtccagtgtgcggtgcagggtcttgacagccacctgtacaccgttggaaaacttgccgtagtacaccatgccgaagccgctgccaccaagctactacgctccgcgtagcccccggtgaacttgcgcagattctccggcgtgaaccaggcgggcttctcccggagtatgtcatccaggaagggttccacccagggtttaaactttcaatttcaggggaaatttcggtgatttcggtgaaattttcaggatttttggcacttttcagaccaaaatgttatgaaattttgacatattttgactaaatttgaataaatttgaccaagttaaacaaaaatttgataaaacccaaaaatttcggtcgatatattgatttgccggtggggtctgaaatttccaaaatttcgaaccaaaattgcaatcactgggtccaccgaccccatctcaacgcggacattgtgatgataatgaggcgctgtgaccgcggccatgctgttgtgcgccgctcgttcgtagcgacactgcccttctcccctctgattccgcacgctggagacttgaacagagatgaggaagagaggggacatgaggagagagagaggaggaagatgtttcactgacatgtgaggcccacaaggtttttcatcatttatttttgcttcccgtgctacgtcagtcaaaatagcctacaatactgccttggaactatatttgtaccagttttaaaagaaaagggacacgttatatctggcattgcggttgaagaatgtaattcaaactcaacgtgaattatcagggacctaagtgaacttattccaattgtaaaccagtttcatttttattttttctagatgggccttcacggctacttactcgccggttacttgcagcggcccatcatggcatcatggcccagagcagccaagcccagaagcagcccagagccgcagatgcagcaagtccctactccctagtcgccggctgctcgcggccattgacggcgattggcgaagtagtcgtcgtcgccggtggcggtggcggccggccgggtctctggcggacggcgcagcgacgtcatccggccgggtttgaccacgacgccgcgtctcgatcgagaaaacaacggaggtggggatgagggaatccgaccgggatccccgagcatattccgctcccggtccacgccccgcctgcaatcatctccatttcgttactagtttactaatactatacgtgtgtatttatacgcttgattcttttatttatttttctttgcctcacctgccatgatctgcatgatgtcatactggtataatattctgaatataccatacgtgttccagtgtcagaaattaagcttaatttgatttagctgttccctttgctggtaactaattagccgctgtgtgaatgattagtaggattcggatacagcgagcatgtataatgtatatgttgtctgaactttgctgtcacagtgcgttggtgtcttcctgaagagatcatatatacatatatgtatatgtatgttgattctgctgtgtgtgaatgatgtggcctactggcgtgttctgttccctgacaggttaaatctcatatccatatatatacatatactctctccgtttcaaaatgtttgacaccgttgactttttaaatacgtgtttgaccattcgtcttattcaaaaaatttaagtaattatttattctttttatatcatttgattcattgttaaatatactttcatgtacacatatagttttacatatttcacaacttttttttaataagacgaacagtcaaacatatgctaaaaagtcaacggtgtcgaatattttgaaaggagggagtatgtaataatgtaaatgtgcataaatacaagaagcatgtctttgtacagtcgctgttgcgtcgagttcaggaaaccgagctcagccccatccatccatctattcggttatctctctcaaaatttaaacacacccacctacatatatatacattagtagtactacattatattaactttgttactccctccgtccctagatatttgaccgctgtcggcttttttaaacatgtttgactgttcgtcttatttaaaaaacttaagtaattattaattcgtttcctatcatttgattcattgttaaatatagttttacatatttcacaaaagtttttgaataatatgaacggtcaaacatatttaaaaaagccaacggtgtcaaatatttagggacggagagagtatatccgaaaacaggatattttttcgcatatacgagaacgtggaattaattacaagcacatgaaataatcgtaccaaatgaatacaattattatagtacccgcgaaaaaaaaaaagtcaaatttgaaacgcgcacacaaacacatcctctacaccttcgccacagcatgcagtgtcatatcataattcatacataacccaacacctcctctcctcccctcccttcgtcttcatttgctgcgtcgccgtacgtcgtctcgctcgctcctccacatggccgaggagtctcgggaagaaggcggcggcggcggcgtcgtggaggacggcgacgaagccggtggacggccggggaaggacggcggcagcggcggcgccggcagggggagagatgggaacaatggcatcagcacgtgggagatcgaggagatggaggatgaggcagggccggcgtcgctggctcctcctgccgacggccgccgccgccgacgtgtacgtggcggtggggaagggcgggtcaagcatggaggcgctgtcgtgggcgctgcggcggctggcctcgccgcggagcttcgtctacctcgtgcacgtcttccccgtcgtcatcagcatccccaccggatgtaagcacacacccctctctgtccatactcttaatttgaccaacagctaattgaaacatgtttccatttatacatttgcctcaagaaaatctggcacatgtgtttctgagatggaactagtgattactacttaatttattggatcattaattagaaatacaaacttcctatacatgtatggtatatttgtctaaggcctagctcatacacttgttgactgtgattatgaagctgctttgatcgtcttcttgagctagctggattagaacaagggtgttttagtattgcatatggaaaattagagactattgatcaaagagtaaattaaaacggttaattcgaaggactgttcttgtgtttcagttggtaagatcacaattgggtcccagcaatctttggttggagattggcctgcagcattgttgaaatcaaggtcaagttcttggactagcttagggggtgatttgtctttgactgaatttttcaaagctggcattgtcacaagctgtagttccattctagctttgttggcatcctgccgtcctacgttaggcatattttgccccatcgcaaaccttgcagcaaaaaagctctagagctgatgttgactgcatggagaattggagatagaaacaataccacccatgtggtgtttggtttaggtgtccatgctaattctagagtgatcaactttccaaaaattctagaatgatcaccaaccaaggcatgtatgaataggaagagatatatatatcatgtccacaaaagtttcacgttaacagatgttacaaaaaattctaggaaaaaaattgaacatgtacttccaatagtattgcacgtatatataaagtatcaacttcaaattcattactccctccgttttataatattataagtcgcttagaatttttctttctaatacgaaatatatttaaaatataacaacattctaataaaaataagcatattatcaaaatatattcaatgttatatttaatgaaaatgatttggagttatatatattgctaaatttttctataaacttagtcaaacataaaaaggtttgactaaaaaatcaaagcgacttataatatgaaatagagagagtatattttagccataatagaaaaggaaaaatattatatatttaagagtataaatgtgtcagaaatttgtccttttttctctctctctaagtataatgaatttgaagttaggtgtgatactattggaagtgcatgtacatttttttttagaattttcggtgatatttattagttagtgtgcacgggacacttgtgtgtaccatgttcggatagacagaataaccctttttcagaacaagggtagtggaagcgagcctacaattctagttgattcagaggagttacacctagttccttctctatatgggtaattttaccatccataagaaaataccgggaggtaatatattttctagtataaaacccgttaccttcagctattagatattttagtatgaaatttagtacctatggctactttctcatcaaggaccgtaaaatttctctagataatgtaagggcttgttctttatgggtgatgtatagaattaagtgtatggaaattattcgagaatataaatgaatgaattaaatattaaaatattgaattgttggttttcaaaaagttttctaagaaatgcccataattaaagtttttacaaataaagtatggttttgaagcttacgaagtgtgccgtatcatctacaatctgtaagctggaaagaacacgacccttatgcgagaaagaactatatttgtttttgtcgatgcatctacagttaagggataatggcccatcagtggtatatttctaaaacccacgtttaatttttcgatttgacaaaaccaattataatttgctcggtcaggtacaaaagtacatcccatcacgaattttgcttcatgtgattccgcattaattttattctctgttctcaactccatatacgtggagtatattggatggcaaacagtagagtagactagtagttcgagtgttataggtctctgagatgccggcgtgagcagggcgagtactttgttacacttccactgaaatgtgaacagaccagtacagtgagattccgttctcgtagcttttttttttttctttgacactcgcacagcaattcatcgttgattgctgaatgatgcagacaggccattctttggcatggccagataggggagctgagaaggacgactgcctagagcttaggaaaacccagggctttctggtatatgcagagatatatactgttgtataactctcattttaggctagctgagcaatatagataactcaccatacagtaaaaaatgttaagagcaaatcatcagtacataactctgaagaaaccgttcggtttttctggagggatagggcgcgcaggatctatatttaaagtcttttcatttggacatcatagtcatggttgagtctaggatttatgtttccttctagcttgagtcgttgttaaatattaggctgcgtttaaatccaggggtgaaaagttttggcgtgtcacatcagatatacagacacacatttgaagtattaaacgtagactaataacaaaacaaattacagataaactgcgagatgaatttattaagcctaattattccatcattagcaaatatatttactatagcaccacattgtcaaatcatggacatctcgcaatttacatgcaatttatgtaattagttattttttcgcttatatttaatacttcatgcatgtctcaatacattcaatgtgatagggtgaaaaattctggcaggggatccaaacaggcccttatactactcccacacatgatgtctacaaccaaaaattggaatagtagctttcttgtcaagataatttgtatttttaaaattttcaattggttctgacgaaacaaatcatatattctgaagctctgctctcaccgtctgaatagacaaaatttctgattgtattttttttttctgaataatgactgtgcgcctgaacttttttaagtctaaacagattaagttgatgcatatcttctgatgaacttgacgtatgtctccttggatatctgaaatagtaggaatgatgcccaagagccaagcaagcccagagcaggtagaaacttacatgaaccaagagagatcaaagaggcgtgtgatgctacaaaaatatttagaccattgccgcaactttcaggtgaactggttacatcagatcttcacatttctgtgctcatacaacagcttgagatgtatctgcaaggcacatatagaaatccaattataattcctgtcatatcttcaggttaatgttgatgtgtacctcatcgagagcgatcatgttaccaatgcgatcctcgaacttattccggtctttcatgtacaacagctagttctgggggtttcaaaatccaaattgcggtaaggtttatataccttgcaagttccaattaacagaactaccaaaataatttgctggcatttcagaaatacattctgaatttgtctgaatgagcacaggaagttcaagagaggaaacacaatagcaggacaggttcagaagaacgcacctctatactgtgaagtcaagattgtctgtgatggcaaggaggttacaactgtgccaactgctgatccaacaccaccaatttcaccttctcctgtaaataacaagagtaattctatcagcccaacgccactatcacctgcaccagatcataacaatcgcgctgtggctgatgatgacaaaaaggagactaatcccaatgaaaggaataaaatcacaaaatatttgaaatgcttctcattttgatcttatacttttatggttgctgcttcagtcacttttgcagatatagaacactgcacgcatagcatcttcagacaacaaaagcttgtaaaaaaacactttcaccaatgttgtgatcttgaatttcttgattcatttgtacaggagatgatggttgttatatgggatatttccagcattttttctgcattgttgtatggtgaagagttgtgcttgattataatataatgtctagaaccacatgaaaaatgcagccaaaggacagaaaatctggcactctattatatcctcaatttttcatgtatagccagaagaccgaacaataaaacatgctaggcagacctccagttggcaacctggcaatcctgacatggagcacttatcattgatcatagattacagcatatgcatgtgacaatttattactccaaaaagaattgtcctagatgggttaatccaaaccttcatagcagacaggaatagggcataggaacacatggctatgtcaagttgtcagccaatcatgcattaacaaaataattgat

SEQ ID NO: 26961 - DNA, 3072 bp, Oryza sativa
  unsure (1)..(3072): unsure at all n locations
tgctgagtactaattactatgagaaatatagggtacacaaaactgagctagcactgcacaagccaaaaagtggcggcctttctttgactcacttgaagattaaccatttcagatctttgctgagaaatataaatctgaatgccaataagtttacttcaagaaaaacaggacatgttgacagaaacaaaaaaaatctacatactaatctgcaagacactacatgtgaaaaccctactcaagatgatgcaaacaaatggaaaaaaaaattattgagtcctaaaagaaatcgaattctagatagctatcactgcttttctgggcagcatcagaaggggcagcagcaggctccgatgttgaaacaggttgctttggaggcctctcaatctcaacaggcctgggaacctctggagggcttgcgcagcgtatcaatgcccagttcacaccctcaaaaaatggatgctgttttatctcagtggcaccacgcttacaacccaatctttgttggggctccttgacgagcaggcccctaattagatctcttgccgagaagctcacaaccgggtattcagggaagcgcagcggctggccaatgacgttgaacagtgttgcacggtttcctgaccctttgaaaggtgtttttccaaacagaagctcatacaagaatatgccaaaggtccaccagtcaacggcactaccatgaccctcgcctttgataatctcaggggccaagtactcatgtgtaccaacaaatgacattgagcgtgcatcactaggttccgctatgagctcaggccatgggctgacctgattgacaacttcaggctttggttttcgatccttctttgacttggagaaaaatcggggaccaaagcatgttgtgggagtggcacacgatggctgaatcatgcaggatggctccacacaagcaggttgaacacaataggcctggttgttcttcccaagtgcttctgcatcagggttagatgatctgatcagtgttgggctcactgcacagcgcagggagaggtcaaagtcagatagcatgatgtgtccatcctcacggacaaggacatttttccggcttcagatcacgatatatgataccaagcatgtgcaagtactccatagcaaggagtatttctgccacatagaatctgcgaccaagaagaaagtgcaatatcagtttactatgctatcttgcaaataagtgaattcaagaagtacatggaacaaaacaaatattccaaagatatgcataccacttttcatgctgttgcttagttcatgctatttgaggagttttagctcttgaatgtggatgtaagctgcagtttttattaattcttaaaaaaactacattgataaaatgaaatatcatggggtagaaattaattttgcatgtattgacttcacattgacaacttgcacaaaattatcatcacaatcagcttacatacttaatataatccatccaattacgcagttacactaacttaaagcaaaccataaccttttctgaattgtgtatccacgttttcgaaatttatcggaacagaaaaacaacaaatgaaaaagatagtgaaccctacaagagtaccaaggtattaatgtgtatcatgtgcattgagtaaatcatacgtacttgacagcttgttctggaaaatacttgccacgctgcctttgtcgaagagtatgcaggtctccaccagggcaaaactccataaccaggcatgagaacttatcagtctcnnnnccgatataacgttggaagaaaaggatgatccaggcactgcaagatttccttctcagtctgggctcgaagcaatttcttgcggcttgcaagtgatgccttgtccataaccttcatcgcaaaatagctcttcgttccactcagttctgaaaggtacacactgccgatatcaccacaacctagcttcttcaatagcttaaaatgactcacgccaaggattccatccctagtcctgatcatctggattgcctcccatcgtgaatcattccccttgtgaggcttggtgacgctactaatgctgctgcaagcgctttaatcactgacatcactgcttgtgcttggcctgcatctgctggtactgaaacctctttctccagtctaagatctcccaaccaacttggcacttccacttgcacttgttatcccatgctcctttcctaaagctgaagatgatttcaagcttccgttcgcaaatcccatcctccacaacacccttttcctcatttgcaagacgctttggaacaggttaccctcagcctttacttctgcaggatcattgctacccgtaagatcaatggactcattttgatgctgagttgatttctgctccttttgcaccacttcgggattcggtttgcttgattcagctgaccttcctggcaccaatgcacttcgtttactcggactggttgtctccaaagaagaatcattctgagaacacagtttcagtgactgtaagttgggagctgcagggggcgctcgaggcattgcctttgaagccattgctcccacaactgatacgtatatatatcagaccagattgcagaaagaactactgaccaatcaaagatttataagcttggtgttgacacttgccttcagaatctgcaaagggcagcaaaagaatttcaattgattagaacatgcctagatacaaaagaactgcccaaaaaaatacagaaatccaccaattcgatgaacaagagatcatcccccaacaatcccaaacaaaaaaaaaaacaaaataatcaagaacccaacctgcacacgcagatccatcaaccttcccacaggtccactacaacgagactcactcctcacaagtcacaaccgaagccacccactgattttatccatctaactcgctcaaaagaaaggcatcatcacaaaagctaatgtcgaaaacactgaacctgtccaaccgcccactaaccgcaatcatacaactctactgtctctacagatctatcgaccatcactccccccactttggaataaacaagtgctagggatcagcaaagatggcttgtcccatcaaaggc

SEQ ID NO: 26962 - DNA, 10142 bp, Oryza sativa
actaaaaagataaaaataataccatcattttgctcaataaaaacattcaattatggtcttcttttctcaatgcatgatatatgataagtatcagtatttatatggtatttttctaattctttcatattagtttttacatatatgttaatttagactaatattttttcccataattaaatggataaataaatcttttttctatatttatctaaaatattttaagtgtatgtaatttaatatgtaagatatggacttatagtataagatttatcttttttaaaaaaatgtggcaccatagtagatgggtagtttagtgaacaaccataagaaatacgccctccatcccataatataacacattcacctaaaatcttttattttatattatagtacggagggagtagagaatttgttgtatgccactgattttggccatattctatattatattaatgtatcaatgagtttgtcaagttctacaatatgccatcgtattttgtttaacttctataatataccatcgtcattcagttaggctccattagtgctattgtacaattttatcctaatgaccgaaataccccgtgatgaactttccaaatttggttaaaaattttctgaaatatcaaattataaatcttccaaagtttgagagcagcaagtcattgcaatggctgctgctgctgatattatacaaccaccagtcacatcaaaacgcaaactttctcgcagaaagccgagaggaaagcaagaataccaccaagaacggccaaaagcaagatgcctcctttcatccttttctgcaggaatgcagacgcagccatggaacctcgcgttcatcggacaaaacataaaaagaaagaaagggaaaaaggcaaatttgcagagaggctaagggggtgtatagatcaggcgcgtaaagttttggcgtgtcatatcgggtgttatatagggtgtcgtatagagtgttcggacgctaatagaaaaactaattatagaatccatcagtaaaccgcgagacgaatttattaagcataaataatccatcattagtaaatgtttattgtagcactacattgtcaaatcatgaaacaattaagcttaaaagattagtctcgtaaattagtcacaatttgtgcaattagttattttttaagtctatatttaatacttcatgcagttgttcaaccgtttgatatgataaggtgaaaaattataaggtggaatctaaacagagccaaaatcacatcccaagaaaaacagcagagaaataaacaacacgaaacaagaagagactgaggccctgattagttcccacgcaaaaacttttcaccctgtcacactgaatgtttggacacatacatagagtattaaatataggaaaaaaactaattacaaccgattgcgtgtaaattgcgagacgaatcttttaagcctaattgctccataatttgacaatatggtgctacagtatacaattgctaatgacggatcaattagggcttaataaattcgtctcgcagtttacaggtagaatctttaatttgttttgttagtagtctacgtttaacgcttcaaatgtatgttcgtatatccgacaagccaaaacttttcacccctaaaattaaacacgcctgaatctacaagagaagggatcgaaatggaaatactactcctacgctgctaccactacgactacgagagatcagtggatgagaaagaactgatcttttcactggcatttgatgtggattcgttctaagatcgcaatgattctgcctagtatatttggtggttgatgtggagggccttgatgtgatctcctcgcggatttgtccccccgaatgacatggccgccctgctccagtacaagaaactatccactttaaccttgggagcaaaaataagggcatgtttggttcgaaaatctaccaaaatattggtagtatcaaaccttgagcaaattttgacactaccaaatttttaatagtatagatttagctccactctattgatttggcaaaaattggctccaatccaaaatgctaacatgcattattcaaaactaccaaagaattagtaggggaagaattggcaccaaagaaaaatggccctaaatgggctagaacctggacccgagctgaactgctgaagcaagacacctctcagagcttttttaccgtagtgttcacaaccccggccgtataatttttttctcttaatatttatatatatatttttctcatactatattcaatgaaattagcacattgtgttgtcggttcgttaaaagaaatacctataatcaggtaaaattcatgacaataagtacttgttacatatatgtatatagtagttgcatatattatttgtttttactgaaccttctcttctttttatctcctttctttaacataaactagttgaatgctcttgtgttgcaatggcatttaaaaaggagaaccccgccgtacactctaaagcctaaaaactaaaattattcttattgtaaaatcttcagatcatattatttgtcatcatttttcctcacttcaaaagaaaattttcttgtttattgggttgaggttgagaaagtgataaaagtccacctatctcactatttggggagacttacatagtattggtagtgagtggtggcagatttaccattcaccaatatcattggtatttttaaaggagtataaatactattctagttctttctgataatagtaagcacttcatgcttttttatttctttttaaaatgatttcctttcactcgtaaggttggattagatcttaccgagaaaaaggggaagcattagaaaattttgagtaaatattgtaaaattgtagattatttctattaaattatcacaaaactacaaacttgacgatataacacataattacagatttagctataaacttatcacataattacatatttaagattgagtattagaaattgaaagactacatacttaaggcaccatattacaaaactaaaactacatagtagttcacattgaattgatatgaaactacagatttaagatagagtaatttcattatcttaaaaaaatcaagtaattgatactagtattttatgatgtaaacatctcataatagaatatcattccctattttgttggaataaaggccccaaaaatggtgggaaagccatgtgtgtaaattatgctgaccccacttaaaaatttccacgattatttgagacaaatcaagtagacgcctaattcaatggagtatatgaaacgtcatttttctagttggaacggtacggctcaaccaattagttggaacgatacaataatgtatatgacggttgtgcaacgtacacgactctccagtatcaatagttgtacagtcactgtaactgttttcagatgcaaatatttgtgagtatttgcagacgattcagggttagttgcagtgcttgtacattctatttgaagctttgggtaaaaagttaaaacttccggtatcaataaggcctctcacagtgcaagacacgcaataagggggcttagcctaaaaaagtgacctaaagacactcaagcctacagtgcaggtatcttcttttgagtgacctaacgagatgaagctactgttgaaggatacaaagtctacagtgggcataccctagcacatggggcactagcaggtgaaggaaatttaattcctcacctacccttctctttctctcagccgcgccgccccttcttctcctccctcccacgcctcttcgcctccttctcctcgacagcgccgcctcctccccgtcgacctcgctgcctcctccccgtcgaccgcaccgtctcacgcgcgcctcgccgcgcctcctccaccgcggcgacctcaagcagcggcggccaaggcaccctcccgcgtcgtctccgtccaccgccgccgtagcttatccgcggcggtgttggcggtggagctcggcatctctccggccgcggcgacctcgagcgggacggactccgtcggcggcggctggcctcgtctagttcgacgccaacggctgacctcgccacctcccgtgccggttcttggcgggcggtaggcggttcttggcggcggcggccggatctggagcaccggtgagctggtcctcctcgcctcccgtgctgctgtgcctcctcacctccatgtctcccgtgccggttcttggcgagcggcggcgagttcttggcggcgggttcttggcggcggcgaggaggaggggaggagtccccggcgagcggcggcgggttcttggcgagcggcggcgggttcttgccggcggcgggagcggcaagtcctccgccatcagcgtcgctccccacctcgccgtcgtcctcctcgtcgtcggaatcggagcaggcgggggtggtgttgcaggaggagtccgatctgttgaatcttgttgtgatgattttgctttcgttttcgttttcatcttgttgaatccgatctgttcttctcttccaatcttcaagattttattgcttatctatcaatccgatctgtggcgggagaaagaatgttgtggcgggaggggattttgggagggtgaatcaggaattttgctgccgcgtgaggggattttgggcgctaggccacgcgagcacgaggctgcgccgcccacagcgtgcgtgacccgccttttctcctcgctgcgcgccctcgttttggcgaggctttgcgtcgctaaggtaggggacgacgaacctagctaaggcgcggtccctccctccacggcggcaaaaaacctacgtggcatgactaagccactgtgaggggcctaaggccctgtttagatgggactaaaacttttaagtccctatcacatcggatgtttgaaaattaattataaatattaaacgtagactattaataaaacccatccataatcttggactaattcgcgagacggatctattgagcctaattaatccatgattagcctatgtgatgctacagtaaacattctctaattatggattaattagccttaaaaaatttgtcacgtgaattagtttttatttatgtaattagttttgtaagtagtctatatttaatactctaaattagtgtttaaatagagggactaaagttaagtctctggatccaaacaccacctaagtaaagcacagctaatgagccaaaagaagctctgtgtaaatactgccgggataaatttgtccggacatggtcaggatttagcaggctaaacgtaaaaaatttgctgtcttttctcgaatcttttgaaccctattttggccgtactcctatggatgaagtactccagcacagttctctctcattcaggagcattcatggcttctttatggcttggattctcatctctgatgcacggaagccaacgtacgtactagctgctcaaacgatgccaagattcaaacgagtccaaaaaaatctgaaaaatgcagagatcaaacttcgcctaaaaaattcaaaattcaaacgtgcagagttattgtatccataaatgtgggcaggtcagatagaagttccgtattcgctatcagtgcactccgatggcccatatcagcagccatcaatgcaggaataatgtccgacaccatatatgtaaaatttacaccatcattttaagatcagtacaagggacaaggaaggagaaagaagggacgaagtagccattttccgcatcgaaattttggttaaaaagaattttggagcactaatgtataaactgaaatacttactactttccaaaaaggcaaaaagaatagaattcagtaaaagcagagccaagttcttaaaaataatgaaaacatgtgtatataactaatacttcctccgtttcacactataacacttcctagtaggcactagcattgtctacgacattgtccacattcaaatagattcatagcatgaatgtagataacgctaggaagtcttacgtcgtgaaaccgaggaagtagtattttacggtggtccgtcggagtatttaccatatgtattattatcagtgtaacaatagagcatattgaaaaaaatatactaattaaccaatttcccatataaaaattaggaagcccacacaaaaatgagtcttaggcatgtgctcaagaccactggaagattcttttcttcttcctctgtcagtgcaggcctatgaagaattcctattgatggaagaagagctcagtcttttgcatttgtagccaggacaaggagatagctggagctttatttggaattcgggtacatacaattctaagagattttacaagctcaattttatgccccttcagcccccaagaccctatatttggctatggaagtcaaagtgtgttatgaaaattaaggtgtttgcttggcttcttttcagtgacatgctaaataccacggatatgcttgacagaaggcattgtgcaaaggagaatgctgatttaacttgtgtcctgtgtaatgggggtcaaagagaaaccgggcttcatctcttcttcacccgccctttcagtgttagatgttggcgacatctgggtatcacttggaatcagcacatggagttctttcaaatgattgttctatcaaggttgaactttgccagaatgggtttcttggaaattttttttattgcctcttggcacatctggaaacagagaaataggtttatctttcagaatgttgtgccctctttttcagtcatggagaagcctcttcaagaatgaaattcttctgcatatgtgcagaatgaaggagcctttagagcaattagttttttgattggttacaacctttataatccttttttggcccttgtaactttggttttctttgtacatatatagtttcttttttcaatgaaaatatactactagacaaagccctggtagtctttctagtaaaaaaaaatgagtctaaggctgagttcggaatttgctttgatggagattttctgcggcatacttaattcggtattaataattattataaacttgaaatatgggtttatttaatattttaaagaaacttataaaaattattaaaaatataccttaccagtttgaaaaacatgctcatggtaaagtggtaaaagagggagtagccaaaccaaaactcactaccgaactaagacttacacgagtgattgacgattgtaggtgtgtgttgatgcgaatgcccacctgcagtggaagatacaagaattatactccctccgtttcatattataagacgtttgacttttttcctagtcaaattttgttaagtttgacaaaatttatagaaaaatttaacatctaaaatataaaatgagtatgtttcagaaaactgcaacttttacgttatatgctactatagttgtcacctatatgtattgtagcaacatataacttttacattatatgctgctatagttgtcacctatatgtattgtaacagcatataacgtaaaatttacagttttatgataatttctcaagctattgttgcagcaaactgaaacatgccactaatgttgcagcaaattgatagttttgtcactaaaattacagttttatgaaatttactcatataaaattagtgtcatttaatttaacattgaatatattttcgtaatatgtttgttttgtgttaaaaatactattatgtttttctataaatttggtcaaccttaaagaaatttaactaagaaaaaaatcaaacgacttctaatatgaaacggagggagtagcacgaattattttccagggcataagcctgatttgaatctcctacattcttcgttttcaactgtgatttctacgacgcggaatcacgaaaagagcgtggtaacgaggcagtgcactcagggcatcaacggcctcagcgatcgccaaaacgacgacgaccgagtgcatcgccaaaaaatctacgacgacagagtgcatgggccgctagaaaaaggaaaaaagccttcctactcctcctctaatgccaccggcccaacacaaagcccaccttcgcacttacacgagtactgcgccaccgtgccccatgggccttgcgggttgggccgggaaaccacatggccatcacttctagcaagttgggcccttttaagctggaccaaactctggctgtttgggccgagcagaatcagtgaggcaaccatcattccaaatgtcacaaaacttgcaaatagttaactggaacgattttgctatatctcactcgaaagattttttcttatctctcactcgattttctcactcaaatttacagtgcattttcttgtaagttacagtgtaatttatgaaacttacactgtaacttttgtaagttacactgtaatttttgaatcttcacatgtaaattttaaattttgtatttgatttggtctttttcttgaggatatggtaatttaatgttcattatggtgtttcttaattgctttttgctttttattatatctatcggattttaatacaaagattaaaaatctgtgtgatacgattataaaaatctttcgaaagatgtataggtactccctaactggaatgtgcgggggttgaattccgctgcgcggtgcaacacggtgcatgagctcgtgctggacacgaaatgcaacatggcatgttttcaggaaacgaaactccaaaacatggatgattcactcgccaggttctaggaggatacaaactggatcgcttcgacttcaaaccagctagagggacaaagggaggaatcctgctactttgggacagtgacacattaaatgtgcaaaacgtccgagacggtcgcttctctatctcagcagatgtcaaagtcatccaatcaaacactaccttcatgctaaccggagtatatgggcctacaaggcaccgtctaaaagatgccttccttcggcatataagaagactcaagccatactcgggagagagctggctgctcctgggagatttccacatgatttacagggctagagacaagagcaatgggaacattaaccttgcgcgtatgacccgcttccgcttagcccttgaccattgtgagctaaaagaaatccacttacagaacagaaagttcacttggagtaatgagaggcgacggccgatcatggtgaaactggaccgatgcttttgtaacgaggcttgggacctagctttcccccagcacatcctaaatgctctaccatcaggcccttctgaccactgtccgctactcctttccaatacttcagggccacggaaaccacgtcccttcaagttcgagaatttttagacaaggataccaggattcaaggacgttgttgcggcggcttggagcaagcagacgactcacacagaacccatgcatcggttaaatcataagctgcaaattaccggaaaaagtctgcgagagtggtccaggggaatctgcactgaggcgaaaatccaattccacatggcgcttgacgtcatacagcggctagactccgcacaggagcaaagagagctcacaacgctagagcactggctgagagcaggacttaaacgccgcctacttggtctggcaacgcttgaacgcgcaaggaagaggcaagcttcccgcgtaatgcacatcaaggagggagatgcaaatacaaaatttttccacctcaaagtcaatgctcgaagaagaaagaattacatccaaagacttcgcagtggaggtggctgggcggtgagccaccaagacaaagatgatgttatcttcgaacacttttctaggatgatgagtaggccagaaccgagaacatgcgatattaactggcaagccttgcatgccccaacgacggacctctcgcatctggacgatcctttcacggaacaggagattcatcgggcaatcaaggagatgccagctgacaaggcaccagggccagatggctacacggggaacttctttaaagtttgctgggacattatcaagggggacattatggcggtcttcgaatcgcttaataatctgagatgtgcgaacatgaacctcctgaactcagctaacatcgtcctgattccaaaaaaggaaggcgcggatgaggtgacggactacaggcccattagcctaatccacagtatagcaaagatcctctccaaaaccttggctttgcgactacgattacacatgcgaaccctc

SEQ ID NO: 26963 - DNA, 1134 bp, Oryza sativa
ttggaaggctgcgcaagacggacgtccaaccgatctttgataaaatagcaaaccgggtcaccggctggaggggaaaaaacatcaggccagcagggcgatcaactctagtcaagtcggtactgactgcgcagcctatctatttgctcactgccctcaagatctctaaggaagccttgggcgttctagatgcaaagagaagaaaattcctctgggtagggacgggggacattacaggagggaaatgcaaggtgaactggaaaaggacgtgcctcccaaccgcactaggaggactaggggttctgaacatggagatgtttacgagggccttgcgactgagatggctctggcatgaatggaaagaccccaccaagccgtgggtgggactagagacaccgtgtgatgaaacggacaaacttctcttcgctgcagctaccaaaataacaataggggatggaaacacgatctacttttgggagtccgcctggctggacgggcaaagaccaaaggacaacatgccgctcgtctatgctatttccaagaaaagaagcaaatcgctacgtgaaggcattgaaaatgacacctgcatcgatgacctggagctaaatgggaacactacttttacactggagctgatcagccagcttgtgtccctatggagcgcaacccaggacatcatgctaaaccaaaatgagtcggatcacatcgtctggaagctctcgaatcatggagaatactcggcctcttcggcatacaaggctcagtgtctaggaacagtcggcaccaacttcaatcccctaatttggaaatcttgggcccctgcaaaatgcaaattttatgcgtggcttgtgattcaaaatagagtttggacttccgatcgactagctacaagaggatggccgaatagcggagtgtgccccctatgccgtatgacgaacgagacggtatgccaccttttagcttcctgtagatacaccagaaggatctggagactgacggccaactgggtggcttatcagcaattgggagccatgccaaagcgtacacgaatggtgggaaatgctagccaacaaaagggaagtgcccaagaaagggctgcgatccttaatcctactcatagcctaggaaatctggaaa

SEQ ID NO: 26964 - DNA, 1105 bp, Oryza sativa
tgctttccaaatcattggttggtgcagattttacatcttcagttgagtgtggtcacccaaatttccatgatctgtatcctgccgagaacttgacaagggtccttctcgatttccatctgataaccggttttcccgtggccatgaaagcatttctagaaaatggtcaaatctaggtctcaatgcattatcgatctcttttgttacaggggtggattgaaagaacataacaaggatcaaggcacatattaaaaccacaacaattatgaagatcacagacagtgatgttgcaacatccctgcaccttcctgcagcataagcaaaaatcagaccaaacagttcggctatgacacacacaaacaatgcctgagtccttatcccatgccggctcaattctgtgctcagaagtaatatgattgtgaccaaagatgccacaaaagaagttgcattggaacaggtgaaaatattgaagcggcgaaggttgtgcctgcgaagaacaaaagtagctggacggtagccatgactgttttcagcccaaaagccaccaggtggactcattccagcttggtatgtgatagtagcagcaaaagttgagagcatcaatatgaacttacgagcttcctcgatttcttccttatcattttggttgctcctttgcttcttggggagatgacaaatggttagaacttgcttcagcattctttgcagcttctgtacagtttgatgcataaatgtttgtacaccctcttttaaccattttggaaccacccttatgaatactagaatgtggattccaacatagaagaaaacagataaaactagcaccaatatataaacagaagactttagagctctgcaactccctgcagcataggcccccataaggctaaagaggtccaatatcatggtaacctgcatcgcacgaagccataaatgctgattggccacacccctacttagaagcaagatgattaagaccagagatgcagcaaaggctgttgcattgcagtaaaagaatgcttcatatcgctggaagaatttagatggaaggagaggatccccagcatgatggacagggctgtcgtccgtccaaaatccccctggtgga

SEQ ID NO: 26965 - DNA, 2445 bp, Oryza sativa
gcattctatctgatgcacgacggctcctcagaaaagtgaaattggtttcaggattcgatggtagctcaatggtggtgaagaacaacaagaacagagatattgtgaacgatacaaaggagacaaagagagaagacctgctgaagtcaatgaccaaacaatgagaggcacaagagggttggcgcatgggactgcttgcttgaccccacggcaatagcaatgttttgttttctagcagcttgcccaagttactataaagaaattgagtgagacatgtaaacttgtaaatgactaataagttggaactaggggtggatatcgagccagctcggctcggctcggctcggtaaagctcgttaggataacgagccgagccggctcgttatcctaacgagctaaaaacccagctcggctcggctcgtttaaaagctcgagctagctcgttaagctcgcgagccaaaccatccaaaaactgcccctagccctcagcaacagccaacacagcaagcagccaagcatgcataatgatagtatgataaattgttacatgaaaatatcaaagcaacaaatcacattcacatattaagtaatctactcaaagtctgggattaaacacatttcccaagtccataaacgtccgcactccagtactccacagtcacaatgacacattctgagttactgacatagtgacatacatcatcagttcatcacatattgcaattaacttcaaaatagttcaacaaaagactgtaattaaacataggttcagtccagtacaataatccatgcttcaagttcaatagttcaatacttcaatacaccaatatttagcataagtgcatatctagtaaagctgcagcctgcaaggttcatcattttcatgatttcatccaacacagttgcacataaacacaaaacacaaatagcatggcaattggcagctccctttctcccatagtcccacactccctttctcccatagggtgtaggcttgtagcctgcaggtaaacaaattatagagtatgatataaatgggtgaaagtcataaacttattaaataaatataaattgtccctactagttgcttgccaccacacaattggggaagtccactatttcgatgtcatcatctccattttctccctatgaaaacagtccaaagtgaacattttatacaaaagacttgacaaaaataaagaataaaaaataatcattgcattacataccacagggataggtgcactattgtcattttgagaggctcttatccagcttgaagcacaaaccaaagcctgaactgtttctggcttcaaagaactccggtagtcatcaagaattcttcccccggtactaaaagtggactctgatgacacactgctagctggaacagccaagaacctctttgccatgttggacacaacaggaaacctatgggcatttaccttccaataattgagtaagttgaaagtgctatcttcgaggacacatttggttcatctagatagatgagtaactcagactttgaggattctttagcatttgactgcaaaaaggattgaaatccacttggaataattgaagccaatgaggtggtagtagagattgaggatgaggccgagtgaccattgtgtggactgttcccaccttggttgtggcgacatatccgctcatactttctgtagagtttttccatctcatcagttatggcagcaacctctgttacacaccttgtctcaccaaaaaattcactgaagcaccatctaatgtacctcattttgaacctagggtcaaggattgtagcaatgatcatgatattgtttgtgttctcccaatatttattgaatttttccaacattgcatcagccatagtcaccagcaatacatcattagggtcaggttcataaagtctagactgctgccctaaccttgcagcttctaacagtgcagtttgtgcttgtgctctagaagctaatattgcaatcttaactttagctatgtatggatagaaaacattggcagtggggtaggttgaccctgaaaatgcagtggttgcaccagacattgttcccaagattggctgaattttctcaaacaaatcccattcagattgtaaaggtagccattcatatttggtgtctgattcagcataataatcaaaaccatttctatactcaatgcatgtctctagcatccgataggtcgaactccaccttgttttaacatcaatagacaaccctctaccaactttaattgaataagtgttgcacacacccacaaacttatacatacgggctggagacttcttaaagtacttcacagtgttcctaacattggttatcaaagattgaatttgttgcaggccatcattaacaaccaaattaactatgtgggcagcacaacgaacatggaaataatctggatcaaactgagcattctttctagcag

SEQ ID NO: 26966 - DNA, 1960 bp, Oryza sativa
gttaaccgttgagggtcaacaacaaatggtgtttttagttaagggtgaaaagtgaacttcaagaagatttcaaggaccaaattacacttaacccaattcctgagataaaaccaacgagatgtttccccaaacctattcatgcaaaactgtccaattcattttcatgtgaacagccacctgtattataacgaacgaaaagaaaattcgcatgtttcaagcattattcatctcctcatgaaaccaatcagttacatacaactaaacatgatcaaaattctaatcatattcaaccaaggagaagaataaaaaaggctgctgcgtctggaatcttatctccctaaatgaaaaatgttgaatattttgttcagcaacaaagaacatcatatcctgtagtcctgaacaaaaaccaaagacatgattttcatctaaaatacaaagacatcacaacagtggcaaaaaggagttttttttttcaacaacctgcaagacgttcgcacatcatagcattaagaagtaaaagaatggggcagacaattgagaacatgtgcgactactgccccctagccaaacttgggaaacaactaaaacgaaatgacaagcacactgaactattcaaaatgacttaagagaacttatatgtgatacaagacacagtctacctccacctattactgtccttttgatttcttgaaccaaatgatcaaggaatttgaaaacattgttccaacaatctgctcagctccttgttattttgttactccttgttattctccagcacagaggccacctacctttcctttctttcagccattttgcgataccactcaataaaataattacaatcataaggtatagcaccaccccgcatactaccaagaagacaaatattgatgttctgacctttctgcagcttccagctgcataagctgtcatcagagccaacaggtctagtatcatgatcaagaacaatgcttggagtggaaccttattctttctcacagatttactcagcagaagcatgattacagcaatagatgccatgaaagagatggaattagaaacatagaacaccatatagcgtctggagtgtatgtcttaaggagcgggttgccagcattgtagccatcacgactgtcatatgaccagatacccccgggtgggttcagaccagcttggtaagcaatggatgcagcaagaattgcaagcagcatcaagtacttatgcctcttttctttcttttcactgataaggggatctgacttgtcactttcattttttgactgacctggacttgctagtgacttttgagaatcagcaagcccaaaaaacttctgtaaccatctccgtgacctggctggcggttctagtgcatcatttgttgatgacagtacaagaacttgaattaaaagacagatgagaactgcagcagttatgataatgagataacctattgattttactttcctgaagcttcatgcagaataagcaatcaggagaccaagcaaacccgctatcaagcagacacgcagtgcgtaggacttgattccatgctcgcacgattccctattgacaagtagtatgataaaagccacagatgacacaaattagagagcatttgaatagtagaaaacatcataacgctttggatggctatcttgaagaactggattgccaggtttgccactcccatcaggccaaatgccacctggagggttcaggccagcttgatatgtgacagttgctgttagaatagcaagaatgaatagcaaattacgcttccgctccaagtccttctcatgagcatcttttgcatcattatctacatgatgttcttgtagtacatcctgtcgccgcttaaacaattgtttccactgttcaggaactgcatactttgaagccaaaacatgaagaaaagtatatgcaactactacaaaaaatatcaccactgatatgtaaatgg

SEQ ID NO: 26967 - DNA, 23395 bp, Oryza sativa
taattgagcaaagattggcttgattaatcagttgattgattagcttgctcttggccatggccaaaccattagatttgccgttgttgctgataccggtcatggttgttatcctcatcagcgtgtcatttgcccaaacaaatgtcacttcgggcgcctccgtgcaggccgtcgccggcgccggctggtcctcgccgtcgggccactttgtcttcggcttctacgccaccgacggcggcctcgccgtgggcgtctggctcgccaccgcgcccagcataacggtgacgtggacggcgagccgcaacgacacgccggccaccggcggcgcgctgcggctcacctacgacggccgcctgctctggaccggcgcgaacggccaggacaggaccgtcgccgcgccgccccagccggccgtcgcggcggccatgcgcgacgacggcaacttcgtgctgtacgccgcgaacgcgacggtggcgtggtcgacgttcgcggcgccgaccgacaccctgctcgccggccaggacctcgcccccggcgcacagctcttctcgagcgtctccgccacgagcagggccaccggcaagtaccggctgaccaaccagctcaacgacggcaacctcgtcatgtacccggcgggcaccatgaacgtcgccgccgccgcgtactgggacaccggcacgttccagataggcttccccctcaccttgcgcctcgatgccagcggcgtgctctacctcgtcggcaacaatggcagctacaccaagaacttgacgaaggccagtgcagctcaagccgtagagcaagctcactaccaccgcgtcacgcttgatcccgacggcgtcttgcgttcgtatcgccatggattgctgtcgagcggcgggtggaagaccgacgtcgagtggatcgggccgagcgatcggtgccatgtcaagggcgcctgcgggttcaacagctactgcgtgcttgatcgcgacgcgcagcccagctgcttgtgcccgccggggttcgatttgatcgacgccggcgacgccgcgggcgggtgcacggcgagctccggcgccggcgagtgcacggggggcagagagccgaccctggttcgtccatggcgaccatgcagaacgtgtcgtgggcggacacgccgtgcggggtgctggccgcgggcacgagcgccgccgactgccaggcggcgtgcatgtcagactgcttctgcgtcgccgcgctgctcgacaccaacgacggcacgtgcacgaagcagcagctcccacttcgatacggccgcgcgggcggcggctacacgatgttcgtcaagaccggtggagcggcgagcccggcgctcggcggcggcggcggcggcaaccaccaccaccaccgcctcaggcgagcgagcaccgtcgcgctggtctgcgtcgggctcctgacgttcgtcgcgctgtgcgccctcctcgcgtcggcgcggctgctctggctgaaccagaggatggtgcgacggcgcgtcgcgctcgccgacgccgaggccctggacgaggaggcgccgctccgctcgtacagctacgaggagctggagcacgcgacgtacagcttccgacaccccctcggccgcggcgcgttcggcacggtgttcaaggggacgctgcggcgcggcggagagaggaccgtcgccgtgaagcggctggagaagctggtggaggacggcgagcgtgagttccagagggaggtgcgcgccacgtgggcgccaaccgcctcctcgtctacgactacatgagcaacggctccctcgccgacttcctcttcaacagcggcggcggcggctacctgttgagttgtgatccaaattcaattgcacttaataaagaccagcttctaccgtagtggagcggaggcccgtcgccgggaggttggggcgaaacggatcgtcatcctttttagggttccaccatatatatatatacacatcttgtaagccgccgtgcggcgttgtaacctcaccccatatatagtggagatattttgctggctggcgcccgtggttttttctctcctgttttgggagggttttccacgttaaatctcgtgtcttctgtgattgatctattgttctttatcgtttgttcgcttatcgtttcctaacaagtggtattagagcttgttcccacattagggtttcgcgatggcgtcgatgaagtatgatctaccgctgctagactataagacgagattctcgttgtggcaagtcaagatgcgggttgttctagcacaaacttcggatcttgatgaggcgctggaaagcttcgggaagaagaaatcgactgaatggaccgctatggagaagcggaaagatcgtaaggctctgtcgctgatccaacttcatctatctaatgatattttgcaagaagtgttgtaggaaaagactgctacagaactttggctcaaactggaatcgatttgcatgtctaaagatctaaccagtaagatgcatatcaagatgaagttgttctcgcacaagttgtaggagagtggttctgtgttgaaccatatatcggtcttcaaggagatcgttgccgacctagtgtcgatggaggtacagtttgatgatgaagatttaggtcttttactgttatgctcactgcctagttcatatgcaaattttcgtgacaccatacttttaagccgtgatgaactaaccctagcggaagtttatgaggcgctccaaaatagggaaaagatgaaaggtatggttcagtctaatgcgtcgtcctctaagggcgaagcattgcaggtcagaggcagatctgagcagagaacctacaacgacaacaatgatcgtgacaagagccaaagtagaggccgttccaagtccagaggtaaaaagttctgtaagtattgcaaaaagaaaaatcacttcattgaagaatgttggaagctacagaataaggagaaaaggaaatctgatggtaaggcctctgttgttaccagtgctgaaaactctgattcaggagattgtcttgtcgtttttgctggttgtgttgctagttatgatgaatggattcttgatactgcatgttcgtttcatatctgcattaacagagattggtttagttcttacaagtctgtgcagaatagagatgttgtgcgcatgggagatgataacccacgtgagattgtgggcattggctccgtacagatcaagatacatgatggcatgacacgcacgctaaaagatgtgagacacataccagggatggcgagaaatctcatctctctcagcacacttgatgcagaaggatacaaatactctggttcaggtggagttgtaaaggtatcgaaaggttctctcgtttatatgattggtgatatgaattctacaaacttatatgtccttagaggaagtacattacatggttttgttaccgctgctgctgtttctaaagatgaacctagtaagactaacctgtggcatatgcatcttggacatatgagtgaacttggtatgacagaattgatgaagaggaacctgctggatggctgtactcagggtaacatgaagttctgtgagcactgtgtttttggtaagcacaagagggtaaaattcaatacctcagttcatcgcaccaaaggtatacttgattatgtacatgctgatttgtgggggccttctcgtaagccctctcttggtggtgctcgttatatgcttaccattattgatgattactctagaagagtgtggccttatttcctgaaacataaagatgatacatttgctgcttttaaagagtggaaagtcatgatagaaaggcaaactgaaaaggaggtaaaagtacttcgcactgacaatggtggtgaattttgttcggatgcttttgatgattactgcaggaaggaaggcatcgttaggcatcacaccatcccgtacactccacagcagaatggtgtggctgagcgcatgaacagaacaatcatctccaaggctcgttgtatgctgtccaacgttcacatgaacaagcgtttttgggcagaggctgctaacaccgcctgctacttgatcaacatgtcgccttctatcccacttaataagaaaactcctattggggtatggtctggtatgcccgctaattattcacagttgagagtttttggatgcactgcttatgctcatgttgataatggaaaattagagcctagagctattaagtgtctgtttcttggttatggttcaggagtaaaaggatataagttatggaatcctgaaactaataagacattcatgagcaggagtgttgttttcaatgaatctgttatgtttaatgacagcttgcccacagatgtcataccaggtggttctgatgaggagcagcaatatgttagcgtgcaggtggagcacgtggatgatcaggaaactgaaattgttggtaatgatgttaatgatattgttcagcactcacctcctgttttgcagccacaagatgaacctattgcacatcgcagaacaaagaggagttgtggagctccagtccgccttattgaggaatgtgatatggtttattatgcttttagttgtgctgaacaggtggagaatactcttgagccagccacatatattgaagctgttgtttctggagaccgtgagaagtggatctcagctatgcaggaggagatgcagtctcttgagaagaatggcacatgggagcttgtgcactttccaaaatagaagaagcctgttcgttgtaaatggatcttcaagagaaaggagggcttatctcctagtgagcctccgaggtttaaggcaaggttagtagcaaaaggtttcagtcaaattgctggtgttgattataatgatgtgttctctccagttgtaaagcatagttcaattcgcacattcttcagtattgttgctatgcatgatcttgagcttgagcagttagatgtgaagacaacatttttacatggagagcttgaggaggagatatacatggaccagccagaagggttcatagtacctggtaaggaggattatgtttgcaagttgaaaagatctttgtatggtttgaaacagtctcctcgtcaatggtataaaaggtttgattcatttatgttgtcacatggctttaagaggtctgaatttgatagctgtgtgtatattaaatttgttaatggatcacctatatacttgctgttatatgttgatgatatgctgattgctgccaagagcaaggaacaaatcactacattgaagaaacagttgagtagtgagtttgatatgaaggatcttggtgctgctaagaaaattctaggtatggaaatcactagagacagaaattctggtttgttatttcttagtcagcaaagctacattaagaaggtcttcagcgttttaacatgcatgatgcaaagcctgttagtactcctattgcacctcattttaaattatcagctttacaatgtgctagtactgatgaggatgtagaatacatgtctagagttccatattctagtgctgtgggttctttgatgtatgccatagtttgctcccgtccagatttatctcatgctatgagtttggttagtagatacatggctaatcctggtaaagaacactggaaagctgttcagtggattttcaggtacctcataggcacagctgatgcttgcttgaagtttggcaggactgataaggggcttgttgaatatgtggattctgattttgctgcagatttggataagagaaggtcactcacaggttatgtgtttaccattggcagttgtgctgtgagttggaatgcaacattgcagcctgttgttgcccagtctaccactgaagcagaatacatggctactgctgaagcatgtaaagaatcagtttggttgaaaggattgtttgctgagctttgtggagttgattcttgcattaacttgttttgtgatagtcaaagtgctatatgccttactaaagatcagatgtttcatgagaggacaaagcacattgatatcaagtaccattatgttcgcgatgtagtcgcgcaaggtaagctaaaggtatgcaagataagtactcatgataatcctgctgatatgatgataaagcatgttcctgttgctaagtttgagctttgctcaagcttagttggtatagtggtttagcccaagaggctatttggcgccgaaagtgttttttgtctttgttgtgttcagggtgaaggattggttcatgctacaagaaggaatttgtctcaaggtggagtttgttgagttgtgatccaaattcatttgcacttaataaaggccagcttctgccgtagtggagcggaggcccgtcgccgggaggcttgggcgaaacggatcgtcatcccttttagggttctaccatatatatacctcttgtaagccgtcgtgcggcgttgtaacctcaccccagatatagtgaagatattttgctggctagcgcccgtggttttttctctcctgttttgggagggttttccacgttaaatctcgtgtcttctgtgattgatctattgttctttatcgtttgttcgcatatcggtcgcgctcgacgtggcgcggggtctccactacctccacgacgagctcgacagctgggtgatccactgcgacgtgaagccgcagaacatcctgatggacgcggccggcacgacgaagatctccgacttcgggctggccaagctgctccagcccgaccagacgcgcaccttcaccagcgtgcgtggcacgcgcgggtacctcgcgtcggagtggtaccgcggcgccggcccggtgatggtgaaggccgacgtgtacagctacggcgtggtgctgctcgagacggtggcgtgcaggaggagcatggagatggaggaggccgccggcgaggaggagcggacgctggcggagtgggcgtacgagtggctgctggtgaagagcgaggcaaagagcgccatgagcagcgacgagacggtggaggcggcagaggtggagagggtggtgagggtggccatgtggtgcgtccaagcggagccgcagtctcggccatccatgaatggtgtcatcttgatgctgcaaggccgtttggaggtgccatttcctcctcctcctccagcttcttcttaagatgctactactaacatcgttgcaactccagctatatatctaaagttgttactaatcgggccttgcaattgaagttgtgttgcatgaatgtgctaatctacgttgataaagtgacaagggcttgagtgatcagttaatcgaacggctgggttggtacagccgttgcatcttgtgaagctgaagtacgtgtatgtgggatacacatgcaggtgtttgattgcttgcatgacatatagctggatatgataaaatgttgtttggttggttgtagcaaagggaggatgggatggttgcatacaagatatgttgtttagttggatgggtacatcttgtgtgtagatacttgttcttatgggtggtgaggttacccctaaaagcttttggagcaagatttttttccaagtcttaaatctgtttatgggtggtaaggttaatccgtagtagagttttactgatatggtcatatttaagaacccaacaatcgcatattcatcccctctagtcgatatctcgatccaacatagcctcctccgtgcgagagcggtgttgcgctaacatccaagtcctaaatctgtttatgggtggtaaggttaatccgtagcagagttttactgatatggtcatattttaagaacccaacaatcgcatattcaccccctctagtcgatatctcgatccaacatagcctcctccgtgcgagaacggtgttgcgctaacctcgcctcaccggcgtcacttgcaaggtattggagatatgaatagttaatataggggagaatatactaacatgtgtgtcaacctatttttaaaatattacttttgttgaataaactgccacgtagaaccaaaaccactcctgatttatttagtgggtaactcgttccatttgaagaattaggggtgtgaaatgtttggtatttaatttgggagggataattcgtttatagtcttgaggtgtaattcaatttattttcctttacgacccaaataatgctatacaattacattcagcggacatagcatgacattttccacaaaaaagctcatcatgagtccacatatatatcgacaatttgggtccttaaataactttgcgattggtgcagaaaccagatcacccagatattcacaataagaatgtaccactaattaaatttctgagaaaaaaactatcttaaattcatagtttggaactgttattaaatattaaccactaaccacaagtaggtcataatatcttactaacactacggaatacagtacaagatcaaatagtgttatgatgaatataatcagaactacttacagtgtccagagggactaggcgttgatagtcatccagggaagcaagcaagcagtattcagggcgaaaggaccaatctaatatgccatcttcctcagagtgcttaaaatatccatgcttctgaagaagccgcagcttactgccatcatccttaatgcatagttatccttatccaggagaacatacagaaggcaataatcctccttcagcttatcgtcaccatgctgcttgttcttctgtagtcgctgttttgacaagtgatgatgatggcaatgagattgatcagaaaagatattattattattcaatgaaaataattggaggttagtgaaaccaacaaacataagtagaagtattacgagtagaagtattacatgtaagtatttataccttatagtatttgaggcgatacagtgcgtggcgaatgtagaggtctgttcaccttgcagcttagtcttgggtcaggacgaggaggcccgtgaggcagatttccgagacaagcaaggcactcctcgccgatgctctctcaaaaaccccagctcgtcccaaaaccccccagctcgtccattcttctttttcttctacttttctgtccatcgtccactgtagctaactactccctatgtcccataaaaaaaatctagtactgtgatacatcctagtacaactaatctagacatacatttgttcagattcgttgtactaaaatatatcatatctagtcctatattcactttttttttatagagggagtaacttgtaaaatcttgtgattttcccgatgcttggcggcaaatatgattctttacaacaaccttgtgcacatctagttggtgtgatttcgatcggcaatagctagttgtgtgttagtgatgaactctcgtcgagatcgaccacagctctcgcgaatttcaccgtggaactcaacaaggcatcactaatctctaataccgaaatttgtgcaaaactctagcagctgctcgtgccatgtggcttaactggtttcgccggaaagagctcctacctcgcacttgtgttggcgtgacttttgctaaaaaataggcccacggacaactgcaaaattaacaggccgtgcaaaatatgaaatatcactggacgattctagagaaatcagaaagaatcccttgcaaaatatggaatatcactagacgattctagagaaatcagaaagaatccagatttaccacaaccagccatacatgtggtcaacctttaataatattataacacaaattctgtataaattaatcgttggcgcacgtcttcactcacggaatcggtctccacgcaatattgccatatatgcggtcaatctctaatcttataacacgaattttgtgcaaatttgccgcccggcacgctgattttctaggcatcgctaatctcttactatcgaaatccgtgcaaattatcgagcaattagcgatgccacgtggcacagcgtggttcgtgcgtgcgctcccacacttgagaaggactaaaatataaaaaacaatcttacgttggagtaaaatcaaaaagtgcaaagccacctgatgtttccggaagggtcacgactcttggtcttctacaatcttgattcactcttcatcttctataatcgttcctcttttctcttgtcattgtttcacattcattctccatcttgtctgatccaccgggagaaagaggtagcgacctccggccggtacctctgcggcaagcatgtcctgcacagagacaacaccacgaggaggaggcggtggccttcggccggtatctctgcggcgagcacgtcctgcaccgcgaggacgacgttggcgagttcagtgaatggcaatcacatgtattagtgatataaatattgcagatttttcattcttaaaaaaaaaccagctagatctgttacttcactgatatatattagactatttgttatagtataagttattgggaatggaagcattcggaaagaagttttactgtccctttgttattgtaaacgcataatgaggaccatcttcattaagaagatagaacccttgtagaatatattttgtttagtgatgctggtactactcctactctaccaagttccaatatcatgaggttttctgtttttgtttgacaatttcgccaatgattaattataacatttgaattttatttgttaagtctttgcttagctccagctttggggcttgtattgactaggagactacccatgcataagaagtttcagactttcagttggttaacttaatttaattcctcgaatatttattcctgtgattatctggtggttaaatttctctgttctgccactatagtgaaaaattgacacacttaatttagtgagaaccaccccaagatattcagagcatggaagctgagccatgtaatttagagacaagcagtttgtcaggcaaaagagcttatgaagatccgaacagtaatgatcaggtaaacaattgctcatatttaaaatcatttgtttttcaatcatataattaacctactactgtactgtgcataagcttggcaccatttcaagcaagtgtattaccttatatggctgcttcaatttcacggttacctaccagataccctgtttacatgtagtattcacatatatacctgacactacatagaaacctcatacttgcccaacctagctactgcatcgtgttaagtactgcatgagaaagaattgctggttcctcagtaacatactttgacaaggattctaattattgttttttttgggaaaataatgaagaagaaaacactgacttttgctatttatagcccaagctggatacttttgttatcctctcatctaccagccaatttatttttgatgtatttagcactcaccaagaacctacactcatctactttccagttactctaatacaaaattgatagggagctttattaaaatcttccattatttaagttccagatcaaatgtctataatatgtcacatactcataccccgcggcgttgctgcggaaaattaagttgcataatatgtacaaaactaaaaacaatttgatacaattttgagcctaaaagtaattgagattgcatgtttttaagagagaagaaagaagaaataatttagaccatagatctatcatccaaaggctagaaataattagggtgatgtgggttaatgagaagagagaaatagcattaactacacttaatggagatgaactatataagtatataggataactattgtgttttgttcagattatacagtctatatcacattatatgccatagattaatttttaaaatttaatactctgctgtagtaatcatgattgtgcaatatagtattttgctacaacttgcattgttgttaaactgatcattctgtctcaatacgaccaaatagtgtggcccatcgagtgttgcacgcgtgtttttttctagtctactaatctaaagctggccattctttctaagtttgattggtccacgtggcgccgtattttgcgaagtgactcgtgaatacgcatctctagctagcagcggtttaaactggacgtaacaccggcaaaaaggaaaaaaaaaaggaagaacgggcgcacgcacagggctgaggttgacaccgagctgtgggctatacagcccaatcatgtgtacctgggctggtcgtttcatgctgttcatgctagaattcgcacgttggacgttggctcctcgtggccactaacaggcacccatgagcaaacagaaataggagaagaaatagtagggaaaaataaatacaaataatttcgtaaaaatatttgaatatataaaaaacatcataaaaaataaacgaaagaagtaattttggcacccctaattacatgtttgtcacaattaacataatttggtttttctcattctttgacaaacacaaaattaaattcccgtaatatgtccttcttaaaggaatttctaagcgtgtgaaactactatgtaatgtacacccatacctatagacacaccacatacacatcctaccactactgtacccagggttttcaattttgaacagggtttttttttgccaggggttccgaattcacgaaatcaccaaaatttcggaagttttggtattttttggcctaaattatttgaaaatttaactaactttaaatgaatgtaaataaacttttaccaaattcacataaatttgcaaaaaaaaaggaaagtttcgggcaagatatgtgcttgccggtgggggcaaaattactgaaatttccgaaatttgttccgaaatttcaatccatatttgtccctttgaagattaaatcatcattcatatctaggaattgataatggctggtacatcacctaccactgaaaaaacaaatagctgtaaataagaccacacatgttaactctataccttaatcctgaatagacatgttccaccacacggaatgtaaccaaccgatctacacttagtatatcctggatatataaaatcaagataagtatctttaccatgttggtgtcctttatttttatttctagaaaatgaaatgggtaatcaaatacacatttatttagatatgtatttcctactaattatgcaacatctatgacttacatgtataaaaaatgatgcatataaataaaacaagttttttcactaatatatatcatctttagccatttcctgaaattaaatagtcgttcagcatgacaagaccactaattagaattctgccttgatttgttccacaacattttacaaacaaaaaaatttaaaacccattaaataatccttttgaatatatggtttataaaagaaaatacacacgggctataaactaattggcgtgccaactgacatgcttattttctagtctatcttctaaagctggctcgtctcgagccatttcattgggtcacatggtggtgttaaattttaggttaaatctaaggaaattatgcataagaaaaaatagataaaagaaaagaaaagacacaaatccaatttctagagacttcatgtcacgccccgaactagtcccgaccggaactagcccgtgacgctccaaattaacctgttaattgtcacgcccagaaattcccgaatagaattccaagcagaatgtgtattaaaacccccgtccaggaccagccggggtacacaaacgacaatgttgacatacagatccacgtcttacaaacattataaaggtcttacagaaatgcagcggaaaacaaaagaaactggagctaagccttgactaaactgcagcgggaacaccactccacaggcatcctcgacggcacggacgaagcctactcctcagggaagccttcatctgacacatacccgtcctctggggttgggaaaagtagagcaagactgagtactacccactgtactcagcaagtcataccggaataggggtatgatgcaggggattaacaaagaagagctagagtggttcatttgcataaaaactggcatttataaacaggaattgaatgcgaaaacggttgtaataattaagcagtattaaatctccgctgtccaacgctaacccacgttgcgacaggcccaaccatccacctaaactatccaagttcaacagattactctagggtgagactaatcacggtgaatctggttgaccgcccataaccgcgggcacggctattcgaatagttttactctgatcagaggtgtacaactgtacccacaagacacagccccacgacacgtttccgtgcgccgacatgccaccacgacataccggaaagaggccgtgacaggacccttcgcataaccccctctagccaagcacaccacacctcaggtttcacccccgtccccagcgggcgacgggcagtcccctctcgtgcctaggtgaatccggaagcgacagaggccgtcgcagggcccgccccgctccatcacgcccacccttgcctggatgcgtcgactagaggaaagctacactacaagcccagccgttgcccacgctggcttgtggtaagtacgataaattcttccagggcatcccgcgaaccggtccttaactgccatgggtgcgactagcaaaaccatgcacccacagcccaccatgtggttcattttatttaaccaacaccagagcggtggtattaaaccaacattatcatataaacctataatctaggttttaaatgagatccccaatgtgtgctagttgaactaagcatggctaagcaattcctagtccaaagtctaatcatgttataacccaagctaacaaaggagcatgatatccaaaagcatggctgtaacaataggtatccatcccatagtgatattataaaacaatgcaatatttgaaagaaaacaatagagcatttgcaaaatgggatcaacatgttcaagtgacaagcatgacttgccttgctctgctgctggagggacctcggcgactatctcgaagtacaccggagcgtcggagggatcggaatctaacgacatacaaagcaaacattgcaaacaggctataagactactgaaacagagaacaaaaccatttttaatggattctacacatttttcttgatttactgagacttgaatgggattaaacggagctcggatgaattagatatgaattttagaagattcactgtgtttattactataaaagaaatccttaaataatttattgcgcaatattaaccagggctgacgtcagcgagggggcgcggcgccgacaggcggggcccaccggtcagcgaccgggagagagagaaaggggtggcggctcgcgggcccactggtcagtggcacggggaaaaggaggggcggcggcgccacgtggcggccgaaccgacggccccgatctacccaagggtagatcggacggcgacggggacctcgcggccggggcgcgcgggcgcggcgcgagacggcggcgaccatggcgccggcggcgcggcgctcacacggcggcggcgcgcatgcggcagcggcgcaaggcggcgaccgaaggcgaccgaccggcggcggggagcggcggctagaggaggagcggcgggcggcgataaatgcggccgccggcgcggctcggcatcaaagccgaccggccggctgggttaaacggcgacggcacgcgtgcgacgacggcggctaccggcggcacgggaaacggcggcggcagtcgaaggcgacggccgacgactcgaagcggcggctagcggctctaggaggagaggaaggggaaaagaagggaggggatgcctcaccgagggtggccggcgcggaggaaggcgatggcggacggcgacggcaagccacgggaggacggcgtcggctagcggacgagcttcggcgtgccctaaggaaggagaagagagggattagagagagagagatggaccatggcgatcgggatccatggccgaaggcggcgatagaggtggcgctcacccgtgcgcgtggagatgagggctccggcgacgaacctcgacggaggaggggtggacgaggtggacctcgaccgcgcgaagctaacggcggcgacggcgtgagacggcggcgagcctagcggcggctagcggcggccggagtagcaaaagcggcggcggcgggtggttgcacggcgcggaggcgttggggagctcgggagaggtcggcgcaatggggaaaaagcgagagggggtgccggcgatgcttaaataggggatgggggaaccggacgtggccgggagcggcgggattcgacggccgacgtgggggagtggggaggagagagaggcgggattcggttttcgaatcccggccatctcgggcgcgggcgcgagcgggagagggaggggaacgggcgcggggaatgcggcgcacgcgcgggcgtggtcgacgtggcccgggagcgacggaggcgtgggcgcggcggcggtttcggcgcggcggtgcgccgggatcggcgggaggtgggggaaggacccgacaggtgggccccacctgtcggcgaccccgagagaggaggcgggcggcggctgccaggctgggccctcggcctgcggccggcccagcaaggaggagggggaggaaggaggggaatgggccggcggcccatccgaaaagaaaaaggaggaaaaagggagggaaaagaaaaagaaaaaggaaaaggaaaaagggttttccctggaattaaaaattgcactttagtgatttttaattggttaaaattatttctagagctctgaaaattccactaaaaatcctgttaatgcatttcgacatgtagaattcaagaaaaattccacatgtcaaatccgattattatatgcattgttttcttagggttttatcctgatttcctctgcattttcttggggtcatttgtaatttacaatttggcttgggaggaaaacttcggggtgtgacaaacctaccccccttaaacggaatctcggccccgagattcggaggagctggtgaagaggtgcggatgggcggctttcaactcatcttccctttcccaggttgcttcctcttccgaatgatgactccattgaactcggcaaaaccgggtgaccttgtttctggttctcctttcactggtatcaagtatgcgaaccggcttctccacatatgtcaggtcttcctggatatcaatgtgttccgaatcagcctgttcttcgggtacccttaagcacttctttaactgggaaacgtggaacacgtcatggatgccgatcatattggatggaagttctagctgataagcaacttctccccttcgttccaaaattttgtatggtcccacgaagcgtggtgccaacttgcctttcgtctggaaacggtgtactccccggagcggagtgacacgaagatacacgtagtctccggcctcaaaagttagctcccttcgacggttatccgcgtagctcttctgtcgagactgagcaatcctcaatctctccctgatgattctgactttctcttctgcttccgctaatacttctgttccgaacagttgacgttcgcctgtctgatcccagaagagaggtgtgcggcacttccggccgtatagagcttcaaacggtgccatctgtagactggcctggtagctgttgttgtacgagaattccgcatatggtaagcttttgtcccaagctccaccaaaatcaagagcgcaagctcttaacatatcttccaggatttgattgactcgctcggtctgaccatcagtttgcgggtgataggccgtgctgaaattcaaacgggtccccaattcttcctgcagcttctgccagaactttgaggtgaactgactacctcggtcggatactatcttcttgggtaccccatgcaaacacatgatccttgcgaggtacaattctgccaatctctttcccgtataggtggtatgtactggtataaagtgagccaccttggtgagtcgatccacgactacccagattgaatcatgtcccgatgatgtccggggcagtcctgttataaagtccattccaatctcctcccatttccattccgggatttgaagaggttggagtaaacctgctggtctttggtgctctgctttcactcgctggcaaacattgcagagtgcgacgaattcagctatttctctcctcatgctgacccaccaaaacttctctttgaggtcttgatacattttagtgctgcctggatgaatggagtacggggtctgatgagcttcggtgagtatcagatccttcaattccttgtcgtccggtacacacaatctttctcccatccagattgtgccatgctcatcctcaaggaaatcccgagcctttccgactctcatgttctttttcagttctgctatttccggatcatttacttgagcggctctaacttgatccacgagcgtaggccgtgcctccagagcggctacgaacccgtgttcaacaattcccacgttgagatgctcaaactcctgccgcaattcctcacacatgccctcgatgcatagagcagtgcagtaacttttccggcttaaagcgtctgccaccacattggctttacccgggtggtagtgaatactcatgtcatagtctttgattagttccaaccatcttcgttgtcgaaggtttaggtctggttgggtgaagatgtatttcagactcttatggtccgtatatacttcgcagcggttgccgatcagatagtgcctccagatcttcaaagcatggaccactgctgccaattccaagtcatgagttggataatttccttcgtgtggacgcaactgccgcgaggcatatgcaaccactctgccctcttgcattaggacacatccaagtccgtgacgggatgcatcgcaatagacttggaagtctttcgtctggtcgggcaggatcaaaaccggtgcggatactaatttccttttgagctcctcaaagctcttgtcgcactcagctgtccatttaaacttctcgtctttcttaagcaactgagtcatgggtcgggcgattcttgagaagttttcgatgaaacgacggtaataaccagccagtcctagaaaacttcgaatctgcgacactgtcttcggtggggtccacttggtaactgactccacgttcgatggatcaactgctacaccctgagctgtaatgacatggcccagaaatttgacttccgtcaaccagaagtcacacttgctgaacttggcgtatagctggtgctccttcaacttctcgagtactagacggagatgttgttcatgttcttcctcggactttgaatagataagaatgtcgtcgatgaataccacaacaaacttgtccagaaattccatgaacactttgttcatcagattcatgaagaatgcgggtgcgttagtaagtccgaaggacataaccgtgcactcatatagcccgtaccgagtggtgaaggccgtcttcggaatatcctcttcccggattctcaactggtggtagcctgatcgcaggtctatcttagagaacactttagctcctttcagttgatcaaataaatcgtcgattcgcggcaaaggatatttattcttgattgtgacctcgttaagtgcgcgataatcgacgcacatcctctttgtcttatcctttttctccacaaaaatgaccggagcgccccaaggtgaagtgcttggtcgtatgtaccctttctgcagctgttcatcaacttgcttcttgacctctgctaattcgttggccgccatcctgtatggtctcttgtaaattggagcggttcctggtgccaaatcaatccggaattcaatctccctcttgggtggcatggtggtgaggtcttcggggaacacttctggatactcgcagactatgggtatgtcctccaattttctcaagttcttctcttcggtgtccactgggatttccgtctcaatctgattcaacgaggctcctttctttggcgagactagagatttgtacaccacggtttctcctttctcattggtcagggtgactgtgcgactcgcacaatcgatgactcccttaaacttggtcagccaatccatcccaagaatgacatctaggtctttggattcgagaaggatgaggttggctagaaacggtgacctttgaatttctattgttatagaagggctgaattgaaccgaagtggagctattccctggggtatgaacccgcatcggtgtgctaagttcctctcttattaacccatgcatcccgacaaatttcttggagatgaaagaatgcgttgcaccagaatcaaaaagtactgttgcagggattgagttaacaggaaacgtacccagtacgacctctggtgctgcttgtgcctcctccgcagatgcgtggttgacacgagcctggataaaccttggtccggcacgcctgggcttcgggcatttgtcagcgaagtggccaagctcgccacagttgaagcaggaccctggttttgctcccgtctccttcttggcttgtgcgggctggcctgactgtgccggtgccatcggtgggcgtggagctgcaccgcggttgggctggcctccatggtggttctgactgccactagtgccctggtggaagttgctagggttgaacgggcggtgctggcggacgatcatggtggtaggtccaccctgctgtccgggagtgaagcgcggtcggtgctgactaccttggttggaccggaactgcgccgcctttcttttcctgtccattttgttgcgctgatcctcctgacggattgccttgtcaaccagcctctcaaagtcggcgtagtccccagatatcagttggttggtcagctcgtcatccagacccgccatgaacttctcctgcttctcggcgtcggtgcggacatcctctggtgcatatcgcgcgaggcgattgaactcatggaggtactctgtcacagtcctgttgccctggtggagcgcccggaattccctcttcttttgtgccacgaccccatctggcacctgtgccttcctaaagctacggcagaactctgcccatgtgacttcagtacccggtgggcgggtggccatgtggttgtcccaccaagctgacgcaggaccctgaagctggtgtgtggcgaaagcgactttctcctggtcattacactgcaggagattcagcttcttctctatcgcatggagccagtcatttgcctccatagggttggtggtgctggagaaggtgggtggcctgacacgtagaaactccggcaacttggactgagggggagggggaccaaactgctggtgctgctgttcggcgtgctgcatcatcctctggtgcatctgttggtgctgctgctgcatctgctgcatcatggctgccatcatctgagtctgatgtgccataacttgggcaagggtcggattctcgggaagtggtggcggaccattgccagaatcaccgttggggtgcacaccatcagcgcgttcttcaccgttgctgccctcgcctgttgcgcggctaccagtcctggtgtagaccatcttgaggggaaagcagacggggaaaagaagaaaaacagatgctcaaggactaagctttattatataggaattaaaactgcaattgttctgatctgaattaaaacacttaaaaaggcaagcaaaaatccttattaagacagccatatcataggcacatgatatcgaccgtcaactgaccccaaacaagcaacctaaacacacaaactaacaagcagaaactagacaatcgataaactaatgggaaaacgagcctaatgctcggaacggctcctgcggtcggtggagtcgaaagcgtcctcctgctcgtcacctggtccctctgagcgactcctggagcctgacagatcagtctcgccgctgccactgggagtagcggacaaccaacctccggtaccactggctgaacctctggcggctgatgctggagcgaaggagagagtgaacgcgggagctggagctggagctgaagctggagctgcaggaactgcgggcagaactgaaggtgctgcgggagctgctggtggaggtgggttcctgggcgcaagctggatgcgcacgggtgcagtcgtcctcttacggggcgtagtgcggatccggactcctcctggtgctggaagacccttcaactgagcattctccttcttcaggcgcgctacctcgtccttcagagcgacgatcctcatgagcttcccatcgttcaaggccttggtcgccttgtgcaggtccgagtgcatcctatccaatcccctcatcacagcacacatgtgaccgaaggtggtgtcgttctcgccagctgtcggacggaaggagctgacgccatcaccatgggctcgacgggggtggtagcggtacgccgtgtcgtggaagatgtagtcgtggcgctcccgtaacctggccatcatcaagtaggctgcctcctgacaggcatgatctgcggtgcctcctgacgcctcaaccgccatgttagcgaggcaagtccccacgtagccatggacctccaagcggacacggtgaggaagctcgccactgagcggtgggatggtcgtgtactccggcgcgtcggggtagcccaccaccagggtcatgcgtgccaactctgccacgaaatcaatcatgccttctccgcggtggttgggtgggtgaccggccatctagagaagacaaaggagtaggatcaatgcatgctcaaatccaaatttaaataaagcaataaagactcaaataaaggaatcaaataagagcaaaattttatgcatagatcattttacatgagtgcgaataaataagactcacataacgataaaataatgggaaattagatacataataataataacgaacaaagcataaacaccttacaacccatgttaccgagctaggacctaatgcatttcacccctcaaaccccaactgactgacgaataaatcccaataattttactaaaaccctagactgactcgttttaaaaaactcactttaaacgagcgaccaagatttttcccttgaaccacaagaacagatccccattttcccggaacaaaatccaattgcaaggaacatatgcaatgaaaaggattcagagggctcttaggtctttccatttggcttgtcctacggtcaaggtcggctctgataccaacttgtcacgcccagaaattcccgaatagaattccaagcagaatgtgtattaaaacccccgtccaggaccagccggggtgcacaaacgacaatgttgacatacagatccacgtcttacaaacattataaaggtcttacagaaatgcagcggaaaacaaaagaaactggagctaagccttgactaaactgcagcgggaacaccactccacaggcatcctcgacggcacggacgaagcctactcctcaggaagccttcatctgacacatacccgtcctctggggttgggaaaagtagagcaagactgagtactacccactgtactcagcaagtcataccggaataggggtatgatgcaggggat

SEQ ID NO: 26968 - DNA, 22588 bp, Oryza sativa
cctcgggggaggcaaaatagacttttgcggaggaatttgattggaaggaattggattcggagttgaactcgacgatagatcggggattgagatcttgagatggcacggacactagacaacaagcaaagaaacaaatttcgcaattagggtttttaagagataattttcccgctaggcgccacgacggaacgggcgctacaaaccaacccccctaacaagaatctcgaccccgagattcaacacctaagggagcaggtccgggaactcggcgcggagaagatcttctcgctcccaggttgcctcgtcttcggaatgattgctccattggactttatagaacttgatggtcttccttcgagtctgacgttctacctcttcaagaaccttgatcggtctttccttgtaggtcagattcttttccagctcgatattacccaggggaacttgctcttctggaactcgaagacatttctttaactgggatacgtggaacacgttgtgcacatctgcgagaccttcaggtagctcaagctgataagccacttcgccatgtctggcggttatgaggtagggaccgatgtagcggggtgctaacttgccggacatcccaaaccttctcataccacggaggggtgatactcgcaggtacacatgatctcccttttcgaactcaaggtcacgtctccgattgtctgcgtaatttttctgacggttctgcgctgtctttaaacgctctcggatcagcttaacttgttcttctgctgacttgagtatgtcaggaccgaataccagggcttcgcccacctcattccagcacaagggggtgcggcactttcttccgaacattgcctcattcggcgacatctgaatgctggcctgataactgttgttgtatgagaactcagcatacggcaaacaacgatcccaagtgccttcgaaatccaaggcacacgcacgtagcatgtcttctaggatttggtttaccctttccgtctgaccatcggtctgtggatggtaggccgtactaaaatttagatcagttccgagggcttcatgcaactgcttccagaaccttgaggtgaactgagtgcctcgatccgacactattttcttgggacagccaaatctacatacgacatgagtcatgtagagttctgctagtttctttccatcataggtggttttcactggcacgaaatgagctgacttcgtgagtcggtccacgattacccagatggagtcgtacccgctgggggttcttggcaaaccggtgatgaaatccattccgatctcttcccatttccactcgggaatcggtaggggttgcagcagaccagctggcctctgatgttccgccttgactctttggcaaatgtcacacagggctacgtattctgcgacgtctcgcttcattccagcccaccagaagtatgccttgatatcttggtacatcttcgtacttcctgggtgaatggagtaggcggactcatgagcttcctttaggatgagatctcttaactccttcttggccggtacacagatgcgtggtccgcaccaaactgtgcctttatcgtctatggagaaattggtgtctttcttctcctgtattctttttattaattcttttatcccttcgtcgtctttctgagcctcccggatttgcgactctagggtaggctgtactgtcaagctggcagggacacctgactgtaccacggtcagtcttaacttctccaattctctgcacaggtgatcttggtcaggccgtatttgagctacattgcaataggccttgtgacttagcgcatcagcgaccacgttggctttaccaggatgatagtggattccaagatcgtaatccttgattagttccaaccattttctctgtctcatatttaactcggtctgagtgaagatatacttaagacttttgtgatcggtgtatacttcacatctgttcccgattaaatagtgcctccagatcttaagagcatgaaccacggctgccaactcgagatcatgggtgggataattggcttcatgaggcctgagctgcctggatgcataggccacaaccttttgttcttgcattaggacacatcctaagccttgtcttgatgcgtcacagaagatctcgaaatcttttcggatatctggcaaggtgagaactggggcagtggtcaaccttttcttcaattcttggaagctgtcttcacaggctgcagaccattgaaatttcttttccttctttaacagctcggtcataggtctggctagcttagagaatccttcaatgaatcttcgataatatcccgctaagccaaggaagctgcgaatctctgacacattcttgggcgggttccaagcaagtacagcttcaaccttgctgggatctacttcgacaccgttggacgagatcacgtgtccaagaaatgctactcggtctaaccagaattcgcacttcgagaattttgcgaatagttgatgatctctgagcttttccattatccgcctcaggtgttcagcatgttcctcctcgttcttggagtatatcaggatgttatcgatgaataccacgacaaactggtccaggtattccataaagattttgttcattaagttcatgaagaatgctggagcattggtgagtccgaaggacattactgtgaactcatatagaccataacgcgttgagaaagcggtcttcggaatatcttcagatctgattttcagttgatggtaacctgacctcaagtcaatttttgagaagactcttgctcctttaagttgatcgaataaatcgtcaatccgtggcaacgggtacttgttctttatagttacttcattcagggctctatagtcgattaccattctctcagagccatcctttttcttaaccagaagcactggggctccccaaggggatgagctaggtcgcacataacctttactctccaactcttcgatttgtcttttaacttctgctaactcattagctgccattcggtagggtctttttgcaattggagctgtgcctggtgccagttctatggcgaactcgatctctcggtctggtggcattctttttaattcttccggaaatacgtcgggatattcacagactatgggcaccgactccaaggaggtgacttgtaaacaggttaggatagaccgacttgcggtaggggtgttaggggtaaagcggacttgctttcctccaggtccttgcaaggtgatggacttttcggcacaatctatctgtcctttgtgcttagccaaccaatccatccctagaatgatgtccaagctttgcgagtctaggactatcggtttggctaggaagtcaacttcctcaattctaaggttaacttccgggcatatttgagttgcccttatattccttccaggggaatgtactatcattggtacacgcaaattttgggttttccaaccatttcttttcacaaaagcttgcgatatgaaagaatgggaagctcccgaatcgaacagaactattgcgggtacggagttaacagagaacatacccatcacaacgtctggagcatcctgagcggtttcagcttgaatgtgattcacacggcctcgaccaaagttgttggaagcacgtgaaccttgtccacttgcctgagagctaggacgagactgagctgccgctggagtaggagttctggcagtgctgccattagcatgccctgagttggtgttggtaggattctgaggacactgtctagcatagtgacccatctggttgcaccggaaacactgaactgctgacggtccctgcggtgacttgaaagagataacactgttaggcgcagtattgccactaggggcacgctgctgtggctgaggtgccggacggtttatctgaggacgaggggcgtagcctggctggcggttagcctgagtgaccgactggtggtattgcatgggttgaccgtagcgagggcgaggtgcgcctcggaaagaatttccctgatggttagacttgcgtttcttgtattcttcggtagcctcttttctggcatcctcaagtagaagtgccttgttgatcatatgttgaaaagtggggaagtcatgagcaagcaactggagtctcattccaactgcgattcctttcaagaatttcctgatcttcttcttgtctgtgtccacttcctcaggggcataccgagccaacttgttgaactgacttaggtactcattgatactgctgttgccttgcttaagtctgttgaattcttctttcttcatgtcaatagtgctttcaggcacatgagctgcacggaaagccgtagcgaactcatcccaagcaatgttagtgggttcagggtgtgcattgcagtaattctcccaccaatctgcggcaggtcctcttagttggtgagaggcgtagagcatcttctcaacaggagtacactgcactaagttgagttttctatcaacatctttcaaccaatcgtcagcctcgacgggctcgacggtctgagagaactctggcggacgagacctcagaaagtctgtcagcttggatctgttgttgcccatgtgagggtggccatttccatgcgcattatgctgaaaactggctatggctgtggttagtccttgcaagatttgtgtctgaactgccattaagtgttgcatgttggtttccacatgaggtgggaaagggaggcgttcttctccagaattgtgactggcagtgcggtgagagcggtgagactgtcccatctctgcatcacgggaaactgtgcgatgcgagcggctgctgcggcggggttgctcaacctctgcgttgcgggaaacagtacgatgcgaacggttgctgtggtgagactgctcattagctgattcatgattttcttctggctcaactctaccatcctcaaaaccaaagcgggctggtgcacgagctgcacggcgggggcggctagccatctaaactcccagaagagggcggggtaagagtcagataagcacttaggagggcaaggagcaaagcaaatagcaactcagatagcacacactaggcataaactggatttttcaaatcataaaaacacctgatacaacgggtgtggacaagtcacagagctacgccgagcttgactgtgcgcacaccacctaggagaaccagactaccaaacaacacccacaacaaacacacgcacgcactacctcgccacgactccaaaagagttggcggcggaacaaaagggcctatcacacggacggctgctgaagactgcctcctctactcctcgtcggcctggctgcctcctgtagtcggctcctcagtcgaagaaacgtcgatcggctggcgcgaagggaccggcggaacctgtcgagggccggcagcagcacgggccgctggcggtaggggagctgggtagtggaaacggaacacggtggcagaaccaacaacacgcttccgcgcagtgcggataaagcgtgggccacggcaggaggaagcaactggggtgtgtcctggggtgtaggaagggctaactgggtgtgggtagggcgagtacactggtgagtacggcgcacgcgagctgggggagcgcgggccactgggagtgcgggcagagccgcgggagctgtgggaggacaggtggctggcgtggcagaggcggcctgagtcccaggagatagtgtcaactgaggtgacaccctcctcggccagacgggcctccaaggcggcgtagcggcgggcaagggagcggtaagcctcaaggagtaggtcgtgctgagtggcctgagcctccgaaagctcaaccatgcgagtcagcactggctgagactcgctgtacggacaagggtacctggcgtctgagtggccagaaggaaggcgtggaagctgccggaaggcggagcctccgagacggtggctgtagtcgtgggccaggcgacgaagcgcagtccaggagaggtcctggtacgcgatctggagagtgggcctggctacagtgaagtggtgtgggcgaaggccagctccgtgtatacctccacgggggtaaaggtacacagagagctcacagtgagggggaacacggtccacggagtaccccgtgtactcgggacacgagaagccaaggaaacgggcgaggtcacgaagctgagcgacgtggtgaccctcaccaaaaccgtgggaactgaaactggcgttcactgccatctacaattttgaaagagggagaaagatcagtaaccattttagaaacaaactattgaaaataaagaagacaaaagaaaccttagcttttcgcaagtagttttgaacttagtatccttagggtcgtcctaagtgtcgggtttcgccctagggccaagcctgtgctctgataccatctcttgtcacgccccgaactagtcccgaccggaactagcccgtgacgctccaaattaacctgttaatcgataccagtcccaggaaatagtgctggtatcacagggagacagagtatcacagcaacagaggtctctttattatagagtagaagtacagtcatattgggctgcggacagatcccgagctcacaactgcattacaaaaggaaagcggaagccaggacttggaccaatcatcacaggcgcgacttgggaactaggccgaaaccctaaaactcatcgtagccgacttgctcctggaagaactcctcgtcagcaggatccacttcatcttcttcagcaactgggggaggattatttatatagagcaagggtgagtacgggagtactcagcaagccaggggaaataagtgtttaatgcaggcttcaaggaaaggctgtttttttcgtaattgattttgtttgaactcttttctaaaaagtctaagtgagtgcttctcaaacgacacggatgagacagtgcatctcgtccggtcggagtatgtgcaatgtatcagtctttagatcttgaaacagggttggcacccggccaacagcttttcaaacggccacccgggccaacaacatttcaaacggccacccgggcctagctgatcccgtcagctgctgatttttcaaacatcgaacccagtttcacaacagcaatttcacaagcagtagtcagacaaaactacactaggaatcacctcacatccgcccatgaccgtgggcacggctgttcgaacagtttgttaacctctgcagagggggtacactttacccacacgacattactaacccggatcacccagcccgtggggatcagccacgtcgggagacctccaagctttcatgacaaggcatttcgaaagccgatacaggtttaccatatgccgacgagaggggtcccagaccaacaacaggttaggtcccagaccatactgtgccaggaagcccaggggtcctccccgacaccaccccggcgaatccacatgtctctcggcatcaaggctcccctgataagctagttactcagccaggggtgtcccattccacccatgtggtcgtacttgtcttatgtttggatgaaattctaaggaatcggtccttaagtgcgagagcgggaaaccgtacacccggtacgttccccggtccgcggttttggaaattcatttagttcgcaagcaccgacccaggtgtcgggttttccaagtcttttgtaaaactccagttttacccaagttgtttctcagattttaagtttgaaggcgaccgtcgatactcgcacagagtgcacgaatatcgaggtgcaactgggtggttacaaggggacatggtataacaattaacaaaggaatgatcaaatgcaacaaattaggtaggtctgccaatctgccttgcagacgggacaacagattaagtgtgatcctatcaatgcataatatttcgcaagcaaaataattaaatttcaaatataggctcaagatgttcaaaggtggcttgccttgctcgagatctggagcttgatcctcgaaatccttgcactgcgggtcttcgggctccgaaactacacgcgaaacgggacaactcaacaaaacggcgaaaatagagccctattaaagacctctaagcgtgccactagatagatctcgagatttgggaaattttagaagttgaatggagtcaaatggaattacggttgggaagatattgaatttataagattattggatttttggtctaaaggaaaaggatttaattaaatcctttttgaaaaagaaaagaaaagaaagaacagagggatggaaattagacttttcctcgggcggctagggcgcggtccaaggtaaatggagcggctcggccgagcttaacgggccggccggcccaagacggcccaagcgcgcgcgcgcgggagggagaagagagagtccggtggaccgggctcaccacgcgcggtcccgggtgggacccgcttgtcagcggctcggctcaccatgcggagggagtacgtggctcatgcgcgcgggcggggaaaggacgcggtgcacgcgcgcggtccgtggtggacgcaggtgcggcgggcccacgcgcagcctcacggctcgcggtggaacgcgcgcacggggagggactgaccggggtcggctcgatccggtctaggctgagctggcgccgacgtggcgcctacgtggcggccacgtgggctggcgggaggtagacgacgacccggcctcgaatggacggcgggcggcggcggcgagcggcggagcgaaccacggcgatacgggcaacagcgagcacaccgggcggttgcacgtgacaagggaaggcgagccatcggctcggattcgccggaggttgctcgacggcggcggattgcggcggcggcaaccggcggcgggagaagagggaaacggcgacgaggtcacgagaggtcgattcccggcggtgagagcatctacgcggcttcgggaactcgacgctagcgtcggattgggcggaactacgccgagcgaggccggtgacgagcgggtgctacggagctcgagcggcgacggcggcgaacacacggcgagcgacgacagcggtcggggcggcgccggctaactacggggaggctactcaagctactaccgaaagctagggggaggagatggagcgaggaggaagaacggagagagacatcaccgagaagaggaggggcgctgtgacgagaggccggcggcgcgggagtaatctctccggcctcgggccggggaagaggaaggagagggcgcggccgaagtccccttccgcgtcctcgaacgcaccggctctcccggcgcttggcgaaggacggcggaggcgagacagagcacgggggcggcggcaacggtgaggaggcgaatgggagaggaagggaaagggggaggcttgggtttataggatggcaatgtcggtttgggaaccgacttagggcggtcaagggcgcgagctggcgctcggcggtcgcggccaaagcggcgacagggaggatgacgccggcgaggaggaaaaaggggaaaaggagggggagaaagggggcttgcccctttgccgattcgggaaaaagggggaggggagcgggggcgacgcggcagagaaaggaggggcgcggcctccttcccttggcggcttgcgcgcggagtggcgggggccgggcggtgacgacggcgatgacggcgggcggtttggagcggagcggcgacactggcgacaggcgcggtagacgctgacgacggcggcgaccgggcggtcggccactcggcgcgcgcgcgcgggaaacaacgggcggcgtccgcgcgggcacgcgcacgcgaacacggcgcgcgggaagcgtctttgcgagcggggagctcgcgcgaggggaggggcgctcggcgcgggcgactcccgcgcacgcgcgcgcggcgcgcgggcggggcggaggggggggcggggagagaggcgctcggggaggctctcgcatgcgcgagcagcgtgtgggcgggaaagagagagagagagagagagagagagcccaggggggagagggagagatgggccggggaagaggggaagatgggccgagcgagattcggcccatcgacctcgggggaggcaaaatagacttttgcggaggaatttgattgaaaggaattggattcggagttgaactcgacgatagatcggggattgagatcttgagatggcacggacactagacaacaagcaaagaaacaaatttcgcaattagggtttttaagagataattttcccgctaggcgccacgacggaacgggcgctacacttcacaattatctatactctttgagataaatctagagaatatccatacgaaaaaaatatcgagaagcaaacaaaaggtacaacatccagattctaaaggcttcctaaaatatcgttccccttttcaatctatctatgtatctcatgttggttggttttatgccagctaattggctgagcgacatgtggcgagatacaagcgacagaaaaagcaccgggtaagaaaccctctctataaaactggcgagcgtgcgagttacaatggtgaattgaaataaaagagaagaaaagccgctccatgtgcgtagttgggccacacaatgcgtgattgggccagtgcaaatacataaaataaggaggaaaagaaaaataaaaaagacaaaaaatatgaaaaattaaaaagacaaaaaaatattttttataaaattctttgcaaattataaaacccgcgaatttccgaacatcggatgaaaaattccttgtctcttatctcatctaccttatttcatgtaattctatgcaatttacattcatagagacatacttaagccctatcaccctaggattgcaaaagttaatctagttgcttagttagtcttatccttcacaaagcctagtcacttaagttagttttgattaggtgtaatttatttttaatattgcttattcacccctttagtgattgattcttatagaaagggaacatgtataatattatttcataaaagaagaaagaatggaacacctagagagtgcagtaaggtgaaaaaacatctccactgtcggaaatttattgaaagtactaaatctggttagcttctcataaaagttgataaattgatgagctacatttgccagagagcatattacgttatgaaatacttttctgaaaagcaaaggtaattgaagatcagcagacctagcatgacaactaagtattataccttgtagtatttgaggcgatacactgtgtggcgaatgtagaggtcatgtagttgttcaccttgtagtttagtcttggtgtcaggacgaggaggcccgtgaggcagatttccgagacaagcaaggtactcctcgtcagtgatactctcccccaaccccagctcgtccatctcttggatcattggctctgcttcttcttcttcttccacttttctatccatctatgtaactaattaaacctgtaaaatcttgcgatttgtgtgatgcttggctggagatatgattctctacatcaaccttgtgcacatccaaatccaaaagagaataaccttgtgcatatccaaatccaaaagagaatatattggtgtaatttcgattggcgacatcttagtgatgaactctcgtcgagatcgaccacaactctcgcgaatctcgccgtggaactcaataaagcatcgctaatgttagtggagacgatgcgatattgtggatgcaagacgagggtttccttgttggaataagttcatctaaggtcccttaacttgtcaataaatccaattttcgtccctcaaccagaaaaccagacacaacgggtccctcaactaccaaaaccagattaggtccctcggcggttttgagggcagttttggctgacgtggcacctacgtggctaatttaactcggtcttcatctgatgtgtcattgacatggcgcttacgtggcaattttgtcgcgaccgagaaaatttgcattttcccgaacgctagtgtattaatccccgtcccaggaaaagccggggtacaccacacaaacatgatataaaagacacatctttattatatcgataatatttacattattacaaaggcacttcaggcctgacaaacaaaaataaacagcagcggactagcgggcctatggctccatcttcacaggcgctcaactggggtataagctaggactccacctaagacttcttctccaaagcttctcttactgaaggggggaaagatagagcaagaatgagtacaaccacagtactcagcaagtcacaccgggagatgcatgattaatgcaagggggtacaaggggataataatatgggttaagttttgcagtaaacagcatttaaaagtcacttagttgcccaaagccattttaaaaagacgatcctagagctacacagtattattaatcaaggccgtgaacccgcacgaacctgccttaacccaaggcctatgatgattcagaccgaactggcaacctgaccctaggtcccagctcgtcccaagccaacccaggccaaccattccacattttagttgttaagcaggttttaagaattaaaacactaacttgggtacattgctaggcttgcccataaccgagggcgcggctattcgaatagattatactctgatcagaggtgtacatctttacccacaagacacgtcttcctcacgtgtaaccacgtgccacataccaccacggcatacggacggaagacgtgacatagtttccaacccatcctagccatagacaagagtgccgacccaaccccacctacggccggaacctccgggacaggtaggcaggactgagcccctagcagcaggacaccagccctgtgccatgacatctcgactaccgggccgcagctcgtgtagccttcatttgtcctagagatgtccatcgacccccgacttcatccatctccatccgtgtacttttgtttataaccagactgagccacaaactaagccttacccactagacatgtggaagtacggtagtgctttgcaacagaggcccgaagaccggtccttatgtggccgaggtgctactatcaaatccatgcaccccgagcctagcctaaaaccattttgagggttttgaatagagggggaggtgtgaatccaattccacaataatccaaccattccacaatgtccaagtgaaatggatattcccaaagtctagagttataaaaccacctaatgttgcctaattaaacagcgaagcatctacctaaattcatactagtggtactatgaatagagtacccactagttggggttttgtttattctagggtgaacaaggtaataataacaataacaataataataaggtcatagcaaaggtaaataggcatggctaaataaaacagtgataacgcgggaatttaaataaagctataatgcattaattcaaataaaaataattttataaactgggattcaatatattcaaggatgatgtgacttgccttgctcgctttcccaaacgtcggcttcaacctgcacgtagagcggatcttccgaagctgcagcgtctacacgaccaacggaaaggaaaaaggcttttactctaataaactccatataacaagtaggaacaaagcacaaaaatgggttcttgacttcttgaggaaaaattagagacttgaacggtccaattccgagttcaaatggccaagttatggccatttgaagtttatatgctctttaagtgaatatttgcgaatttctttatttaaattttaatttaaaaaggatttattgcgtcagccgaggagagggggcgcgcggaccgggtccacgggagtggggcccacgcggcagcctcatggtccacggtggaccgggcgcacccgggctcacaccagccggcgccgtgggccccacgcgtcagccgtacccgagggcgcgggcggctgacggctaggccccacgcggcggccacacagtgcgcccggaggcggccacgacggtgcagccggcgggaggcggcgcccgcgcccctatggtcaccggcggcggccataggcacggcggagcggcggccgagagaggggaagggaagggaagggggaaaagaggcggcggtccacggcttaccccgggtcgacggcgacgacaaaggaggcggccggagcggaggaaggcggcggcgcggctcgggtggactgggacgatggcgctccggcggtcggcgagctcggcgaggtggtggacggggtcagcggcgatgcgacgaagccggagaaggcgacgccgaggcgggagacggtcccggcgagcggagagggccggccggaggtcgtcggcgacagaggagagagaggacgacggcgcgagctcgattctggcggggagacggtgcggcaagtggcggaaacgggcgagagaggcgcggggagggtttaaatagggttgggagggagagagggcggccgacggggaaggaaaccggcgcgggaggtctggccgccatcaatggcgccggcgagatttgcgggagcaaatccggccgtttgaatgcgagagagagagagggagaaatggggggaaagggggaggggatcacggggaataattcccccccccccacttaattgcacgcgggggcggcgggatgcggcggattcggcggcggcggcggcggcgctcggcgcgggcggggcggcgagagcggcgggaggacggggatgacgggtgggccccacccgtaagcgagggtggcgggcaggcccgcccgtcagcggcacgcacgcggggagagaccgaatgggctgcgggggagaggagagagaggaagggagatgggtcggattcggcccatccgaggggagagagattttagggtttttctttttataaaaaccttttcaactttttttatttcttaataattattatttgtgctctgaaaatttaagtaaaatttgagggctctttttagaccaaggagaatttaacaaaaattctccgggtcacattcgaatttttcttgtacgcattttaatgtttgccaatttctttttgaattttaattaattttattattccttttagagaatgatttttatttcgggatgaatttattaggacgtgacaaatttgatcccaaaaataataaaaaccgtgggtcctacatgtcggtctcacatagaaaataataataaaaatagtgggacccacgtgggcctgagggcactcaaccgaggccgtagaaaccagaggagaactggagaaaaacaagatgccacgcctacgctcccggcacgggacgaacccgagaaacaaaggagagagagacctatccactcctccatgcggcatcgcacctcacttcccagccactacttaccagttgccaccaccactaccacccacaccgaactaacctcgccgtggaaaccaaacccccgcgcccgaccaccacctccctcctcccacctcttcttctggccccaccgcgcgccgcggcagacctcggcacggcgcgcgtggccgtaccatgccgtgacggccggaacccgccaccgccttgatcgccgcgcatatgcaccccatggccgtggcagtggccgccggaacagccgccgtctcatgcccgcgcctcgtccccgagcgtatccccctctccgcctccgtcgccgtcacatgtggccgtggctgcggggtggcggtgagggcgcatggccaaagcgcaacgcgtcgcggagagaagctatgcgacgaccacgacggccatggtggatgccagtgcggcggctggtcgcagcagcgccgaggagcggcaacacgggaaggggtcgtggagtggagtagccagaaggaggtggtgagggcgaggagctcgcccgccgccgctcctcctctgctccgccccgccggcccgcgcccgcccgctcgtccacgcctcgccgccgaggtgctgtcccgctcgtcggcctccccgcgcgctcgccggcctcccccgagggagcacccaagatagagaggagttagctcgagccgccgcagccagggccacctccccccgccgattcctcttccgccctcaaccgccggagccgtgcctctgccgctgcgcgccgctccctcctttggccgccggccgccgcgtgccgctgcctctccgtcgcctggagagagaggagaggagagagatgaagacaggggagatggggagagaggaagaagaagatgaagggtgaggatgacatgtggggcccacgtggggcccactattccggatcgaattgccacgtaagcgctacgtcaatgccacgccagatgaagacctgagtcaaattagccacataggcgccacgtcagccaaaaccacccttaaaaccacaaggacctaatctgcaccggttttaatagttgagggacccagtgtgtctggttttctggttgagggacgaaaatcggattcggattcgtcgacaagttaagagacctcatatgaacttatttcttccttgtttggttcgacctcgatcggggttgagtgggctgtggcggtgaaatcgagcccaaatcgacagttgcagcatggtccaaagcgagcccaaaatcaacaagaaggccggcccaaaggctgaggcccatggacagctgcagccatcaaagccgccccaccaacacaactccccacgaggccccgagcatatcatcgccttcgccgcaaagtcccaacactagcggcgaccggcgaggactccggcggcgacgtgggtgggactgagaagcgccgccgctgacaccagcgagacgaggcggcgacctccgttgacggtaacctacctaccaacctcgccattcctctccaaactgttgtgctgctgtctagatctcccacactacactagttactcctcgtagatctcggctacctggctcaagatccggggtcagatccgggtccggggattttctttgtgccctatggctgtattttggcgtctgtggctgatgacagcgtgtgttctcgagtgcggatgcaatctgagttatataggcaaatggccttgtcaactcgggcagcggcattgctttgctcagtgtgtttgaatgtgctgaaattcatgtagtaggctgtaggctgtgcatttcttgatttgcgtcttgcataattcactggtggattttctaaacctaacaagtttaaaattagaccattcaaccaaagacaggaggaataagtgaagctgttgtagtcacagcttatggccgatccaaaatttgttaggaatgtgaatatgtgatgctacaaacatatccttgtaagctaccatgctatttatcatgttccatcatggtgattggtgagcactcatgaaaaattcagatccaaacctagtgttacatgtggatttgtgctctgcaatctatcgccagtaataaaatggttgagtgatccagctactacaaaatcacattgcatactttttttttttgtagattatgcatcctggttttgggtggtgggttcctgatgtcaggaatataaatttagcctgctgatttaggtagcactgccggtgcacactttggtttttgaatacttgtagtcttccagcttcttgtagaactggtacaatgtgggccgtatataagaagggctgtcaactagcacatgctcactaattagtctaaacatttatgtttttattcattcaggtcaggtgcaatcatagaagtagttaatgacaatactttagttgttctaatattatttatgtatggactcaaattaacatgcaaaacatatgagattagtggcatgcattctttttcttaatagtggaaaatacgagataatgataactgtgaagctctgttagtactcttcattactctatttgagtggcagcatatctcatgctagccataaagcaagttctagacgtattctgttgttaattacttgtagctatataacccaacctagtcattccagcttatgtctcttagagatcatgtttattagcacctcaagatttcctctgcacagtatagtaactatcgaaaaagatattatttctttgtttttaattgacaaccttcacgtgctacttatttttgcagagtaaatctataggaaatggctgacggtgaggatatccagcctcttgtctgtgacaatggcactggaatggtcaaggtcaggaacttcatcttttaaaccatctatcatctccaagactccaactgcatttttaccaatttgaattccttaaaattttgcaggctgggtttgctggagatgatgcaccaagggctgtttttcctagcattgttggtcgtcctcgccacactggtgtcatggtagggatggggcagaaggatgcatatgttggtgacgaagcacagtccaagagaggtattctcacgttgaagtacccaattgagcatggtattgtaagcaactgggatgacatggagaagatctggcatcacactttctataatgagcttcgtgttgcacctgaggagcaccctgtgttgctcactgaagctcccttgaaccccaaagccaacagggagaaaatgacacagattatgtttgagacgttcaatgttcctgccatgtatgttgcaatccaagcagtgctttcactctatgctagtggccgaacaacaggtatgtgatgttttacttaacttctttctttccaatttcttggttcttttgcatctatagattcatttagatgagagctcggatgattaagaactattcttatacatttttaatgttggtcagtaggtgttagaattatattatctatgctcaataatagtcgtgcaattatttaatgttggtcagtgcatatggctaatgctgttttaatcaacaggtattgttctggactcgggtgatggtgtgagccatactgttcccatctatgaaggatatgcacttcctcatgcaatccttcgtctggatcttgctggccgtgacctcacggattctcttatgaagatcctcactgaaaggggttactcgttcacaacctctgccgagcgggaaattgtgagggacatcaaggaaaagcttgcatatgttgcacttgattatgagcaagagctggaaactgccaagaacagctcttcaattgagaagagctatgagctgcctgatggccaggtgattaccattggctcagagaggtttaggtgccctgaggtcctcttccaaccatccatgattggtatggagtccgctggaatccatgaaacaacctacaattccatcatgaagtgcgacgtagatatcaggaaggacctgtatggcaacgtagtgctgagtggaggcacaacaatgttccctggcatcgccgaccgtatgagcaaggagatcactgcccttgctccaagcagcatgaagatcaaggttgtcgctccacctgaacgcaagtacagtgtctggataggagggtctatcctggcttctctcagcaccttccagcaggtaagtccttatcattacagcttcttagatgctcaccagaattagttcataactacttcataaccaatccattttgtttatttgtccacaccaagttgtattttaatggttttgctaatgcacatgtgatttgtttgcttggcattgataaaaacagatgtggatatcgaaggatgagtatgatgaatctggcccagcaattgttcacaggaagtgcttctgagtttctcatgctgccctgtgcgtcggtttgtactagaggagaaatagttgcctttatgcagccataaactgcctgtgaattgtacgtcactctcttatgtggttggttgctccagatatcgttgtactatgttcttagctctgtgactgtgaggtcacctctggaacttctctggcttggttggttggatggagttgtgatagctgatagccctggtgttgtttggggtacaaactcatgtggaattttgaactatatatatccgtgtctggtcatctggtgacatgtttgatgcgtttctagtatacctaccaaagtgacaaggcattttgtcccggatggttttcgcattcttattctaagggccgtatagattacctttctttaccagacttctagttttttttttttgaaaaaagaacttttttatctgtatttcgtaaactctaaaactttttaatgttccctccatttgataaatcattttgatttatttttatagtcaaatttctttaggtttgatcaaatttatagaaaaatagcaacatctatagtaccaaattagtttcattaaatataacattataatatattttgataatatgttcattttgagttgaaaatattgctatatttttctatatatttgactaaactttgaaatgtttgaataagaaaaaaattaaaacgacttataatataaaacaatatatagtaattcattggttcgtgtcctcgagtaattatcataaattcaatttcatccattatcctattttagactactctaagcatcctttggaacgaaggaaggaatttgaagaaaaaatatgggaaataaaccgatatacccatgaaatcgtatgggcccttagcaatttggtggacgaataccgccctgttaagtataagaggattaacacttaaagaggcaacgtgattagagcgttggctgcgtgattagctggtgttggttctagaagcagggcagcttaagaaggttgtacacgtgggcaaccgcccatctccttctcccttgtaatccgttggtttgattcgattcgctttcccactagccgagccccatcgatcgtattcgcgtcaagcttcttctcttcctctccaaatttccaacctctccatccatccatcccgcatccgattcttccaaccaatctcatcttcttcctcctcctcggcggctcgccgattccccgacggcgatgaagatcacggcgctgctggtgctcaaatcccccggcgacggcgactcgtcgtcgggtggcggtggcggcgagcaggagcaggagcagcaggcggcggtggtggtggcgaacgcgaccgacgtgagccacttcggctacttccagcgcaaccccgcccgcgagttcatcctcttcgtcgcccgcaccgtcgccgcccgcacccccgccggccgccgccagtctgtccagcacgaaggcaaacctcctccccttctctccttcgctcgctctaaactctaaaccctactaacaacgaacgattttacgatttgcagagtacaaggtgcattgctacaaccagaatggcctctgcgccatcgccttcaccgacgaccactaccccgtcaggagcgccttctccctcctcaacacggtaactaacccctatatggcttcatccaattcaattcaacctagttattatgcttacgattctccttgcatagtcattctgattgacccactcaattcaacctagactgctccaagtttgacccaaacttagtccttccttctctagtactaggagattggatcgagtaggtgcaatgctttcctgtgtgttctcaccttcttctgttgttgggatggatttgtagcctgtttgtaataatttcttcgctagctgttgtgaggttctgtagtaatttcaggcagccttcacatagggatttttctggcgagttgatactttcaaagttattgcttctatttttcagaaggaaacaatgtgattgttcacttattttttttgtctgaaaggttatgtgttccttttgatttttgcaggtgctggaagagtaccacaagacttttggggagagatggaggacagcaaaaactgataacacccagccttggcaatacctggatgatgccttgacaaaataccaggtttgtccgtttcatattataagtcgatttgactttttccctaatcaaatttcgttaggtttgactaagtttatagaaaaaaataacatctacaataagaattagtttcattaaatgtaagattgaatatattttgataatatgtttgaatatattttgataatatgtttgttgtcttagaaatgttactatatttttctataagcgtgatcaaactttttttaaaaaattaactaagaaaaaaagtcaaagcgatttataatatgaaacgaagggtttactaatgttgtcactgcttgagtaagcggttctctggggattgtagatttggaagaagcaaattcaaacctatgcaggttgagtgcatgtcttggaattcttcgatcatgaccatttttattcggcttgaatagtacagcagtaataggatgtgtctacactaaatattacaaccaaccaacagaagaagcaatggcttgccatgctcatgcctatgaatcacactgcatcctgttatgtgaatgaactgcttattaatgtagcacctttattctagtttacatatattcttgtattattagagattaggacactgaaataatcaatctcttcatatacatgagatgtccctgtatcattattaaccaagggacaagtaatcttttgccatccatcctacggtccaatatcctttttccactgtccttatacccttgaagccatgctttgacttctttcaatgggaattgtaaaattgtgtaatgttctca

SEQ ID NO: 26969 - DNA, 2087 bp, Oryza sativa
cagataaaatcattattgtacgtttagtttttcagttgtatttttctaaactagagcatgtacataaagttgtggccatattattttcttgttaattgtcaacggtgcaccgcttaactgatgcttgtattgttaaacatctaatttcttgcttcccaattattattctgcaggatcctgcagaggctgacaagttgctgaaaattcagagggatttggatgaaactaagattattcttgtaagtaactctatcgctcatgaattaatatatcctgattgcaatttataccctatgctggcaatggcatattccttatttcagtgtgcatggattcatgtttctgttttcagatattagtattcagcaaagaacactattggtatcttattttaattttgcttaagctacaagtttgaagtatacaatgagaaattttgatatgcttttcctgttggctgttagaaattagctcgagcaataaaatgtgtggttggtgttttatattattgtgtgcccggtagttatactgcaaattcttgcacgccattcaatttaaataaacagagggaaatcgaaccgtagtaagttctttttgtcctgtggaactgtgtatagttgaatgcgctggaccaggtgttctctatttttctggaagtgtctttttccccacccacgaataactttttaggcttgttttggttttgctctgtttgtggcaaattattcatttgttatctttaatttggataattgcagcacaagaccatcgatagtgtactttctagaggtgaaagattggatagcctagtggagaagagttcagatctaagtgctgcttcacaggtaggtattatgatatggcaagtgacagatcatgggatacagatccactctatgtttctgcttcagtgatttcttttttcagcgaaatgaaacctgtttagttaactctgcacgtaacaattgaactgtaaatcgttggatccctgaagctttatgtcccttctaattgggaaatttgctcctttgccacaaagttgttaggccttctcacttttgccttggaactagtacccagtatccaccaccagctgctggttgtagacaacatctaagaaaatctttcctagatcatgctaaattaacatatataaggaatgaatgaccctttcattcagtgctatctgataatattttctgttgttaatcaatcggttcagttatgatcttttgtgctgatttgtccctccttgttatgcagatgttctacaagcaggccaagaaaaccaactcttgttgtacaatcctgtaatagaaactctggtatagagttctgcagtagcacactatgttggcattttctttgctgcaagtctgcgattaatgtcatagcatcctggtgtccgaggtgttaaacaaagttagcggttaacatatgccacagggctaccctacgtaatttttgtaagtaacacaagtgtggttgccattgagatgatctgtgcctggtactgtgtcaaagctataattagtgatgaaattgtgtactgtcatcttgacccccaacttcattaacgatgcaagaaaattgtataaagacccgaacatgaggatcatcatgcacataaaaaataaatggaacagactaacaaaaatataatagtaaattttataaaacccaaattgggacggatgtaacacaaaaccaacatttacagtcaagtgacaaaaacagaggaaatatttataggtaatgacaggttaaatctccttcctggttcatgtcaacaatcccagagtacagcacatgtcaacaatgctagagtacagcaaagcgagcgcacctagctaggagtactcgacaagaacatggagtactcgacaagaacatggaacacgaagacaatagctaggagtccatggagtactcgacaatagctaggagtactcgaacagagacatggagtactcgacaagaacatggaacatgaacagagaccgtaagactgggtaggagtactcgacaagaaacatggagtactcaacaatagctaggagtactcgacaagaacatggaacacgaca

SEQ ID NO: 26970 - DNA, 2546 bp, Oryza sativa
cagttttgtcacattctttttcagcacaaaaaagtaaccttgcacctaccaaagaacacaattatgttattttatattaattagttctataaaataacataaacatgtataaaattgtttacaattctctgtcaaatttgtttagtaactatatgcaatactactcatctgcagataacatggcacctgataatttgattattgcattaacaccaaagaacgataggtggaaaatcaaagtaaaagttactaggctatgggatgcggttaatcctacaatggctgatgatttctatggtatacagatgattgtactagatgcagaggtatgattgttgtaaacatgtgatttaatatattgttctattgtgtaaatacaatctttttggtgcagggcaactcaattagagtaaaagtaaaataataaaatactcagaccatgtgacaagttataatgcacgcataatgttatgatgccggactaggtcatcgcatagaatataattatgattttaatgtttcactgcttaaatatgttaatgatttttaagataactaacgctcaacatttagttttgaaaatatcaaacactcatattcaaaacaaaaggatatggttgtataattttatatgatattatcataagtactaaatattttatggacaaacatcgtatattgaaactattattaattaacatcttaagtaaaagtcgtcgcatatctatacggcaataaaatcaataaaataaaaataagatgtccgtgcatcttttttttccttcacatagcatcgaggcaatcaagccactaatgcaaaggttggttattatttgtgcactgatggatgataattttatcttggtgggttaataaattttaaattcccgtgtttatgtacacttcttttccatactatattttgcacatacatttcaatcatatttatgtaccttttctattttcttttcaaaatcctatgttacaaaggagtccctaaattctttcacggatagacaaagtcataatatttcacaatcctaataacaacaaaaattatgatattttaaataagatgcccgtgcaattgcgtgggctaccttcctagttaggcttaaaagattcgtctcgcaaattagtctcaatctgtgcaattagttatttttaagcctatatttaataatttgtgtaagtgttcaaacgttcgatgtgacagtgtgtaaaatttttatgtgggaactaaacagggccttacaataaaattggttatggggtagaattctagaatcttgaagcaagactgacagttagaatgttttatgtaacttataactttttaagtttgtttggcattaaccattaactgtcttgttttaatcttagttattggttacaactaggtgattccccgcgctttactgcgggaattactaagtaattattaatttttttgacagcaagttaggagtaaaaagaaaaaaataataatgaaacatcagggtttatcaatcaaataataccatgcttcaatgtgaaacatattgataagtatatgttaaatattataaaagtgatagatagatttgttaaaatatcgtgcaaatgatatgaggggtgatgattcaaggtttcaaacatgctgaacatgctgctacccagtcaagtgaaatgtccatgcatgtttggttttcaccttaatattgctatgttgtaggaagcaaacttatttagcaaactgtaagtttttattatactatgcaacaggtaggaaataataagaatacctggtgatcagagatcttgacaggcaccaggaagaagtcattgtccacctccatagtatcctttcccccagccaccacctctttccgcatcttggacaggcggggatcgtctttgtccctaatcttcgtctgcagcacaccatccttgaatagcttcacacaaagtagcgaaagagagataatgccagaatagattgctagtgttgcccagcagaaaaaggaaagtctgtaaattcattctcacctaagatgaacaacagaggtctgcccccaattctgtgtgtctgcaaaaatcaccaagaaacaatgaggataatgagcagcacaaccgaattagccaaggaggaagatttcctcttgttggccaaacgaaagaaaaaaaagggcaccaattaacctgcagcagtagagtgggcgagcttccaagagagaggaaccgatgatagcagcacgagcaacagaagcaaaggcgctgctgcccttgtccgtgtccgccgtcgtcgtcactaccgccgccctcgaccgctgccaccgccctcatccgtgtccgccgccgccaccgtcgactacagccgcctcgtcctcgtccaccgccgccctcgaccgctgccgcctccctctcccgcgtccgccgccgccgccctcgtccgcgtccaattccgccgcagtcgccgcgctcgtccgcgaccgccgccaccatcgacagagtccgtcgccgccgtagtcgctgttgctgtcgcgcgggggggggggggggggggg

SEQ ID NO: 26971 - DNA, 26024 bp, Oryza sativa
gggcgatacggtgcgggaggcgatgcggtggggagcgaagggaccgagggcatgctccaaaacgcaatgaggaccactgagatgtaatccaacagccgataattaaatgatgacgtggcttcaccaaatctcagctttgggtcttaattttatagaaagaagggattaggacaatcgatcgaatcattagatccagagaggtgtttttaccattcaactgcaataccaagtttactgaacctacaggtattctttttttttccttttctgttttttcgcctgcgtaatttgggatcattggatgctttgttctaggtgtttgttagttctcgaaggcctgcgtttgtatttgtttgttgttcatatagctcgaatactatatgctaaacccaagaattatttggaagccggcaatagagaacagttcagatctaagcgctgttcctcgtggggctccatctcggtcggtgtctcctcagacataccactgtcaaagaaaggtaaaattcgttgccgctttgaacaaaagctgggagctgagtacgaatcacagcgacagaaaccatatttacagacaatgcaattgcaagcaagcagtgacaggtttatatctaatctccttcttggttcatgcaaattaacaaattctactacagagtgcatcaatcgaggagaggctaggatggtcagctcctccccgacaagaacaagatggagatggtagccacaagcccaatcatggcgatctgagcacgaaccggagcagcagcagcacgccccaccacctgcagcaaggcaaagcaatgcaaaagcaagcatgagctccaaagatcgccggtgaccggtgccagtatggaatggaattcacagtgattggttagctggaactggatttttgtctccggagggaacatcctctcgctctttacgtgtagttcaaaaaaagttattaaaaaattatcaagatagattaatatatgatatattttttcacaaacatacaagttaaaattcgacctatacaattcaaaacaaaaataataaatttgactgtgaattacacgttcacttcacagacaaaattattatttttgtttctacttgtataatttgaatttgagattgcatgttcgtgaagtgacataccacatattaatctatcatactaattttttttaatttttttatgactttgtaagtgacataaaaaaacgagggatattctcttgagggatgatttgagttttctttgttagcttaatttagaggttaattaccttgtcgttgccgtcgcctcggtccgggagcgggagcacggtggaggtgtcggtcatgccggtgggcagcggcaccgtcgggttgctgccgatgaacgggtagccctcgccggcggcggtcggggcgacaggtggcgccgcgacgccgaaggtcggctggagcgggaagccgaagtgcgggggtgcctgcttgggagcgcggccaaaggccggcaggtcgtcggcgccggcgatgggcgccggagcgggagcggagagtggcgggaggccgtggccggcggcggcgctaggcgaggcattgccgccgccgacgtggtggcctcgtcgtgtaggaggatgattcgggtgccactgcgagggaacgtcatattaaaaatgttactactagtactacttttctttcaaatgaaatttggcaagtgtagcatggatttgactgaaaaagaaatgcagttattcaatcttgaatggaatttggcaagtgtagcatgcatccttgctgcaatgtttggtactcctaatttaaactcctggagtatagtaaagcatgcatgcgatttttagggaatgcagctcagctagcagctatagcatgtgagcttcagcagagcgcatgaaagaaagcaagaacttaagaacagaaaagtttcagtttggtctcaagtttcgcgaggtgcaaagcggttgacgcaagtgagtagtgacgctaaaaattgtgaaatgcagaagcaaatggtaccccatttcttgtagctaattaattaagaaacgatgagaaagaatgtgaaaggaagaagatgagcgggttaccgaggaatcagccgcggcggcagctcgagctcggggcagcaaagacggcaagacaaccaagacggcgaggtgaaagtgaaacagcagggtgaggccaccgccatgattcctcctcttctccatctctggctcttgctcctgtgactgtgaccgtgagtctgagtaaataattaaacagctctgtctcttggaggagacgagggtagctgctgatctttaattcttggtcagttgcacttaactagtgagtgatgagtgattcagagtgttgtgcagaatagagagctttgtagccacaggaggccaaggagaggagagggaatggtgatgataatgacgctacagtggctacggacgcagctaccatgcaatctacacactacagtgactctactatcgtgcaaatgtacaaattgcacagtacacaatacagtgagccccaataccaaaagctataccaatagtatagtaaagcaaagctttctctcttcatctctctctctccctctctatgggctgcagcaacgaggccttggaatctctgtgcaagtttctgcttgctttgtttgctttgcttttggagcagggatgagtttacaatctttttttttcagcaatctttttttctggcatctttgccttcgtaggagtatatcattcaggtttgaactcatccggaaggaaatgactggagcactgcactgccaccactcactgcactttcatccagtcatagtgccagactaccagtacatgacatcaattgactgaggatttttacatcaatgcagttttgtgcagtttcaggcaggcagcaaatgcatcttttcttcagttaattaagctcatccatgtctctcctccaacagtctgcatctcgacaagtagaagaaacaaacagttagtaacagcaagagtgctgttttggaagatgagttttgactagttaaagcaccggctcttgttaaattactcataaaggtgtgctaaaggtaagtaatgagatgctaattacggcgggaggttcttttagttttaccggactgcgtgcctgtcctgaactgtctcaacaccgtcaaaccgaatggggagtaacaggcacgtagcactcgcctagttttgtcttccagagaaatggctccacattgcttaggattcgaagtagtcttcttgtttttaatcaaagccgtgatctgcaactttgtaataattgattatatttttttaaaaaaggcagaataaattgtactattatctaaaaatttgagttgccttgcttggatagacattactatttggtgatgtctggattggaatttggaagtggctgtagagcaggtacaatagcaggctataagccagctataaatatattttaaacagataaaggaaaaaagagaaaagcaacaggctacatatctgtaattagctgcagcacggactccaagacgtaatatgtgtataataggtgggaccagatattatattggctatggatgatttggagccagtaattagctatactattaaacttgctcgtataaagaccatcctctgtaagggcccctttgaatcgtaagaataaaaaaacagaggaataggaaaaatataggattctaacaggaatgtaagtgtaaaacaaaggattgcaaaatacaagaaaaacatatgaatgatcgtttgattggatcataagaaaaacacaggaatcggatgagagagatagactcaaaagatttttaccaagaggttggacctcttgctaagttttctccaaaacttacatgcaataaaccattccataggaattttgtaggatttgaaaaacttcaatcctttgaatcaaagggctacatagaaaaatttcctataggatttctatcctatgaaattccttcataatttctttaattcaaaggggccctaattttttttcttcgaaaacagagtcctctataagttagagtagtacaccgttctttatttcagtacattcatttttgaacggaatttcagtacattcatcgatccgatgatacaggatttcatgtacgtacaaacatacatatgcttgatatgcagcacatcttattgaacggagcatacagttactgtataaatatttattcagtagcggcgtacatacatgatatacggggtgtgttgattaatcaaataagttgccgtagtagtagtagctagccgtgctgcggctgcggcatcctggcgcaggggcgtactgctccttcgctttgtgcccctcgtactgatctaacatacatggagtatacatgaacagattcagttaatgtacgtatacacgcacgatccaatcaagatgagacgacataggtcacgttagctcgaatgggatatataatagggtttgttggaaccatgccaccctaattttataaaatttaagatatgtcactcgtatcttaatgacatgtaggacccacatgagtcaatgacatgtgggtcaaggttgcatatcacaaattttgtaaaatttgtgtggcatggttcaaattttccctatataataatgcatggtgtccatagcttagagatgatgaatcagtattgtagacattacctgagctaaattaaggtgttagtacttaaaaaagaactgttcgatattaaataacaggaaaaaaatattttaatagcatcgaaagttcacgattttaaaaatatagcactcaaaggttccgattcattttaataacatcgatagttactctctccgacactttatttaccatatcggtaacatttacttttttgtcgtatctcaatttatgtcatcaagtttcataaaactacactattaattattttaattttgatctatcacacttttaagttctacaaatcttttgagtcgttttatctatcgtatttaaatgttatgtccatgtaactatagtttttaaaattttgatatatacaagtatgtcaaattagtttacggtgtggttttatgaaatattaagagtataatacatgggttatacgtacttatgatcttgtataacttggaacatagtaaataaagttttatgaaatttaatcctaatactgatatccagaagtctatcttcttttttactggaaatcattgaccagaagtcaataacggttgagaaataaccactgtattaatgtattaatggtgggtcaagtataggttactggctaccaaccactagggagagccctttctgaataattgcggccatgcgctcctgctgcttgtgggagtactcctgatcgccggcgccgccctgctgcgaggtcttcttgctgctgctgccatggtcctcgccgtcgttgccgccgtggccgtgcctgccagtttcgtagtactccgccattctctcgtacgtgcagctaattaactctcaggtggtggtggcgaaagtattaatggatatgacgtttggatgatctcgcctttgttaatacagaggaactattaatcctgtaacttttggatggttaattattattatgagctagcttataatttggatttgtatatatatgtacaaagtacaacccagctgcatctaagaaaacagcaatcttaaggaaaagatgcatgacaaaaggttatcatgcagccatcagaatttctggtactaacattttacctcctactatggcagattcttactatccttcaccttagctaacatcgcaagagtcatctatatatgctgacatactgatgtgcagtgcatttatgcatgcatagttcttaagattcttgtgctcgttgttttctcgatctcttttcgtaaaagggtagtatgcgctcggtaataattcaccaattggggcatatcagcacttatttctttttctatgctccactcggtaaaagttattctcaagtcattaatgacagcacaattttcatttcaccttttcttcttttagcagcagaattttacgtcttcagtgttaaagaaaacatccacgtcgtctctaccacacgtccttattatgacacaaattcttcatgctgggtcatatatagtccacacatgtcaacaattttccgtaggtttagaggagttgaacaaaatgaaaaacttggcttaaacaaagtaaatgcataatactactgtttttttaattattaatgatgtagtcataggtgaacctagaaaaaaaatcctagccctacatatgtgaaaagaaacttttgaaagaaaaataactccttattagtatattatgatagacatttgatcaatttatacttctatatcatgatgtgcatttgattaatttatacttctaatcttattatatttacgatatttaagatatagaaattggatcacccatataaaaattctgatacactactggacgtagttgattttttccctaactttgactaacagtatttattcaattacctttttataagtaagttaaaagaagtaccattagatataccatcaaattaaaattgagtatcttaaacatcccaaaatacaaacatttattactataaatctggataatcgtgcatttagattcatattaaaagtcgctatatttatttttttggataaccgtccaaaaaggaaatgatggtgactgtacgaactcatctatttacatttttttttctagctactgctccataggatagtcgtacatattggtttatcattaggaaaacactggtatacgttataaaaagaatcacaattaatttggcgcgaacaattaaaagcacgcgtataattcatcacggcgcggcccagcaaggtcagccagtgtttgtccgtcccaatttctcatattgggccatttccggcgtgcggcgattaggcccgtgagaaccaagactgttggatccgctgttctccatgcggcacaataaaagttcgcctgttacgtacggcccatcgctagatgacggaggcgccgccggcgatggagacgacgaaccatgtataaaaacctttgacttttcgaacaatatttttaaatataattatatgttaagactattctttcataaaataagtcattacaaaatgaataatatttatatactttttaaaaagatgaatggtcaaattatcacgttattaaaggttaatgcgcgtcaaacattgaaaattgttgggagtactatttccgtcttaaaatttaagaatttaggatcagatgagatgtttgaaacgttgatatcttataaaccgatttaagggtctgaccccagacctctcattgggccacgtggcatcgcgtgttgccctctgtcgtgattctcggctggagaaggtgccacgcattcgcacccctccacagccgttagatgagatatcaacggtgaaaaaccatctggcggaccttgatgtaaattgtaagttttgacaggggtttttttcaaaacgtgtgatcttaaccggaagagtctgggttattagagaaaaatccaagggaaaaaaacgcaagaaaaatctccaactcattgtgccgccgccttgcgtcgaaccctcgatccacatcgttggcgcctgcttcgggcgacgaggaggggtggcagcggcttgatctacacggactgctccacctacgggggatggtgaggcaacaccggcggagggagatggaagcccccttgcgcctcctcgatgtgctcgagccggccgcctctccgcttcaggagttcagaggatgcggagggcgagagagtggggcgggggagagaggaagctgagctcgacgatgaggctgatggccagcgacggatggagcagttgagccgcggatttgcccatcatcgccgccatcctgcgccgccagtggtcgttcccactgggccatgtacctgctgctcatgtgctcctgaaggtcgccgtctctgcagccatcctcgcgtactcgcgtggttgtgggattgggaaacgagtggttgtggcttcatgggaaacgctgctctttcctacatgcacagtagtagtaccctggtctgcgtttctcttttttttctttttatttacaactattcacttcaaggctgcattaaaacatacccctataaaaaaatacagtactaccaataaaaaaagacaaatattatatgcccctatattacttaggtagttaggggttgtttagatcaaagagttttgatgcgtcacatcgggtattatatagggtgtcacatggggtgttcggacactaataaaaaaataattattgaatccgtcagtaaaccgcgagacgaatttattaagcctaattaatccgccattagcgaatgtttactgtaacaccacactgttaaatcatggagcaattaggcttaaaatattcatctcgcaagtgtgcatttagttaattttttagcctatatttaatacttcatacaagtgttcaaacgttcgatataacagggtaaaaaattttgggatgggatccaaataaggccttagaactcaaaattaaagctaaaattaaacttacttctaaagttgatttaaaggtatttttaatgtagtttctacttatttgtttttaagtcactaacaatacatatttttattttaaataagccgttttggtttattagaaaatatggacaatcgatgagaacattaatctatgtttgacagtgtgagaaggtgaaaagaaaatctcattttccgcatgtataccacccgaactgataaatgatatttttttcaaaagaaaaatctataggaaatttatttaaaaaccatattaatccattttcaatgtttaaaataattaatcatcattaattatatgctaataacttaattttgtgtatcatatcatcgttcttttttctcatttactcaaacacactttgagtgttaattattttgggataaattttaaacccaaaagagcatttttttttaatggatggagtggattagaatgcaaagtgggctaatagggtatttgtgaaattaattttctcatctatgggttctacagtaaaataaaatggtaaaccgggtgtcacccttcgtccaactttttcacttttgaccgggatacttttacctttgtggcattttataccgtccttagctattttatcgtatacaactatattgtcgtatgtcaaagaaacggtgtatatatagctgagggagtttattgaccaataagaccagaagtattgagatcattcatatgcatgagaagagagtatcaaaggcaacatcatccgatccaaagtgaaaacattgattaaagggtgatcaaaagcgaaacatcggtaataaaagatgacccaagtaaaaaattactccaaaaagaattttctagaaaagttatcttaaaacatattaatccattttttaggtttgaaataattaatatccattaatcatacgctaatggcgtatctcatttagcgtatcttatcattcttctcttttcttcttcacttaaacacatccaaatgagtagttatttggggatggagacagtaaattagaatgtgaagtggcccatatggtatctatgtaattaattttctaatctatggtccccaagggtaaaaagaaatcaagagaaatattaattaataaaataagaggataaggctacgataaggctattgtgcatcgtgaaacactttcattgtgaataactcgaagtgcatgatcttcacaagaatttgatgaaaatttgagctaattaatataaagtctagcaaaatattagcattaattaccctcagcaattatacaaggcatagagagcagcatgtcaaccagcacctttattttcccaaagagctggctcttgtcttattcaagaattgttaattatatcgaagatttggtaaatagtattcacgtgaagagtttacatgattggccaaataaaatattctgcatgctagcacattaatatattctacttattggcccgttatgcggcaaagctgtgtttgttttgagatgttattttgagcttagatttttctttttaccagttttcatttatccaagtgtaatatgtttgttgagaaataaacatttctagaatttttttcccaaatagaaatattccaaaaagaaatatcaccaattattgttgcttggttcattcttattccatctcatatatatatctaagaaatcaaactaattctaaataactatacaacatttatatatcctagaaaaagtacaagtattcatgggatatttttttagtttgtgcgccaaaggcgcaccgattttctagtattgtactagagaaacatcatatctaatactccctccatcccaaaatgtttgacgccgttgactttttttaaaaaaatttgaccgtttgttttattcaaaaaatttaagtaattattaattcttttcctatcatttgatttactgttaactatacttttatgtctatatagttttacacatttcataaaagtttttgaacaagacgaacgctcaaacatatttaaaaaagtcaacggcgtcaaatatttagggatggagggagtacgaggaagcagtttctatcatcacggtagaattcatcgatccgatggccacacgtttacagaaatcacagtacatatatagatgtacgtacacacatacactggtttggaataaggcgcgcggccgcggcggcgaaattgtgggtgagcaacgtatatacgtgtacgtacgtacatccttgctcatcttattgtaccgtatatatacgtacgtagtagccagtatttatttagtggtacgtacgtacgcatggattattaataatttgggggtgattaataattaatcagttgcagtagtagccctgctgctgcggcatcctggcgtagccgtactgctgctccttggcgccgtagctggcctgcttctgctcgcggtgctcgtggtaggcgtagccgccggcgcccaccgccgccaccgccgccacgccctgctcgatcctgtgcctctgcgcgttcgccgggtccttcttcgcctggtgcccctcatactgatcatccaacacatcgtatatattaccgatcgatatatatatattcagctaatttaataagcagttttacaatccttgagaatgtattatgatgtacgtaccaaaagttttaatgtaaacgtgtggtatacatcttaaaaaccataaaattgctctaatttaatataatgctatctctgtttttcaatagatgatgtcgttggttttcatcacaaatttaaccattcattttatttaaaaaattgtgtatttatatttttatttatttattttatcacttaacgtactttaagcatgatttacatcttatatagttatataaaatttttgaataaatgaattgttaaatatgtgtttaaaatttgacggtatcatctataaaaaaaaggagggaatacatcaagaattattcgaagatgagaagatctaagacatacgagagcgaaggcgccgctggcgagggcgccgatctcgccgacgcgctcgcgctgcttgtgctcgcgctcctcccgcttgtagtactcctgctgctggccgccgccgtagccgtagccgccatggccgctctgctgcctcatcaggtactcctgcgagtgcatggagttgttcctcctcccacggtcgatctcgccgccctcgctgtagtagtcgtcggtgtgggactccaccctcatgccaccatgcccgtgcccgtgcccgtgaccgtggccgtgcccgtggccgtgctgcctgccggtggtctcgtagcactcgtccacggtgctggagtagtactccgtcattgttggtcggtttctctcctgcagctagctacttctccgatcaggtggtggtgcaagggaagttctttgctttgcttgctgaatatgtgggggtggatttgggtgctatttatagtgtggcgagtgacagtgacgggtgaagatggacggcttggattaattcacaacgatttgttgatgatcgccgctctgttaataattggcagttacttattttggtactatctccatattttaatgtacgacgccgttaactttttatccaacgtttgaccattcgtcttattcaaaaaatgtatgtaattgtcttttttttattgtgactagattcatcatcaaatgttctttaagcatgatattaatattttcatatttgcacaaaaattttgaataaaacaaatagtcaaacgttgatcgaaaagtcaacggcgtcatacattaaaatacggagggagtatttgttagctagctagctaagccttgcctgcctaattgacaccggcctgatgtaacttaagagcaggtacaatagtaggctataaaccagctgcaaacatattttaagaagacaaataaggagagagaagagcagcgggctacagatttatagccagctgtagcacaaactttaagatacagtgtgtgtatgacaggtgggaccagatattaatagtgtagtatgtaattattgtataaatgagctattagattagttatagatgaattgaagttagtagttggctataaacttgctctaaaggcgccaccacggcaggaatcgctaccaccccttggatgacacgattggatcagtagatgtagaacccagctacgtactctccacttttttttagtaacgtcattgattatataaatgatgtttgatcatttatcttatccaaaatatttatataaatgttatttactgtgaattattttatcatcaaaaagtacatatgttacttttgaaagttttttaagttataactttcaaataaaatataattatactgtaattatattgtaactagaatattaacattataagtcttatataactagtatgcaattgttgcaaaaccatcctggcgcaagtagcattcggatcgcgagtcacgagttcgatatttgccgcacacacagatgaaagcacatgtctttttttttcctactctcctgcaacatgaattttgattcatattcggtggtctaaattttgaaagtttctagtaatacttctaaaattcatggcttgtactttacatatttacactaataataagatagattgttaaacattatgtcaaaattcaacaacatcatctattaaagaacggaaatagtacaaaacaacatttgaaggaaaagatgttcacacaaaggtttcctactactagtactaacattttataccaccttcattggccaatcaatgaagaatccttcacctacattgtaagagtcatacgttgatgatatacatatatagtagtttcttaagattcttgtgcgcgttgttttctctctttttaaaaaagggtatgcgattattcaccagttgggagcatatcagcatttttatcttctttcctcgccgcactcggtaaagttattctctatcgagaaatggcaacaccatttgcatttcatcttgttcttcctctgacaagagaatttcacatcttcagtgttaaaaggaaagcatccacacacgcgtcctgacgacagattcttcatccatgtcctggatgataataatgcacgcatgccgacaattttcagaatgtttaatgaattgaacatatatatgaagaccccggcttaaacaaagtaaacgcacagcatagcaaacagtaatacagtatgatgcctttaattaaggcacggatcaaattaatatgttccaacagagactaaataaacaggaaccgaggctatatgtccaaattaattatatagtgggagcaaataattagataaatggagataattaaaacaagtctttggacaactataatgtttctagctagatacgcatttcattatttttcaactcatcaataaacactttgataagtaagcttaataatcccaattcccaatccctaagtcaattatagacggacaaaacatcgtcctcctaggtcgagcactgtatgaatatttatggcacactacttattctatactcaaccagatagatattcttgtacagatgctggaatccacaatcactcaccacatgacatcgcacaataataatggagcaatataatataatgcagcaggcaaatcacacctttagctatcggaaacgcggcccagtatcacggcccacccaataggcaacagccgaccactacgcggggcccgcgaaggtcgattgtaatgggccatctattcttcgccctgtggggattagtttgggccaatagaccaccacgcggcccgtcatcgggagtgggcccgaagacactcagtccgcgtcgcctcgcatctcccctgcagctagtagctctcagtccttgccgcctgctcgacgaaatgcctcgccgccggcacaccgtctctccttcagcttcctcgtcgacgacgaggaggatgcacatgccactgaagcgcccgtgaaacagccagacgtacgtgaagaaataaactagctggccatatagccttagtcggattgaacactcaaaggttgagttgagcgcaggtatagatcgatcgactaactgatcgacagcgaatgaaaccaaatcttattcttcttcttctggaggaactcaggcaattcagcgattgaattatcctggctttgtgaagaaagccaaagaaattaacagtcttaatccgaaccaaaccatatatacagtatagtataacattcatagtctatattacaataggagaatactccatataaccatcgatcgggtggtacacactgaacacacagtagcatacatacatacactagctaagctagctatctgcctagatgcgtctatgcatccattaacttcttattatatactcactccattctaaaatatacgaatctaaaaaacatcaattcagattcatagtattagattgcgtatgattcaacgttaagttgctatattttaagatggatgatcgaacgaactatcttgtactagtagtggtagtatatgggccgtaggtagctactggtagctggctggtggcctcctcctgctgttggtggtggtgcactgccggcggcgccatactggttcggcggccggatcatcctgtggacgatcttcacctttctggtggtggtcggtttggacataatgccatactttagcatctccttctccctctcgagcttctccacttcgggctcgcgcggccacctgcccttgctgccgtggtacccgccgatgtcgccgtacgccctcctgccgccgccgccgccgccgtgcccgtctctcctcactatgggttcgtcttcgtagtcgtcgttgtcatcgctggtgcgcagccgctcatctctttcaacgacgttctgttcgacgatctccggcacctgcaccttcgtctccaccacggatggcgtccgattgtccttcatccacacagtcatatcatacagatgagatcgatagatgaattttggttgaatttgatcgtgagatcgaattgaattacctaccgacgctacaatttcgtcgtcctcctcctcctccttcattctctctatcatctcaagctgggcgggggtgggccacctggtcttggtgcgggcaagctcgtcctgcatcctcatggcgccgtgaccgtgacccttcctcctgcaatcatcgtagtcggtgcggacgtggatcgcctcgatcgaccttctcatcgatctttctctctcgatcgtgcaccactaacaaggtgtggtgtgctcttcagctttggttgatgtgagtgccggtggaggggactatatatttgtagcgtctcgcgagtgagactaaggtctttttctttcttctaatacagtctcagtttttgttagcacgtattttaaattgtgcatcatgcaaaaactttatatatatatatatatatatatatatatatatatatatatatatatatatatatatatatataggacactcatatggggcaccatggtgcccgggcaccatggtatctaatgcacaaaatcactcaaatttttcaaaattttcaaattgtgagtatatacctagttataataatttgattcatacctatacttatcaacaaaacaactcaaatttaactttatttcacaatccatgattacatacctaactaattatatgtatggatgctatatacctagaatcaaaatctaacaaaaacaagttcaaattcagttcaaacttgctttaaactagttagtaaagtagttaatgttaatacctaggtaattgaaaaagtttcatactcatttgaattgggtatatactcaatttcaacaatggtgcccgggcaccatggagcaccaaacaaatatatatatatatataagttacgcattttaaatggtgcatcacgcgaaaacgtaacatcagataaatccatttcatgagtataaaataattaaaatttaattaatcaaacatcgctggctaaggggagcgcccacaatggaaaagataattttgtttggtgcaatgcaaaagataattttggtaactggctaaggggagtgcctagaccccaaaaaaattgattttatttggtgctagtgctctatgttggtcaatttggcgttgccgtaatgatatagtttttaatcataaaagaatgtctaacatcatgcaggttatcttcatgtgttccaattggcttcactcttgttgtatgatgctttcacaggaacaccaagacactatgcgcaatggtgctacgcgtttggaattggtagccaagaaacttttattccagtttggatggcgcagtacctacagaatttcatgatagaatctacgtgattttaaaaaaactttatcttagtagatcatattatcggtagaagttgggggtttgtcccatctcatcttttttaagttattttctgttcactactgaactttttggttgtgtgcctacaggcagaggccggagatgtaaccattttcattatctaaaaaaaatttaatcaaacatcgatgactctctcgtttcgtgaacctaaacttaatcttcatcttgaagtctaccgaacgggacctaatgataatcacgacaaacggtgaggatttacttcgtcatgatgactggtgtatggttatgtagtacccgtagtggtaggatactaaggaaaagccatacaacatgcaacatggactagtggtttaaggggtaatttggaaccatgccattataattttttaaagtttaagatatgccatcagtatctcaatgacatgtaggaccccatatgagtcaataacatgtaggtcaggatgacatatctcaaattttgcacaattataatggtatggttccaattttccctttaagggaatgcggtgaaagaaaatttattgagaaaatatatttttaaaatatgaagcaaataatacatttcaataatccagtgaataaactgaaaataatggggccttaagattcccgtgcgcattgtcttatttgctttggagaaaagggatgtgcgttaatttgccaattgggaccataccaacctatttttaactgcgccactcagtaaagttattctgtgtttaagaaataacggcatcatttgctttttttttttcatcttgatcttttatcaagagagttttttcatatctccagtaggtaaagaaaatgcgagcatatcaacacgtccttatgacaaacacaggccgacaatcttgaacaactgcttgaacagagtaagggcacagtagcagacgatgttttctttacgtagttctcacgatgatgccttcgcgttccagacagggattgcataactaacaaatagaaaagaagattacaggacgacaatctgaacgcaaaacatcctcctcaaaaacagcaccaaatgcacacttcataattttctccacaaacaacagataaccttgatggagtgtctcttagatgctagaatccacaatcgctcagcactaaaatggagcaaagaagtggtcaagtgagaattatttcattccccaacatgccttaaaatactatatacatgcttcaacttaactaaaggacgacccgtataaaattataaatcgccttttctggatgcaaaccagaattaccacagccaattttaagtaaatagtccgcatttcaaaaggtaaaatgataaggtaatttccctcagaattgataaatacagtaaatggtgcccagaggtacaaagtataatcatcagttagttcacacaattttacaacaacataaaaaaaaaacagaccacagaagatcagcaagctgcatcttaggtgtttgcacccatatcttgtttgctgggatttgaggtaatttaaaaaagacagcatcaattcacggagaatcaattgttcacctatactgttgtccacaagaaaattggtagcttccgctggtacgaataatagtattctgaagtcagtacagagcatccgttaggataacatataaacacaatccagtagggattctttagttaatgcatagttatgtaaaacagtgtctaactttgatactttgattttccataattcatattattgaacacctcatctataagctcattattggcttgatgtcccaaaacaagtaattagattatattacacaagcatatactagctagtttgttatactacacttctatagtatgattactgtggttgtttgcatacagaataagagaaacaagaaaaatcagattcagttcattcagcaaaccatgtaacattcagtctagaatagtcaggaaagaaaatccaaatggcatttactaataccagtagtatctcccaccaatacttatattgttaaagaagcccgttcagtatttcacactacttgtaagttttaagttctaactaggcgaataacatggaaagtggccacaatatgcgatcatagaaaggaataggagctaactaaagttggatgctaacagatctcaattcaccaaggcgcggaaaaaaaatatggtgaaccagcatgacgaatagagaaggtgttttctaaaaaaaacttttgcataactaactgtacttattacaaaactatgttatcgtgatatttcagacctatatttcagagagttcattacaaggtacagaagacaaggtttagtccatgaccttgcccagttatataaataaaaatatcaaataacagtgactcatgtcacttcagtaatgtatctgagatgtagatgcagaaagaactatcgaataccattcatgcataactaacaaataatgaataatgtgcaccaataatactcaaacatgtaaatgcagatgcgatgggtagcaatacaaatgtcagggacaattttctgcccagctcagtgctcaccacacatgctactttgcaacctccaaagcactctcaatctgttggattagttgattagcaggcagcgctccctcctgcattgccaaaacaaaaatgaaaaacagcatagaccacaaaaaaagagataacctcattattgttagcattaacaaatcaattaaaattgagaaaaggtggatcctcaaaacttacaaagcgatgacaaggtttcccattcttgaagataataaaagttggcaatgcttcaatttggtaacgattagcaatgcttgtgtacttctctgtatcaatttttacgacttgaatcttatcgcctaacttttcgcttacttcctgaagtataggaaccatgtattgacatggaccacacctgacaaaaggaagataaataaataaatggagagatacactcaaaatgcgtttatcaatcttcctactaacaagccaagaactgctaagccatcatattatctgaatggtgagtaaccgttatcaatgagcaatcactttgtcagtttggtgttgggagttgccaaagtggtagagagaatacggccagactattattctctcttttttttctcccataaggaagaaatagatttgatctaagattttgattaaaaacaaaaacaacacaacagcaccttgcaagcctacacgatggacaataaacatacacttgtcttctccctttatccatggaaacactaaagattggacaaaaaaaaattgatcccattaataatgtgtttgcattactcaatgtgcagggaattccacattcactttcacaaggtcagtgatgcattcaggtaggaacaggacattacctccatcaaaactaactccttaaggtctaacactgtgagaattggagtacataaatctagtacagagcactgatagtgatataacccatcaagacatttggaacacagtttactcttaccagtagcttaccaagttgcatagaagtcgactagtacaggcttttcagacttctccagtaactcgtcaaacgaagagaacgtctgtttcttcgcttgaacctattcaaataaacatacaaacaatttttagaaacggaatatcaatattatgttaacagtaactatcaaattaattagaaagacatccatgaatataagcacattgaaggattggagaaaatactgatttggattgatgatggttaataaacctatgatgaatatctggttacacagcattacatctaatcatatatagttacattcatgaaagatttccaaccgatatgggtccgcaacaggtgtggttagcaaaaataaaactaagtctaaaaatattcatgacatacagccatcaaatcaagtaactgatgctgcacagtgatatgtgaagaaatgacaaatagtagggacatcaaattgttgactcaattattccacgggcaatagaagtacagaaatggtggctttggcttacactggtcccagaaagactgaactgggaccaacaaatctattggataactcatagccccaaatttcacttcgttgtcatctaaaatcgatccaggccagatcaccacagcaacagctagtacttgatgcagcgaaatcactacgaaatgctgcatcaaagcacggcaaaccaacgagcaacccgaacgaagctgcaacagctagtacttgatgcagcgaaatcactacgaaatgctgcatcaaagcaaggcaaaccaacgagtaacccgaacgaagctcgcggggggctcacccgcagcgtggcgccacggcgggacggcgcggccgctcgccgaagccccgccgccaccaccaccggcgcggcggagcggagcggcgccgccgacgagcgcgcgacgagggccgcggggcggcacggcgtgggcgacgccgccgcggcggtggtggtggaggtgaaggccgccatggaatctcgcgcgcgccttctagggttttgtggctggcttacccttatcccggcgattcgggaggaagaagaccaggtgcgccagcgtggtgcacccggtccaccacgtagatgcgtggactggttttcgtggaccgagtccacggtccacgggccagcagccaccaacctgcctggcccacggcccactacctcctctgcgcaaccgaagcaaggtgacgcatccgatctccgcaccaaactcctcgtggtggtttcgcagctctcctgcgagcgaattctagggtttgggaggaaatccaatccctccaaatccggattcgttttggaagacgttttggaggaggtagcatgagctcggcgcaggatccgttctacatcgtccgggaggagatccaggactcggtaattcttgctctttctctcctttgtccctttctccgcttccagcaaatgcgaaattagttgccgtcgtcctgtatgcatatggatcaaaaccaaaaattcgagcgtttgcgcgcagacataccccttagttgcttgattctgaccgattttgtagattatgccgatcgtcctgtttctgttcagatgctacctgtgatttgggatgtcttttatgtctagcgatgccaccaaaaggattaagagtacagatttgtcggtacactgtaagaaatgtctatccaatttagagtagttccaacgtatgctaggatgacatgttgtgtccaatgggcttgaggaatgggactgggtgacagggcgtgggaaattgacaacagtctggtgttgcatttttaacatttttgatgtaatgatggaagaattgtaattatgttcttgaacagaccttgaacagatttgtgttaagttggtagctgatacacttatattatcactgaattgccatgttacagactccatcactaattggtcctattaagctcataactcatgaccccttaagattaagaactgttggagtagcttttctgtttaactcatagtttcagaaacattctgcaccatcatgctgttcactgtgctattctaccattcctgaatatacatcttccttgcatctctattgttaactccctcacacattcagaaacatatttcatcctcatgcattttactatgctagattttgttatcgctgaagatatagccccttcgtgttattgtgctgcttatttccttcataacttcgaaaacatatcacaccatcaacacacatgcatctatcttattcttctaatactgaggataaagatatttctgtgacagattgataagttgcaaactactttccatcgatgggagaaaacaccgtcaaacacaggagaacatgttcatttgacaaaggagcttcataccagctgtgaaagcattgagtggcaggtgagaaaacagggaatatcagtgctgtcattctttgatgtttttggtacaggaagaagccgctgttgcatttaatatattagagttacttatcggaatatctgttttcttcttcctgcacagttgttctggtataactggtgtttttttatgttggaaggtggatgagttggaaaagacaatcttagttgcatcaagagatccagcgtactatggactggacgaagttgagctttctagacgacggaactggattggttctgctcgtaatcaggtatttcttgatgtttcatcttgtttcgctttttatgttatataaactgctgggtgacttattggaactttacaaattatacttatactacagatttcatgtgccttttcgtttgcgcctatttcattttcataggattatcaattaggtatatcctgatcatgtgtgagcatcttagaaatacaatgactgctaaacatgatatacagtggcgtgggaaaaaaaaagacacgagaataattttgatgttactgtgttctgaactctatgtagccaatgcaagtttcatctacgctggattcctgtttacgggtaaacatatccaggttgctgcagtcaggagatctgttgaaaaggggaagagtaattcaactttctcggcgcaccaagacatgggcacaagcagaagtaaccactacactgcacaagacaatgatgacttcattgcttcagaatcagatagacagcttctacttatgaggtcaattttcattctgctacatttattgcattttgcaattttgcaaatactttagttagaaatatatattgtctgccctgcacatataatatgagcactgcatttatgtttctgttaatggttagctggttgatgcataatcttcgagttacacttggaattgctaagaaggatatatttttggttctagcagtgtaaagttcatatagcctgatgttctgcacttatctgataactgtacttaatttaccttcaggcagcaggatgaggaacttgatgagcttagcgaaagtgttcaaaggattggtggtgtagggctaaccatacacgaagagctgtctggacaggtattgcccttgtcacacggcaaattgatggagatgttgcctaatgagccaaaaaatgttcactacagggccattcagtctcttttttttttttggctgggagtgtagcactctaaaaagaacatgtcagctgaagtaactgggaacgtcttgcttttttacaggaaaggatcttaaacgacctaagcttggagatggaaactacttcaaacagacttgacttcgtgcaggttagttgcttcattataaagcatgacgccgtcgttgtttcttgtattcaagatagtttaaatttccacaagttatttgttgatgtgcactagatgcttatatttatgtttcagctagcaatttttattgctgaatcagttaacaagcctgtaccatgtcatacttatttgctgcattcaagttgtgtagaagttcctggaaattagagtagtgccctgaaattattttcctctcattgcctggtgcagaaaagagtggcgatggtcatgaaaaaggctggcataaaagggcagattatgctgatcctcttccttgtggttctgttcattatacttttcgtgttggtgttcttgacataacgcactagtgttccaagcctcgtgttttgcggctgtacctacctactgtaagctgtggagaacagaaaacaaatacacgagttgctcatatctttcaaatcctacctgattattgctccatctctattatgatctttttatttcatacgccctatttttttctccaacaaaagttggataaacttttaatactcgtggcacgcttttcaaactgctaaacggtatgtttcgtgcggtaactttctatatgaaagttgttctaaaatatcagattaatccatttttcaagtttgtaatattaaaaggtcacatgttattagcaccttgttttccgtgaaacatttaatctttatcttcattttcaggagattcgaaacactaccagtctacctgtgattaatatatctttcacataaataaacaaatgatcatgtcatgcaaaatcatgcgtataccatcacttgccctcatcactgaatttatttcactaagattgcatacaagcaaggccataagttgaaagcatacagctgctaatccactaatccaggctaactagtagtagtcccagagtattattttattatctagaaaacgaagctgtctgcaacctcgaggacggaccacgggaggtcgccggcggcgacggtgccggggtttctggctgagcagttccggcgaacctggccctgcgagccggtgagcacgctgatctgccccatcttcaccatggacacggcgaactggtcgaagaatgccttctcgtcggcggcgaacttttcgacgatgggcttggtggcggcgtcggcgaagaggtcctggtcggaggtgaagagcccctcccggttgacaaggttgacgtagtacatgttgtcgaacacgttgggcgtccggacgtcgttcggcgtccggcggtcggtgcccgccgccgggcaggttcgccggagccggccggcgaaggtggcgttcatggccgggtcccggcgcgggaagaggcggccctcgaaggagctgcagtgcgcgaggcccacggtgtggccgccggagagcgccaccaggtcggtggcgtcgagcttgatcttggccagggcgtccagcagcgccggcacggcggcggtcggcggcggcagcccgctcagcacgtcctgctgcgacgcgaactcggcgctgtctcgccgccccagtggcaccttgtactccggccctcctgactacacgtcaaaaataataatagtaaaagtaaatttcagatactttaattatcataaaactataaattgtgaaatttcataaatattgatttagtaaaaaacttggatatttataactcaggcataacataaatgctaagaatttaaaccctataagctataattttgtgctaattaattattaaatctatagtttttatgataaatttattgttaaatatatatttctaatacattatcttaaatctgtatttttacaataatttgatcaagtatatatagttctataaaatttacttaaaagtattaattatttttgatta

SEQ ID NO: 26972 - DNA, 4351 bp, Oryza sativa
actgtaagactctaaatttatacgtttaccgcgacgacagagtcgcgggcggcgagagcgaggatgtcggagcaggagacgacggaggcgccgcacgccttctcaaggcggtcgcggatgtcgttgacggccttgaacgctgacgggcgcagcgtgaggttgggcggcgcctgccgctcgccggggccggtggcggagccgtcgagcagcacggaggcgtcgcagccctgcacgaagcagtcgtggaagtggagccggagcaggccggcggcgaggccgatgtccttgcggacggcgtccctgacgaacttcctcacgacggactccgccttggggcagctcttcctgtagaagtcgaacgacaggccactcaccaccggcggctgccgcgtcgcgtcggcgttgccgtcgccggcagccgccggagcgcacaggcaagcgacggcagctaccagcattaccagcgtcgtcgcagaagccatttcctcccgtaattgtatttctactgctctaagtgtaagctcgtactgaacatacgcagctgtaggcttcaatttataggggagtatattttgatatctccataggatttcctctcgttgtttgcatgttactagaaaaattttgagaagatgtattaacatatgatatatgttcaaattcaatttttacatctcacagtcaaaaaacaaatttgactgtgagtatatgttcactggctgtaatttaattttttttacgagatgtagaatttgaactagtatatttgtagagtgatatattatatattaatatatcttctctatagtttttaattttttttcatgatcatttaagtgacatgtaaataacgagggaatatttatggatggatcaaaatagtttcataattgatagggattttgtttttggacatttaaaatattattaatcaaacttgtcatgcatgcatgttgacgtaggtgaatgcaggatgctttgtgagatgcaagatatgggcgagaagagaacaaccgatcctatctccctacgtcctgggtgtcggtgtactgttgattttatcggtttctccaggagttgggagtgcagggtagcgctcttggccaaacacgtcgaccactctgctgttcctgcccataccgtgtacacgtttgctataaacgcagcaaactaagaacctcggtggcatgatctgaaagtgctaagaattaagtgaaaaatcttgaagatgatgtgaattgaatggcatattctgaaaattctcatctactttagcatcatatgatcgagtaggttgtacgtgttcgttcagatatatcgaataatctgagtgtcatgcatggtgcacaaattgaagtgtggttttagccactttcattgaccaagcagtgaggcattagtccgacaacaatcttgttggttcacatatcactgtgcatagaaacaattctaatccctcaaggggatatcttcttgttctttgcatatcacttaaatggttataaaaaaattgagaatgtatattaacatgtgatataacactccacgaacatgcaagttcaaattcaacttctacatctcgtaacaaaaaaacaaattaaactacagctagttaacgtatatttaaagtcaaatctgtttttttgcgagatatagaagttgaatttttatttgcatgtttatggagtgatatatcacatgttaatatatctttctaatttttttaattttctttataaccatttgagtgacatgcaaataactcgagggaatcaaaatcctcttccgcctgtgcagcacaagagcgtacacgtactgagtcgtggcggatgagagaggttgcacctggcgctatgttgcagatcagccactagcaactactgtaccagtccagccacactagtagtcaccgtgcccatcattcatccggccggccggtctgtcccctgatacactgccgttgcattgtttgtgtgcattacagagtttttaagatggattaaacgttaaaaggatgagtagttaatagtctcattttacgtgtttgtaataaaagatacataccagatttcagtttatttgactttatttgaaaagatgtaaggctacaagaatacacgcacgcatgtacgtactggcaaattaatggaagcaacaaacttttgctgatcaagaaactagggagaggatttggtgatcctttatcactcgagtggacatgtacactcgttttatccacttcctagctagagatataatccaaggaaggtgcatgcatgtcctgttttctttatcgatctgggtttgctatcaaggaaattattttcctcctcaatttctctagaggattcctttccaaactcaaacaagatcagtatggatattcgaaacgcaccatgaccgaatcgaataactgacttaccctgcaactttttttatttttacagaattgacttgcactgcttgcaatccgcacagacaagagaaacaagaggcatcgaatcgaatcaaattatcgaagcaaatacagtaatatattatggccgatgtacaaagcggcggcggcggcggcatcaccgtcaccgccgtggcggagcgggacggcgagagcggctacggcgcggcggtgttcttcgcctgcctacccggcgcgctgatcgccattggcgtcctcatggtgctctactaccgctcccaccatggccatggagcgctggccgtcttcctcctcgtgctgtccgtcttcgtcttcctatccgtgtgcttctgttgcataggtctcgtgcaactcgccatccacggcagccttcccctggaagaagacagggttgctgctgctgttgatcatccattagacgccgtctgatgatttaattttgatttgattttaaattcagtattcatctgaattgtgattccgatcgagctcaaacatgaacatgattatcttgaattcaaatctttattgaaacgaatttcagattgggttatttgagggctaagttttttgtttgataggataagttcctaatttaaaaagactgcatatatctggttggatgtagaggccaggtaaaaaaatatccttataaaaaatgattagccacccacattgtttgttagattgcttagtttctacttaaggttaagtttggcttactatacgcaaaatcaatagccaaggttctcctatactaggtgatttcttgaattgtaatggttgatttccaaatcaccaaagttgcatggatccaataaatcctatatatttggggagtagattctgatccctcgaggggatatcccctcgtacaccttttttctttcaaatttgatataaatagttgtgaaaatttctgaaaaaaaaacaatgtagaggttgaatttgtctttttatatctcgacgtgtgaatcacatttggacttaagattttgtggagctgtatagatatgttatatgaatattgtcaaaattttccagaatttttcataaccgttttgatgtttttaagcaaacgaggggatatcctctcgagggatttaaatagttttcatatattcaactttatttgcaaataaaaaataagctacaaaatacacgcaagtgtacatactcatgacatttggaagcaacaaaatatttatcaaggaaataagcttaattaaactagccatccttgttagcaccctacagcaccaagctctcggcggcctcagcgacggtctccacgacggaccaagcacggtcgccggcggcggcggcgttggacaccgaacagcgcttgcggatctgcccctgcgagccggtgagcacctcgatcatgcccatcttgacgacggagtagacgtactggtcgaagaaggccgactggtcgacggcgaacttggtgacgatcggcttggtggttgcgttgaagaagaggccctggtcggaggtgaagaggccctggcggttttgcaggtcgacgtagtacttgttgtcgaaggtgttgggcgtccggatgtcgttgacggtggtgtcgttggtgttcagcaccgggcaggtgaccttgaggtggccggcgaaccacttgtccatggtggggtcgacttgagggaagaggcgcttgtcgaaggaagtgcagtgcgcgatgccgacggtgtgcgcgccggagagggcgacgaggtcgtgggcgtcgagcttgagcttgcccagcgcttcgaggagcgtggtgacgttggagtccggcgacgggagcgcgctcaggacggcgtcctcagacgcgaaactggagccgtcgtggcggccgaggggaacatcgtaccacgggccaccggcgaggaggacggagtcgcgggcggcgagggtgac

SEQ ID NO: 26973 - DNA, 3060 bp, Oryza sativa
gtcgcagccctggacgaagcagtcgtggaagtggagccggatcagcgccgcggcgaggccgacgtccttggcgatggcgtcctgcaggaactcgaacacgacggcctccgcctgcgggcaactcgcgtcgtagtagcccaacgacaaccccttcgccaacggcggcatcctcgccgccgccgagctgcacaccagcgcagccgcggcggcgagcagcagcatgccggcagtagcactagtcctggacgccatggtcgatcgatatagctaagtttacttagctctcgtcgtactcgtactgatcgatcaaccgtgtgccgtcctcggaggatttccatcgcttttatagcggacgcgcactacttgcgagtgtcgtgatgaaattgatggatttggggcgtgcatctgcgatttttccacgaggtcgttggaatcgtcgaaaaatctatgataggtctattatatgaacgcatgcgcgaacaaattgcagcggactgagactggctgatgcggcgaacgatcgagcgagcttgtcgggattgagcaaattggcagcacaagtggatggctttttttttctttttggttgaaactttacaagtggaggttggtgcatagtacaatgcacaaatgctcataggcggctatataaggattagtagcaaatttagttatgtataaagaaaaacccttaacttggcgatttttcacatatgtgtaatctcgcaaattgaattatagctaggctcgccgtttttttttccccttttttccaacgagctagcacgattctttggagagaaagatcaataatgtgtgattcgcttcaaatggttcaaccttcttccgttgaattattcgaaagaagtcttacgaatgagtggtgcacacagctcctccatcggaatccatgcatgcataaattagctgtcgttgtttaagggtgggcgacgggccggcggctacgctgatcagtttatcatcattgaaaaataagaataagctgatgaagaaagaaaaacacaagcaaatttaactactcacacaaatataaattgaatccgattcatattcctcaaccataaaactagataaatcgacccctctaactatcaaaaccgtttaaaatgactacatcaactgtttttaaaagcggtttttcgttgacttggtgttcacgtgacatcccaatcattaaaaaaaatagagtgggttccacctatcatcccctccatctccatttctgacctctctctctctcccatatcgatttttttcagtctcacattgcccaccaccatcagaattcagaaagatgtcctggaaagttggaatattcatgtcccctgctattgctttttccatcgcccccgctcgagttgaactgttgaagaagaggtggtggtgtttcacggggttcagcctcaggccgtcagccccttgtacaaggccaggaccggccaccactcaggtaaagcagattaagtgctatgccgacgagcttagactgacttctttcctagctttctcaactcatcttcttcgttttttacacatacacttttcaaaccgctaaacggtgtgttttttgcaaaaaaattctatacgaaaattgcttaaaaaatcatattaatctatttttcaaaaaaatgctccatccaattcaggttataagacgttttgactttgctcaaagtcaaattatttcaagcttgattaagtttatagacaaatatattaatattgataatactaaattagtttcatcaaatcaataattgaatatattttcataataattttgtcttgggttaaaaatgttactactttttctgtaaacttggtcaaacttaaagcagtttgactttcactaaactcaaaatgtcttataacctgaaatggagggagtagctgctaatgagccgctccattttatgtgccaagagatttgttcccaaccagtagtaacgaacacagccgtaattggttatgcctgacgaactcttgaccttcacttcacatactccatcctctgtgcacaggggcagatccaagaacaaaaattgggaggaggggggctcaattacacagtttgttcaacctccagccatttagaagccttaagtttatcattcattttaaaaaaattaaaggggatgctctgggaggtatccatgggccttgtgggtgtaggggggactccaaaccccccgcacccacgttggatccacccctgtctgtgcatatatctatgtgatccaatatgcgcatgcatccaatatgtgcatggttaggttgtcacgtcaatgtcctacacttctgtcttctgcatgggctaaaaaaaacggcccatcgaagttagtaggcccaaaaaattttgaaggctgaaccgccactttttcgcagggtgcataagcaatcgattcccaaacaaattttattttattcattccttcaaatatcaaagtttgatctctgaactaacatgcggattataaaatgcagctagcattaacagactagcaaccgatgagcgtacataaagcggggaaactattttgatggatgctagctgcctagctgcattttataatccacccaaacggttattttaaaaaaatatcatccaaacagttataaaaaaattatataaaatttgataatgttcgtacaacatatctatacaactccacaaaattttagatccaaactcaactcacacatcgacatatagaaaagacaaacttatgaatagtagcatattgtatacaaaatttgtctctctttttttaatcttagtgggtatgtcaaattttagcttgatttttggtggaccgatagatatcactatactctacattggcaaatctatatctatatctatacctaattaaaaaataagtaaggttttcggttgattttttttttccgtcattaaagggtggggccacgtgattattttgccggttatccgtgaatccggatgcattacgacgatttttgaggtccgcaaattaaagaggatggaaaaaaaaaagagaaacctagcgagcaggccgg

SEQ ID NO: 26974 - DNA, 11721 bp, Oryza sativa
gaattggatttaaaaaaaggaacaatttcattattttgggaaagtaaaaaaaaaatcacatgtctttcttttttaaaaaaacatgtaaccaccaacaaaatgaattatttactgacaaaataaattacttttagaaaatagaaaacaatcacgtgtctttgttttttaaaaaaacatgtagtcaccaacaaaatgaatcgtgtttacatccagattttttccctcatccacatcaattttttttcattcgttgtatgtttttgttctaatttttttagagtgagatgatacaccacttttttttttctttccattcatcgtacgatttccttctgattttttgagtgaaagcgattatgcaattggagtacagtgagatttatctgatagctagcgaaaaacatttcttgtactattactactcttgcagtatgtaaaaaaaagtgtttatcaatatcaagtacaaaaatataaccatgcattgcaaccgactcataataatacatgacaaaaataaatactttttgggtttcaaactttagtatgtataatacataatttcattttaaagtggtattaatagctttcttataatccatgtgaatggatttagagcaacgaataattatgtcatgttagcgtcttacttgcaccgaaaagattcgatttgactataaggatctcaattaacctggtggcattatgctcccacacgcccattactatttatttttgtcttcacccagtgcaacgcatgggcatttcgctagttttattagaatttttcataattatttgtatcgaatttagaagaaaaagatacacgagagaatattctctcgagtgattaaaaatttaaaatccaccccgagtaaaacgtgctacatgcaagctccgagttcttcatcggagcaaagagtaattgagctccagctaggtgccaccgccggcggcgttgcgcaccgagcagttggtgcggatctccccctgcactcccgtcatcacctggatctgcgacatcttcaccatggagaaggcgaagcggcggaagaactccggctggtcgacggcgaacctgccgacgaggcccctcgtcctgccgtcgctgaacagcacctgatcggaggtcaggagcccctgccggctgagcaggtcgacgtagtacttgttgtcgaaggcgttgggcgtccgtacgtcgatggcggtggtgttggtggtgttcttggccgggcaggagagcctgaggtgggcggcgaaccgcgcgtccatggtggcgtccacctgcgggaagaggcggtcgtcgaaggagatgcagcgggagacgccgagcgtgtgcgcgccggagagcgccacgaggtcggcggcgtcgaggccgatcttggccacggcggcgaggagcgccgtcacgttggagctcggcggcgggaacgcggcgacgacgcgctccctcgccgcgatcgtcgcgccgtcgcgccggcccagggggaccctgtactccggcccgccgaccaggcggacggagtcgcgcgcggcgagggtgaggatgtcagcgcaggagacgacggccccgctgcacgcgtcgtctagcagggcgcggagttgggcgacggccatcaacgccgacgggcggatggtctcgttgggtggagcgtccagctcgctcgcctccgtcgccgtgcgcgccaacagcaccgacgcgtcgcaaccctgcacgcacagcgcagcacaattattagtggcggtttcgcgaataattacccgtcacagatgcgtgtttaaatatagtatcgatcgatctgttcaatccagaattcaaaattcagagcatgtttgaggcgtaatttcatcattttgcacatgcattatgcatgattaggtgtataatcaattaattttaatcaattagttaattgcctggacgaagcagtcatggaagtggagacggatgaggccgggggcgaggccgacgtcgttgcggatggccttcttgaggaagctcctcacgatggtctccgccttgggacagctcctctggtagaaaccgtacgacaagcccttcgccgtcggcgggtaatcgccggcggaggccgccggagcacacagaagcagcaagctgcagcaggaaacgaccaaaacctgcaacgtgctgctcatttttctcgccatctcgatcggcttaattttgtgtcttggagttggggtgaatgagcttgcatgcgagtgtcttcatcaatttataggcgtttgctcgttcgcacctacaaaatcattttcgcatatacaaaatgatgtcaaaatgtcaacgcaatcgactacctacaaaatcatccatttcgcgcagctgtatgaaggttggcaaaaattgctacctgtgttgcgttttgtctcaataatgtgagctagtagcttccatcgattgttctattttatcagttgcgtgtgatcgagcgatcgagttcatcgatcacccaaaccggccggccagtacgtacgatccgatgtactacgtagtacgtacaaacgttgcagatgctacctagctagtcgttagtcgttacgttgcctccttcgcaaacgaatgatcatttgacttgacaagctagctaggcaaggtcaaatttctctctttaggattaatttttcatatatcaacttccatgcatgttgattagtagtccgcacggagttgaggggatcgagaatgattaacgtaccttcaattcagcactacatgaatgtacgtacatatgcaatgtaaacaaattaatcaatctatgggctagctcttaattcttctttggatggaagctagttgctagctacgtcagtgatgaaaacagggcgctgtttgtcacgtatgatcacaaattaaaactttaaatttaaaatacacgtctttttttttatcatatcgattcttgcaatcgtgttgctagttagaaaattttgacgaaagtttcttttccgaattcaaacatgatcagtatactcgatcgatccgtgagtgttcaatacatgcattgtggtctgctacgccatccactgcacttccaccacgtacgggtcccatcacggagcggatgccgtcttactcctcgtgctcagcttctttttcttcttcttcttggcattcgtctgttgcttcctcgtcgtgcaatttgccaccctcccttcgaacaatgttacaggcttcctgtagtagatgatccattattaatatatgatataccattccacgaacattatataagtaaaatttgacttatatataagttccttctaatatatattgacgtgtaatccttttgcacgtttgcgaaaacttaatttgacttatataagttccttctaatatatattgacgtgtaatgcgggtttgcgaaaacttctactaagttataaccaaaaggaacaaatatagttctagatgtatgttttagcaagttttagtttaatttattttttttattgttacaaataagtcaaatttaacttctatattttttatgcgatatatctgttataaaagtaccttgttacaatttgtagtttcattatatattttttaagtcaatatctcttattaatgtatatcaacctttttttgcaattaaaagggtatatctagggatgaaaaaccatcttcttttgaattagatgaaaatggtcaaacgtattcccaacgtcaacgatttcatctatttaaaaacagaggtatagggtattttacttatttgattgattaattgttgctagaaattattttcgcgaacgcgcaaaagaattgcatgtcaatatattagaagaatagagttttgatacacgactcactcagccagaccggcctatgccaagtaaggaagaaaacaaagataaaaaacaaagaaaggaaaggaaaaaaaactcgaaaagctctactccaaacagcggaagggagcagagccactctacgctcccaacaattccccaaagtaagtgacggccgctaacgaccacagccggccctccaaaaggatgacctctaggactactgcgaccgaagagagcacagagtcaaggaccctggagttacgttccctccacagttgccatgagactaggaggaccagggagtcgaagctggcacggagatgatcaggtaaacaagccctagaagatggccaccaatcatgcagccatgtgccatagaggggagagagggcagcccagccaggagacgataacacccgtgttggtagaaattatatttctcctttatttaatttggtatatggttaagcatatatggtacccgatcgatccgtgactgttttacttagagtatgcatgcgtgaccgaattgaacgagataatccgagcctaattcgaacctaattgcaatccgcacaaacaaatagtaccaatcaacaaccacacatacatcgatcgtgatctctagctagtacattagcagagagaggcatatatcagaattaattattatcgaagaacaataaataatgggcgatctagagaaccctaactacgatggttatggcggcgacggcggcggcgacggcgatgacgattactacttcaccgccatggcggagcgggatgtcgggatcgacaacgactacggtctggtggccttcttggcctgcctagctgtcacgacaatcggcgtcggcgtcctcatggtgaagtactaccgctcccaccatggagcccttgccgtcttcctcctcgccctcgccatcttcctcttcctcatggcatccggctgcggcacaaaagccatgctgtataccctccacggcaaccctcctgctcctgatgaacaacgacttctcgtagatgatccattggactgatagatatgtatatatgattcttagtttagatgtcgtctgattatttaagtgatatgcaaataacgaggagatatccccttccctcgaaagatcaagaaatagtttcccctccacagctcgggctaccatggcggcttcgtcttgtgcgtcttggcatgccgctgttgcacaagcctcatccgtcattccatctacaggaaccatccgtcattccattatactgtatgatccatcagcagacaagacgccggcgatctgattaattattgattactacctccgttataaaacattttgattttagttaaagttaaactgctttaactttgattaagtttataaaaaaatagtagcattttcaacccaagacaaatttattataaaaatatattaaattattgatttgatgaaactaatttactattataaatattattgtctataaacttagtcaaatttaaaataatttgactttgatcaaaattacaatgtcttataatctgaaacggaaagtactgtactttactttattttgtttgatatattggtgttaattcggatacttcttcagttgaagtaatctgtgacctggagggtgacaaactatatatagcttgcttgctgccagcaacaatcgacatgtgcttgctatctgctgatgatcgaggatcgatcactgattggtgttgatcattgcctaatcaggatcaagtaatcatcgggatgtttttgtcatgtatgcagcaaacgtatgtctttagagtttcagacactaggttgtttctctctctttctggtatatacgtacatacgtctatttatgcaggtatcttatgaattaattattaatctattatcgttgccgacaaatattgtacgccttaatactcaacgcatgtgtcatgtgtgtctacaggtgcgtgacttctgcctccactccaacctaattaattaaatcttaaatttggcttaaattaattaaaagaagtgatctgcaatatacattgggaaagtggttttatcactcaagggatatcttctcgattcgtgcattccacctaaaataatcataaaaaattttggcaatatatattaatatgaaatatatatcactccgtaaacatttaagtttaaattcaacttctataatgtaacaaaaataacaaatatagctgcgaatatatatataactatgttcaatttaatttgttctttttgttgcaatttgtagaagttgaattcggtcttgtatgtttatggagtgatatatttcataataatctatgttattatatataattttttaaatttttaataactatttagataacatacaaacaataaaagatgtttcctgcaagatgaaaatccacatccatatatattgatcataaaggaggttgtcatgacgtcatgcatttattcgacatggcagtaaccaacatatatccacagtcgtcgtcgtctctttccacattcaacgtacggtacacgtactgacgtacgcgtccatggcgcgcacaattgtgtgtctagagcacgatgctctcggccgcctcgacgacggtctccacggcggcggaccacgggagctcctcgtcggcggaggcggcgccggggttgcggacggagcagtttgcccggatctgtccctgcgagccggtgagcacctggatctggcccatcttgacgacggagaagacgaactggtggaagaacgccgactggtcgacggcgaactcggcgacgagcggcctggtggtggcgttgacgaagaggtcctggtcggaggtgaagaggccctggcggttttgcaggtcgacgtagtacttgttgtcgaaggcgttgggcgtccggatgtcgttgacggtggtgttggccgtgtcgttcttcgggcacgtcagcttgagctggccggcgaaccacttgtccatggtgccgtcctgcttcgggtacagccgcccggtgaaggaggtgcagtgggcgatgccgacggtgtgggcgccggagagcgcgatgaggtcggcggcgtcgaggttgagcttggccagcgcggcgatgagctcggggacgtgggaggtcggcggcgggagcgcgcccagcacctgtgacggcgtcgccgatgtgaggccgtcacggcggccgagcggcaccttgtacgacggcccaccggcctgcacccaattgcaatgttcaacattttggtttttatatttatttttcttgaaaagagggtaaaagctttgcttgtatattgatagagtaggggttacatcaaagaattgggcatcaaagaatgacttacattatgaaacggagggagtatgttctaacattcactgattaatatttatctttgcacagacgtaaacatttctaacgtttaattaaatttgtccagaacaaacatttatgtaatactccgtaccacttttccagtccaactactcctttaagatttattgatttacacgggcacatccgtaaccatgcacaaaccaaacatacacaacaccacgctaataacagtctaatacatactcaaagtccaaagatatggggaccatatcatatctttaatctcattattttttttagaaaacgtatttttaacattattagtaaaatttctagtcatcaaaacaatttcatctaaatcttaatccatgctttgactccttaaaaatgtttatattcgtgaacagagcaagtaaatgatatgtaatgactaattgattaataaataattaattagttaatgaacatcgatggtacactcctagtcagcaaatggtcttattaatatctgttacacgtattagtcgtcctaattatttaagatgtcgatgttctgataattttggccattgggcatgatacagtgattccacacgtggttgagacagcaacacaatttcctgtttccttcatctctatcttgttcttcttgtgccatttctcgcaagccaataaattctacagaagtactgatcgtgacagtccaattatcccgcgttatagtttcctatggctcttcaagggaattgttactcagttacatggcttaattaattagattaatttacgtgcaaattgatctccaaatatctttcactctaaagaaggctagcttaaagggaattgtcttttctaacatgcagaactctgcgtagattcttttccctttgtttttcgatgcgtgcataattaattgttgggtatttaattaattaagagaattttaaagggatgatcattatattgtaagatgttctttggtcatttctgttgattaatttaggaccggacaacgaaagtctcttgtccgctgccagatcgagatatactagaaaattggagaaacaagatgcatggatcatggatggatgaaacacagttcgtgcatcggcagcatcgtgcagtgcgccagtgcccacatcagggttcagactttttgtttccggtatctgtatcgggtgccgatatgatgatattttcgaaatttcggttcaaattttttgaaattttaaaaatatgttattcaaatttaaataaatattaccaaaattcatgaaaaaaattaaaaattaaaaatttagctaaaatagtatggtatcggatggtctaatatgaccaaaatttcattcggaaattttgaatcctaacccacattacttaagttaattttcctatcctctattcatgaactccactttttagatagcagtagtgtttaatccatctcctcttccatgaaaaacttttccagtggcagtaagtaagtgaaaaaaatattaattaatcaattaacttagttagttaccagtttgacggaatcgcgggcggcgagggtgacgatgtcggagcaggagacgacgcggccgcacgccctgtcgagcagggcgcggatgtcgttgacggccttgaacgccgccggccgcagcgactcgttgggtatcgcctgctgctcgccgtcgggcccgccgggcgtcttggtgaggaggatggaggcgtcgcagccctggacgaagcagtcgtggaagtggagccggatcagcgccgcggcgaggccgacgtccttgccgatggcgtcgcgcaggaagctgaacacgatggcctccgcctgcgggcaactcttcttgtagtggtcgaacgatagccccttcgccaccggcgggtacgacggcttcttcgccaccgccgccgccgtcgccgccgccggagcactgcacaccagcaagtatacagatacagctactaccgcagctgctgctgccatggccggactagctgctgcacttctacgagaagccatgtacactactgttcttagcttaatatggtactagaaattattaaggtgccttgatttcaatggagatcgatcgaggtggcttgtggagaacttgcgccagccggtgtcctcatttatagccatcgttgttcggcactgtacagtgagaatgtgagatgatcgatcagtgagtgacactgcaacttgcgcggaaacaaacaagcgggtttaattaagctaccaaagaatatgcccttaatgatgatcaaatgtttatgtaatatttcagtcaccaactctatcgatatactaacaaattaaattaaagtaggacaccacacttccactctcgtagcagttccttttcctacatgtagaaactaccggtgttttattttggacttttcactagctttgctatttattgatttaatcacgttctctgtctctctagttcagtctcttcagttcatccttgtgttgtcactgatgatttttatccatgtcgtctccctgtgaaagcggcacgtatgtggaagtgagcaatcctctttctagcttaattttcttttcctgaaacaccacagaataaaagatccaaagacattggttcggtcacagagctttcaggacaatttctaagtaacttcgcttgcgacagaagagcacggtgctattctatatagggctgtgtttagttggatccaaagttcggattttagttgaaattggagatgatatgactgaaaagttgtgtgtgtatgacaggttgatgtgatggaaaaggactgaagtttgaatccaaactttggatctaaacacagcctagtgagtatatatcacacatggcactatgcatccactgagaaaaaaaaaggtcacactaagcagtcagattccaggattaatcaaagaacagatatccctgagcaattaagcagtcacccattgactaattaaccagtctttggcttggctatagctgtgtagtcaccatctatgtaccttctttttaaccaacttgatagtactgcttttttttttccccagccattattccatccttttcgtcaccggcctcaccttttcttcccacgattagagatagcaccccagcaaattcagcttacctgttactctgagtctctgggaggttggcaaattgcaactttcttgacagtgagattcatgtttagatatcaaagccgccggaaagagagggcccggccggctaaatcatgtgtaaaattaaagtattagcatcccaaccaactcaaattagcctctttttaaactgttctgctgcgactattgtcgacatcttaagataaggtcttaaaaaaagcaaatttaaacactggattgcgtcacgctatgtatatgttaattgctgggcttgcaccgcctcaaattttccttttccccactgtttttgtcagagtgaactttatcattattcactcacaaatttagttggactgcgtaccctataaagatctctatctctactataaatgcgtaagaaaatgaagggttcctgctccttggaaaataatgaaacaatatgggctccgtacgctggggcctttgagtttcagcagttttcaattatcttgacatcatatatgagtttttctcttttttgtttttgaaaaaaaggacatcggatcacatgcgtactcaaccaagagagactagtccgttatcaaaatgtaccacagaactttgcaaattggtttttttcttaaaaaaaagcatatgacaaacatacgttcacaacacgcgcacggtcgtccctataaatatacacacacacaccttacccctatgagcatctctaaaaactgtactagcaaatcttaagattgacgaagtcagcacggatgtttcgttgtcgacgtatacatcggctaccactaaaagaaagctgtaaatgttgagcacgtgtaccaagtttagaacttgatcgaggtgggcggattctactacaagaaactaactagtggagctgtgctcacttcgtaaaatggaaaatattctgattagctgcagagtgtttcattggaaaatctacctaggcgactgaaatctttttcagaaaggagaaacttttgcagaaagagaaaaaaaggaaaagaaaaaaaaagaggcccgtgtagtcaattgaggcccagaacacatggaaggcgaaacagagcccacaatggaggcccatgtggtggcctctatatatcaacccatcacaaagctagggtttttctccccgcctcgctgcttcgcctctcgttccccaaggccccgaagccgccggcgccgccgccctcctccggttcgagctctccgccaccatggtgagtagcgacctccgaaaccgagccacattcgtttgctccgctatgctctacccgttccgttgtctgacgcgatgccgcgctttgttttttttttgtgtcgcagatcatctccaagaagaaccgccgcgagatctgcaagtacctcttccatggtgagattctccccctttcttctcctctatacgccgactctgtacattgtgtatgtgctgatcgtgat

SEQ ID NO: 26975 - DNA, 1204 bp, Oryza sativa
tagcatgaatgcaagggtggaagaaagggttaacaaggtgctcgccgacatgaatataccccgagtcacaacacctgctgtgcaaccaactcctcgtgtacaacacgacgcgagtccgtcacagcataggagtagttgtgcatccacagaggtgccggcccctggtctcccgatcgcaccactagctgcagtggaccacatcgaggtaattattgttatccgatccatatctaataaaagacatttacacattccaatattaaattcaaactttcaccttatgcagggcgcagcacagtgtgtcctactagcgagagtccacccaactttcgctcctgaagtcgctgagggcatggctttcaagccctcggttacagacaaggtccacggcgcagacctgctagctgggtatgccaaggtgtccatcgatacagtaaaggacacctggtcaggctatccgctgcccgtgcccccaaatgatgaaatcatgactttgggcgatgcgcgcaagacattcatacaatggcccaaagaagacatagttgtgaagatgactcctcgtccaagtcgaccgacggagcttacacctcccaagtctaagctatcaattgaggctccccgtggaccggcattgtcagtacctcattctcccggtggagctgatatggacttggcagatatagctcaaagcttggctccaataaagaccacaagaaaggccgatagctccccaccacttgtcaagagccagaagcgtgaacgaggcaaggggaaggtcggggagttggcgccggagccaaaaaggggcaaggctgcgacgtcgatgccggtgagcaaatcggggaaggtcgtgagggcgccagcccaatttgagctaggcatgccattggtggaggacaatgtgttagctgtgatgggtattgcttgccgagagctacataagcaatacatggagctaagcaatgccaagcggaaaatgagggagtcatccatagttggacatcacgaccaccagccgttcctatcgtcgcctgcctatataactataggctttgatgacctcttcgaccttttcaggatccggaagttggacactggtcttctaaaatgctactccttgtaagtgcataccttctatacttgtgatatgactggactatatctcctaattaaattagttctaatacgtaaatattttaagggt

SEQ ID NO: 26976 - DNA, 1826 bp, Oryza sativa
ctgttctcccactgtgtgctactgccgccgccgcgtcgtggatttgtcgcgtggggtgaagtttttgggcttttgtgtgtcgctgacggggtggggcccactccgggttggtcccacgtgtctgtcgccgtgtggcgggggtctaatcgtgcgggcgtttttttgtgcaggtctctcgccgttgatgccgccgccgccgctcgccgccccggttcccgcggcggtttctccggccccggcgacgcctcccgccgtcctctccccccgcaagctcctccgcccgcaaggtaaaagcaagcttcctatccccgattccctcggcgatgcttatctcgccgtccgattgaccgatcggacggctgctgcttggcccacgcggccggcgctttctccgacaagcctctgacgcaggccgtgggggccagaggggggggagcctgatatgtggggtccacggagacgcctcctgttttgtcctcggagacgagacgatccctttggcgcgccatgattccgtcgccctcacattccattctgtcgtatcggagcatgacatgtgggcccgtgtctgcggtgctctcagtttttcgtcgccgcatgcatgcagtgactgaccggtggggcccgcttgctttcaccctttttgcaggcgcggacgtcgtcggcgtcggtttcgtctccggcagcggcggcggaggaggaggagacggagtacggacgcgccgggtggacgacgggtgcgcgggggcggacgacatcgcgatctaccaggggagggcgacgccgctgccgagcggggtgccggcgtacacggtggacgtgatgaaccggtgcgccggcggcggcggcggcaacaaggagtgccccatcgcggggatccacgtgcggtgcgggtggttcagctcggtgagcctggtggacccgcgcgtgttccgccggctcggccacgacaactgcctcctcaacgacggccgcccgttcctcgccggcgagaccgtttccttcgagtacaccaactccttcccctacaagctctccgtttccgtcgcaacctgcgtcgtcaaccccgccgccccatagccgccgtcaatcgccgcaaggaaaaggtgcacaaaacaaaggaaccgaaagagaaacggtggtactagtgacatctcttgccttactagtttttttgttcatttctttttttttgaccccgtgtcagtatcactcacagaacaacagctcaccatttgctacgcctcacgcagtgcgtactcctccaacatgtttgaaaccctcattatactactactagacctgcagtatagcgttagcagtagttcctgcttcttgcatgcagcttaatgttgttgttaagttgcctgtcaggcagaccaaagtgtaattaaccctgttttactcaaatctctcgggtggttttggcgcggatggaacaagtttatttttgtcactctttggttgtgcttccctctcgtggtactgtgctttgaggtggtggttggttgtagcaaaaccgggaatgaatcaggtcacgtgtaagtacaatcggtgcatgcatgggtgacagctcgtcggaagtggaattaattgcacttttgaggctaaaatggaatcttctctttctctccccccctctggctcgtctcaggcccgggtcaagttaacaactgtagacatgtccttcaaccttcgcccttcgtcttgttgcttctgctacgattgcaggtttgctacactgttcgttgcagcaacaaagcatgcatgcttgcttgctttctccttttggctcaagcttttgcatgtggtttggcccctgtgct

SEQ ID NO: 26977 - DNA, 697 bp, Oryza sativa
ccccccaccccgtccgggagtgagtattctagtgggagccgcggccctcgtcaccgccgccgcgactccccaactcctccccgccgcgaaccctcgcggagggaggataccacccgttcggtggttcggccctctcttcgcccccgggcggggggaggccacgacgcgtcggggcacgtcgccgcctcacttacggcgacgacgattcgccccgaggcgcgcttcaggcggcgggtgcccttctgtggcatccccccgtaaactcggagccagagacccctgttcagcgctggctagacgacttggccaacttggtcacctctgcccagcggcagttggctgctggcgaccgacctgccgccaccggtacgtcgcgtacccctgttaccctctcctcgtcggcaaggaggagggcccgtcgctcggccaccgcctcaaggcggtccacggcgccaacatcgtcaggggcctcaggaagccggaggcgtcatgacggtctctacggggagcaggacgctcggatcaacatcgagcgacgcagggacgagcgctgagctgcccgcatggggaaaggcgcctcctcatctggagtgccacgttcctcctcacgaggcgaccctcccccacgctctcccctggagggacgggttgtaaagccttcgtggtgagtctccagaatgtcctgtggcccctgaag

SEQ ID NO: 26978 - DNA, 1275 bp, Oryza sativa
caaggagatcccccttggcgatgatgtgtccaagaccgccaaaattggcggaaacctgggcgccaaataggaaggcgcgcttgtctccttccttcgggcaaattctgacgtcttcgcatggaagctgtcagatatgcccagggtcctcaaggaggtgatcgagcaccgctttgccgtccggcaaaaagtgcggcgtcaagccctggagcgacaggccttcatccgagaggaagtggcgtggctcctggaggctgacttcatccgcgaggttatccatccggagtggctggcgaacctggtggtcgccccgaaggccaacggcaagctccggatgtgcatcgactacacggacctcaacaaggcatgccctaaagatcccttccatctaccacacatagatcagatagtcgactccactgcggggtgtgaccttttgtgttttctagatgcctactctgggtatcactagattcgcatggctagggaagataaggaaaaaactgccttcattactcctgtgggcaccttttgttatacaactatgccttttgggttaaaaaattcaggacctacttttcagcgcatgactcgtattattttgagtaatcaaatagggcgcaatgtagaggcgtatgtcgatgacctggtggtaaagacgcgccactaggacacgttgctgcaggatttggctgagactttcgatagtcttaggtccacacgcgtgaaactgaatcccgataagtgtgttcggtgtgccggcgggcaaacttctcggttttctagtctccttccgaggcatagaagcaaatcccgagaaaatacacgcgatagagaggatgggcccccctacaaacttagggatgtgcagtgcgtcactggatgcatggccgccctaagtcgattcatatcgaggctgggagagagggcgctacccctattcaagctcctcaagcgctctaggccgtttgtgtggacggaggaagctgagcaagctctcaaccagttgaaagcttacctcacctcccccccatcttggtagccccggggccggaggaaccgttgctactctacttggccgcaaccccccatgtggtgagtaccgccctagtagtcgagtgcgaagagggcgaaccggaggcccctttaactcgcgatggccctacgtctcccaaaggcccggagcccgaggcccccgtgggaggaagggaggctttggcgagtggtcctaaggcctatgatcccgacatgactcgagacccccccggggcccccgag

SEQ ID NO: 26979 - DNA, 3156 bp, Oryza sativa
tctggttccttgggtttttattagagttttcctcgttttgcgtgccaaggtgtagtttccgttgtttcggaagttcgtagtcgcgaggaaaagagttcagaagatcaaagtgaagaagcaaggcaagtcacacattccccttgagaattttgatcctaatttacaaatgttttatcgtttacaaataaaattgcatgtcttgctaattacatgggatccgggtattacctatctgcttgcttgtgccatatttacttgatatctgtcctttgtcaaccttgggtaataaatcaactagctcatgttacttatgtgacctagctagaactatatgcttagccatgcttaattaccactagcccggttgatgggataattatagtattagacctttttagtgtcagaatgagctgcatgctcgagacatctggccatgcttcatggtcgtaattaccccactaaaatgtgacttcatggtgggctgtgggtgcatggttttgctagtcgtgcccatggcaattaagaaccggtcacgggaaaccctggaagaatttatcgtgcttaccacaagccagcgtgggcaacagctgggcttgtagtgtagctttcctctagccgacgcatcaggcaagggtgggtgtgatggaatttggatgggccctgcgacggcctatgcggcttccggattcacctaggcacgagaggggactgcccgctgccttgcgaggagtggggtgaaattttaggtgtggtgtggttgggtaaaagggaggttatgagaagggtcctatcacgacctctttccagtatgtcgtggtggcatgtcagcgcacggaaacgtgtcgtggggctatgtcttgtgggtacagttgtacacctctgatcagagtaaaactattcgaatagccgtgcccgcggttatggtcggtcgaccagattcaccgtgattagtctcacccctaataaatcgacccaatgcactgtagttcaggtgggttggttgggcctgttcaacgtggtatagcgttgatcagtggagatttaatagtaccttaattactcaatagttttactgttttgctcaataaaatgttttacaaccgcctttatacaaatagccacaagccattcttgaatcccgttgcacgtctgcatcattggtgtggcttgctgagtatggtggttgtactcagccttgctattattccccttttttcagaagtgtagtgcttctgagctgaagacgaagttagaagaccaaggttcagaccccagttaagttttgcctgtgagtggagctgaagccccgctaggatcgccttttcccgctgttgtcattttctttcggtgtgaggactaagtgcctcttctgtaagtatttacgctttatttatgtttggaactgtatattacttgtcgttttgtgtaccctggcttgtcctggacagggatttaatacacaaaatagtccggaaatttgggttaaatttctgggcgtgacagacgtcgtcccagtcctcgccgccgaagtcgtcatcatcgtccccgctcccgctctccttgtccgaggcaagcccgaaggtgaaccggggggccgacccctcgaagttagagacgatcgcgtcggccgcctcccggacttgctcccgagcccttgcctcggtccctggaggaaaatcctcgagtgcgcgccatgggacgaagtcggggtcacgcgcttggtggctcgcgaggaccagttccaccgcgtcccgcgccaagaaagccgacgacgatttcacagtctcgccgacctccttctccagcctctccagatccgccgccagcccgtccagccggagtgcgactgccggcgtgtgggcggaagcttactatcccggtgcacggaaatgccgactcggcgccccgcgcgctccagccggtcgacggcgtcggagagcttcccgggtccgatcccgttggtgaggcggagggccgcaatctccctggcctgatcttgcaccaagcgctctatatcggcgagagtgctctgagccatggcaagctggctccccaactccgcgccgccgggctgcccgcccgccgccaggtccttctcacgggcctccagctcagaagccctcgccgctatcgccgcgcgctcggcgcgagcactctccagatgccgagcatcgcgcccggcaacagcctcctcgcgttttgcgagctgctcgcccagccggcgcgaggccacctcatggcggttcacctcagcttcgcgctcggcgagtacaacgtcccgttctcggcacgcctcttcccagagccgtagctcctctgcgtggcggtccactgaagctttcgcggcgagggtgatccggtcacgctcagctgcggcctcttcacgaaggtgaagggaggcctccacctccgctgctgttctctcgtgggcggccaaggtggactcccgcagatcgagcagacgcgctcgctcctccagcgcctgagtccgcctctacagctcctgggctcgctgcgcctgctcctggccacgcgcgttttgctcacgctggctctgatcgaggacctcgattcgccggcgaatcgtggtctcgaactcctgcgtggagcggacacgctcatccaaggccctgcgttcggcctcgagcgccgctgtccgagcccgcagcgaggcatcggcctccgatacccgctgctcttgggcagcagctgcgtcgaggataccgcgggcgtccttgatcctcttcgccagatcctcggcatgggcctcgtactgaaggcgatgtcacccagtgcttcgtccaggacgctcgaggcaatcagcgccgcctgccgctcttcctccacctctcgcatgacggagtccagcgactcctcgcgcgcctggattttggctagttgggcttggcgcattttgcgtcccaccctcaccatgtcgtccacggcgcgacgcccctcgtcaactcgcacgcgagctgtgcccatgcagcctccagggccgctcgctcttccgccagggcttgaacttgggcgttgagcccctcccgaacggtggaatcggcggcagcgagcacctgcaggagcggctccatacttgccggagtcggagaagaaaaagttgcggcccgcccccgggacgacggaggggctgcagga

SEQ ID NO: 26980 - DNA, 668 bp, Oryza sativa
ataacaaagctatgtgcattcatgaacgcaatttcgcagaaggtcatcgatccggatagattagaagcccttcagaatgaagtggtgcaatgtctcgtcagttttgagttgatatttccaccttcatttttcaatataatgacgcatctgctttgtcaccttgtgaaagagatccgtattctcgggcctatgtacctacacaacatgtttcctttcgagaggtacatgggcgttctgaagaagtatgttcgtaaccgtgctcgtccagaggcaagcatcgccaagggttatggaacagaggaggtcatcgaattttgcgtagaatttatcgaagaccttcgcccaatcggggtacctgaatcacgccatgaagggagactacggggaaagggaactctctgaaggaaagcaataacgacggtagacaacaatttattccgtaaagcccatttcactgttctgcaacactcttcattggtagctccttacatcgaggagcacttggctctagttcgcgccaggaacatcggtaagtccgatgcatggattacacggcatcacattgatactttccccgcgtggctacaacaacatctcatgggtaacgagtcgatcaaccaacaacttgccttcctggcgaggggaccgtttgggtcgatcgcgacatt

SEQ ID NO: 26981 - DNA, 626 bp, Oryza sativa
ttcctgcagccctagcatatacgcacgaaacacttagcatatacatgactattttagtcttagcatgtaatattatttgagttttaatataagattattttatttgtaattagacttagtatataattatttactagctagggttgtataatatacgtcacctagacttagcttatatcacgatttgtaattagacttagcatgtaaggttgtgtagggttctaatgtacgacatttacacttagcatacatgacttagattgttaaaacataaatgtctcgtgacttagcagatgtttcttgtatcaacagatggctgaccgcgatgaggaacagatattgtacgatacaatcgcggagggaagcagccagtactggaatgaagaagaggggaacgaggatccaaaccagtacttgaacgaggaagggaacgtggagagggatgcggaggggaaccagcaggggcacgtggaaagggatgtggaggggaaccaggaggaggaggctagtggtagtcaaccctccgttggacaaaagagggcacgcgggcaacgaggtgcagcgaaaagcttgagggtcggcacatcataacggaagtggaagaagatggacgtcctagtgccccg

SEQ ID NO: 26982 - DNA, 673 bp, Oryza sativa
aacgagtggctgaagaaccgaattgccaggttgcagaacttgcctagtgaaacacttcagtggttgtcacagggtcctgaatggagtgccaccacctggcaaggatatgacataaatggatacacctttcacacggtcaagcaagacagcaaatgcacagtgcagaacagtgggttacgcatcgaggctgctagtgacggtggtcgtcgtgatcaatactatggtagagttgagcaaatattggagctagattacttgaagttcaaagtcccgttgtttcgttgtcgatgggtcgatcttcgcaatgtaaaagttgacaatgaaggtttcaccactgtcaacttggctaacaacgcgtacaaggatgaaccgttcgttctcgccaaacaagttgttcaagtgttctacatagttgacccgtgtaaaaagaaactacatgttgttcgtgaagggaaaaggagaattgttggattggacaatattgcagacgaggatgattacaaccagcacgtccacggcataggtcaagaaatacctctagaagaggaggaggaagaagatgaagttcaatatgcacgtgtcgaccatgaagaaggattatttttgtaatttatgtacgtagtttatgtctacatgtctgtatctgtatgactctaatatgttcgcaatgatc

SEQ ID NO: 26983 - DNA, 569 bp, Oryza sativa
aaagcccccgccacttcaaccggtaacgggcgagaagaggccaagaacaaggcccccgccgatgatggcggtgacagtgaggatctggatttccagatacctcagggaaccgtcgccacgctcgacggggggggggggggggggcgtgcgctcacacctctcgccggggcttcaaggccatgaggcgagagcttttggccgctgttcccacgcacgaggcggctcggaaggcgcgctggtcggaggtgaagctcacctttgaccagagcgaccatccgacagtgctcgctcgaggagggaagttggcccttgtggtctccccgaccattcacaacgtcaggatgaagcgtgtcctggttgaatggagagccagcctgagcatcatctccccagccgccttcgacgcactcaaggccccggggatgaagctccagccgtcgctgccgatcatcggcgtgactccgggacatacgtggccttttggccacgtcgagctcccgatgaccttcggcgactccaccaacttccgcaccgagcgaaacgacttcgatgtggcggacctcaatctg

SEQ ID NO: 26984 - DNA, 712 bp, Oryza sativa
ctgcagccctggatcggcaatggatgtacgctgaccggcggtccaaaagaggttattgccggcgtgcactatttttggaggggccgaagctaacaggcaaaggggttttatttgttgtccatgcaataagtgtaagaatcagaaggagtattctgcatccaagactattcatttccacttgtttgagtcggggttcatgccaagctataattgttggacatcccacggagagcaaggtgttgaaatggaagaagatgaagtggaagacgacaatattccggactttgctcagtatgttggatttgaaggaaatcaaacgggcgaggaggaaatagctgctgatggtaacgacgttgcggatgatcttggtcagatgttgcaggacgccagggaggactgcgaaagtgaaaaggaggcccataaattggacaagatgttggaggaccacagaacttcgttgtacccaggttgcgagcaggggaacaaaacgttggataccactctggagttgttgcaatggaaggcaaaaaatggggttagtgacaaggcatttggcgatttattgaaactcgtcaagaacattctttcgggggggaaacaaattgcccgagacaacgtacgaggctaagaagatagtctgcccattaggactggaagttcataagattcacgcatgtccgaacgattgtatcctatatcgcggtgaggagta

SEQ ID NO: 26985 - DNA, 666 bp, Oryza sativa
atgggaacttgactatggtcctctcaaggttcctctgttccggtgccaatgggttaggttgactggtggaggcgtaatgattgatgacagtgggatgacaactgttgaccttaacaaggttggatactcggacgaaccttttgtccttgccaatgatgtaacgcaagtctttttcgtgaaggacatgtctagcaaaggaaagaagggcagagggcctgatgagcctaagcgtcaagtggttctcccaggcaaaagaaaaatcgtcggagttgaggacaagactgacgaggattacgattattagaggtttcaacaagtttaaatcatgtatatgctagttatatgtgatacttacaatttttaaaagttttaaatcacacaggtggcaatttcatatgtatgttaattagagtttttaacatttaatttactagcattcatatgctaattataattgactagaggatttttaaaagttttaaatcacgcaagtggcaatttcatatgttaattagagtttttaacatttaatttactatcattcatatgctaattataattgactggagaatttttaaaagtattaaaattaatatatttttaaaactatcattcatatattagagtttttcacaatttaatttactatctttcatatgctactta

SEQ ID NO: 26986 - DNA, 1633 bp, Oryza sativa
agtccctacccacacaaatggacaagttccatcagctgtacatggagatgagcgccaccggtagagagatgatcggagcgaggatcagggacacggacttcttgcaaggagatgacattctctggatcaatttcaggggaatctacgaactataccagctggacgccctcgacgtctctattatgagttgctggattttgtaagtatatcgttcagttagatttcttactatacgtctcctttaattaattaggtccttgtatataagtagaccatagaaaataatatactcccatttatcgttgtagaatggagattcaaagggcccgacggcggagggttttcgatactggattcatcgaccctcggaaagtaaacgtcgcaatgctcgaccaatatccacaagaaacagaggacaatctcgtccatctcctgaaggcgcagcattacaagacgttcatactgttgccatacaacacagagttagtttaattttactgtcttcctacataccaaatttcattcccgtacgaacttgctaagtgtttcatatgtaatgcatcccacgcacattgcagattccactgggtgcttttactcatcgacctggaggcctgcaccgtcaacgtatatgactcaatggataaaaaagagtctacgtttgacaaggttttcgaacttatagacaggtaccgtcataagttcctttgttaattaagaaaatcttgttatgttaattgctactacgaatcatagctttaaactccatgtagggcttggtatcggttccgtcatttggtccgcggcaaatggagagaaagacttaggcggaagttcaaatttcctgtgagtacacatgctctacatttatatttctccgattcaaatacatacaagtgtatattaattagatctctcgttgtttgtcatttatttgtagtgcgcaaagcaaaagcagggaactaacttgtgcggctattacgtgtgcgagtattgccactgccttgcagaccaaatcatcaccacaagagagctcgatgtacgtacaaataaattcaaaatttcattacgtagcgatttcttgtttaattactaatcaatttcatacattcatatagtttattcgcatgagggataacctgaccacacacaaggaatttatcgcggcgtttcaagaacaactcatgggattcatcaacgaagaaatccttgatcccaagggtgaattctactacgacggaaacacaattcaccggtccttagcttctgagctagcagcgagtactactacgtcgaaatcgtagctagctaggacatataatggattgtaattaatacatgactacatatgtttctatatgcatgtgtacacattttctataatgtaaatatattttgttcatatatatatctatatacatatgcatttgcataacatatatatgtataaatacatatatattatgcatgtatatacatataatataatataatatatatatatatacatatatatatatgtatgcatatatatgtattgaaacatatatatgcatggtttatatatatatatatatatatatatatatatatatatatatatatatatatatatatatatatatatatatat

SEQ ID NO: 26987 - DNA, 1380 bp, Oryza sativa
cataacgggaagagagattcaagaaggtagaaaacacgtgcacctcatttagtactcgatcgtacaaccataacatttccactagtttttaactgtttcttcaaaacaaaataatatataccagcagaatttcaatccacttcatccattcgaaggcatagatcgatcagactaggaaagaaagaattatttgctttcaacaagtgtcattgccagaaaatagttaatctgttttgaacttgtgcatgcagtttaattagggaagagaagtacagattacacaaattctctgcatcatcctagctagtcaatcagtgcagccgtatcaacgcttaattgattcaagtttcaagagaatgaccccaaatatccatgagttcactattcttcaattgacaatgtgcttgattgaccatcaaaatggcaaatggcaagtactatcggtacaaagatgaccataattatcgctggctcaactcgggtcagagaaatttgcaatcaagttggtaccgtacgtgacaaaaaggaaactgtagagtaaccagatgctgcctataaatagcatcagataatgaagaactttcaagccaagagttagccaagaacgtccataaagaagagatggcatccagggtttccactgtcatctttcttgctgccatcattctcccattcttgtcattcgccgaagcccaacaacctcaaactcctccaagaagaaatccaccacgtgcaccgccatcaccaaggagagcaccgtcaccatcggtgactgcagaaccaacaccggcaccggtcatagcaccatcaccaccaccagttgtagcacctagccagccgctagtcgtagcacccacacagccaccaacaccatctggtggtagtcaatgcctaagagaaaatgtaattgcacttaatgtatgcggacaacttgatttgtccacgttgctcaacaacccgactaaggctatgcaagactgttgtccaccaatcaacaatctctcaagcaccattgccgcaggttgtctatgtgaggctgtgaagattaacctcggtgtcaccgccgatgtcctcttccttaaggcagtgctccgcgtgtgtggcaaggctgagctcggcaacctcggctgcttcctctgagctttcatgaacatcttctgctattctattagtatattaatatgaaagaaagcaaggcaacaaataagtaatacctgagctatgcacagagctagagctctatgagatgttactgatagaataaataaagttgtcattttataaatgtgcctgcatgatgcatgcctagttgtatgtgctactgcaagatgttgcatgtactaatatacaaaataattcgatctgagtgttacatggaag

SEQ ID NO: 26988 - DNA, 3424 bp, Oryza sativa
aagattttcttgttaatctcacatcataaaccaacacccatctgaccatcttgtgcgctctctccgtggtcaagctccaggaggaagcagagcagtatggcactgtgtaattgtgacgaggactccctggccggttgtcgaaacatgaattcggcaataataaaacggggtagcgcacaagacctaaagtggatggatgcagagacaaaggatttagacaggttcaggccctctcaatgagaggtaataccctactcctgtttggggatttgaatccgccgggtgtagtatagatctgacgatcaggttgtctcatgccccctagagggcctcctgcccaccttatatagggtggggggcaggattacaagatagaaaccttaaccaatacggtatcggtttcctaaatctactttacaatattatcaaaccagaactttaggctgttccgtaatatataaggaaacgtaatacccgagtcatgatctgttacatattccatatatatatgttatcccctattactagtcggataaccatgccgcatgggtatggggtacccataatatccacagtagcccctgagaccttcgcagtcgaaaagataatcttctctcgaaccagattactccaaagccgagtgcttcaatcatctttgtcatggtctcccgagtacttttaccaaatctgaagactgtggagggctggaaaataaagtcaggtgcaccgactagatgcacctaataggtgtagcccccgacaatatggttaattgaataaaccaagcatatagtcaaggaataaataatccaaccaaccgagtggttttgataatcgtaatcaaccaagtgacttgatatcaatatatagcatatgcggtatgaatcctccaaataacatgatccgagtgatataccaactgctttgtaaaatatgatgagtgatatagcaaaatagctataaagaaacttgtatattgtgaataaagaaatttccaaagtattgggcatacgccatgcgcacactgctttaacagatgtgcttaagtctctagaagacacatggtttcaccacacctggaaatatatggcatatgtggtgtaaaatccgagtaaataaactcataaaggatttaccaaccgcctagaaaatgaccacaatatataatcagcctaagccataatattggtcaataaaaatgcacacttacgtggcgaaaagcaacgatattgtatccaatcagttgcttaaaaacccaaacagcaccatgactatattaaaaagtcagcggggcagctatataaagctttactgtttgacaccttttaagatgcattgtaccaactcctaaaaagttgagtaactgcggtataaaaggattttaaggtattgggcacttgatcacgcgcactttggcctaagcaaaaagtgcctaagtccctaaaaaaacgtgacaggccacacctgaaatatgggctgcagacatattaggcctaggccaaaacatatgccctcgacaccctttaaaggatgacgcatataacatgctcccgagtaataaatcttccgggtaatatagaccaagcgtagctcatatgaatagcttctgatctgagtgattatcccttatgggatactccaaaatagatgtaacaattgaatcccgactggcgcaagtattcggttgatagcccttacggggaataataattggtccagtctttgagcatagaaaatagactcatgacaatgaatccatgtggaatgtatccggaacaagtccaaattggagatataatcctcacgcttgagttgatgagcccctgagcatatagcttgtccttctgtcatagtcaaaattgtctattggcaatagctgacgcagtcggcatggagatgaaatgaccaacatgaagacgaaattgctcatcagaagtaacggaagatgtcagtggtagtaaaaacagtgacaccaatcaaaggtaatgaagttgcataaccatggaggcgaagaaaccagtcagcgacagacagatcaactaacaatgaagattaaaagcgatgaccaaatccatccatcatgaagatgaagaaaatagttgacgacgacaaacgcaaccgacatgatgaagataacgatgtcggtgatccagtcaatagcagtgtagcaaccaatgataatgacaaagacgctcatcaacatttgcatagtaggtcaaccgtgaaggtgaaataataagtcggtgaagacataatcatccattagcaacaacggagatgtcagggccgatgaagcaaaggtgctggtgatgatgtcagtgacaataatccatcaaattaatgttatagctgttgtagatgcttcacttggaggagagttgatgttgttgcccaactcgtctaaaccgaaatatttgaagttgttgaagtagaatgtctgctccgaagcaaagatgaagataatgactcctggagttgactcgtgggttgatgaattgatttcttcagcttgacataaaatttgtcaaattttgagccttgtatttgtgtagcccccgactctttgattagttgggaaacaactgaacatagagtcgagaactatagcctcttgtcgtcgaataattattgcttgattgaagatatgtgttgaagatgtccaagtagaaatcatgaatgttgaagagccacttgttgtagtaaaataacacggcatcgcatgccgagatgttgagattcacaacaacgtcatggttggtgatgtagcaaaacttgtgaagtagcagcaatagagtttgctggtaccgaagataataaagatgaagtcgctccaccatgatgacaaagttgtgttgccgtgatgaagtgaacacgagtcggcggtacgaggcggtagtgaagacgcgcagttgtgaagataaaagcactagtcggcggcggcataaccagtcggcaacggaagacgatgatgtccatcagtagtggtagctgtctaaaccagacgtagaggtgagggcactagtcagcagcagatgtagacagcttgcgttgaagatgatgatgcttattagcggtgatggtgatgtagccagccgtgaagaagatagcatcagttggcgtcataacaggccagccgtgcaggcggtgacaccagtcggcggcggacgaggcagccggtcggtgaaagcgtagacgcccaacaacggcagcataataggccagccgtgcaggcggaaacaccagtcggcggcggacgaggcggccggtcggcgaagacgtagacgcccaacaacagcggcataataggccagccgtgcaggcggaaacaccagtcggcggcggtcgaggcggccggtcggtgaagacgtagacgcccaacaacggcggcataataagtacccgtgcaggcggtgccaccagtcgg

SEQ ID NO: 26989 - DNA, 507 bp, Oryza sativa
ttcctgcagcccatgcttcctaaaatagttgcattgctgttttctcgtgtgaaataccgtacaactttatatcctctagacaaaaaggaaaaaagaacgaattatccctgaactatcgcggttgaccgaattaccccttaacccaaaaaccagatattgctcaccctgaacttttaataccggacaaattacctccctcgacccaatccagagcggttttgtcctacgtggcgtgcgcgtggcaatccagtcagcattttatttataaaaaaagtggaacccacctatcatactcctcttccctcttccatctcttttctctctcactcttcctttctcttctctctctctttcactcactcttcctctctctcgcgtgcgggccgagcagcggcacgtgttccgcatgcacggcgcgcgggtggtgggtcgaaccgtgggatgtggaggaggcggtggcgcaggacgccaaggcggctgccccctcatgcggtgatggacggagca

SEQ ID NO: 26990 - DNA, 702 bp, Oryza sativa
cggaaacaccagtcggcggcggtcgaggcggccggtccgtgaaaaagtagacgcccaccaccggcggcttattaggttcacccgtccaggcggtgaccccagtcggcggcggacaaagcagccggtcggtgaagacgtagacgcccaacaacagcggcataataggccacccgtgcaggcggaaacaccagtcggcggcggcgaaggcaagccggtcggtgaagacgtagacgcccaacaacggcggcataataagtcagccgtgcaggcggaagcaccagtcggcggcggacgaggcggccggtcggtgaagacgtagacgcccaacaacggcggcataataggccagccgtgcaggcggaaacaccagtcggcggcggtcgaggcggccggtcggtgaagacgtagacgcccaacaacggcggcataatacgtcagccgtgcaggcggaagcaccagtcggcggcggacgaggcggccggtcggtgaagacgtagacgcccaacaacagcggcataataggccagccgtgcaggcggaaacaccagtcggcggcggtcgaggcggccggtcggtgaaaacgtagacgcccaacaacagcggcataataggccagccgtgcaggcggaaacaccagtcggcggcggcgaaggcaagccggtggtgatgttctgactgatccattcctggagcgtaagagat

SEQ ID NO: 26991 - DNA, 3195 bp, Oryza sativa
ctcatgctccatttgtgaccatgtagaaattgaattaggagcaagtaaactataccatgtagatgcaaagtttgacaaagaaagaggaaacaattttaacttaagcaaatcatcactaccggccttaccacattgttcaataaattggccgatatgctcctttgttgttctagtatcctcacctatgaattttgtgaagttgggcacctcaaatccttgcggatatgggaccgaatctacatgttcaggatacggcctttgatacgtatgcatagctactttgggttctatctcactactatcccgcaagacattgtcatcatcttttccaacatccacataaccgattagtgactcggtcttaggtgataatgctatgcttgtgatataacctgaaccgtcacttagttcggctatattttcaatgatgctattctctaagctagcaacacaatccgaaccattacttggttcggctattccatcgttgtctaaactagtaacaaaatccgaaccaatacttggttcggctataatggttgttgcattatcatccaagctagtaagacaatccggaccaacatttgattcagctatacttgtcacagcatcattgcacaaattattaacacaatccgaaccatcgcttggttcggctatgcatgatattgcattttcatctaaactagcttgtaagctattgtcatccactcggctttcctgagccagagcttcatgcaacacatgatcaatatcaagaaatatctggccattcaatttctctttaatagaatcaagcaatccattatatgcaatgtcggccaaatctttgtcagttattttcaaattgaagcatcggtttttaacatctccaatcctttcaatataatcaacaacagattcattgtatttatgtctaaccaatgttaaatcagacaacttaagctcagtttcattagtgtgaaaataatcatgaaatttttgttctaattgagcccaagcagaaatagaatttgatggtaaagaagtaaaccatgtaaaagcagtaccagacaaagataaagaaaacaagcgcaatttacatgtatccatactactagccctaccacattgcgctaagaattgacctacatgttcgcatgtggtcctactatccttaccactaaacttggcaaattcaggaattttataatcaggaggatatgggacaacatcataaaaattaggatacggcatttggtaaaccctagcatgattccttacctccatgatttcaggccttggtggatttggtggtggatttgatggcctaaaaggtggttgttgcggcgcaatattgtcatattggccgtacccggtgtcatgagaatatcctctattatgatcattgtaagcattagggacatgtggagtagcatgactaacagtattacagatgatgaataataattaaaatcagcactgctagtcgtggtatgaaaacctggagaaatttccagggaaccagtctgagtatgaccggccaagcacccagtctgaccagcccatgcccagtctgaccggtggtcaatggtacggtcagaccggccacaggaggcgcgatctggccaggataggacacggtctgaccgtttatggtaggcatggtctgaccggcgtagtacacggtctgaccggccatggtgggcacggtctaaccggcataggatgcggttagaccggtgtcatgaccagtcataccgttatctaggttttgcatatagccgattcctgtgtaatcagccgtataaacactcattgaccccccatagcattataagcatattgtataggagtaaaactagaagtagtatatacatctacacagtgattattagcaaaggacgggttgggcgaatcggaggttacctttggtaaaactacaacttgaggaagcgagacgttttccttcacgatgccttgattggtcctgatgtatgatttcatcaacagctcctgcgtaaccaccatcatcttgtgttgctccgcgtcaagatcctcccatgtgacctcgtcgatcttattcccgctcatcatggttgatgaagaaattccttgattaattccggccatatagatcatagccgaaatcgctgaccgaatagattaatatacggtcttgtaattttccttgtatgctactgtacttagcaaaaaaattggagaatttgaagcttctcgggaataaccgatatagcaggaatcggctttttttttatgtgaacagaagtagatcggcttggatagcctgatctttgttttagcacgtgcacagtaataaaaagaaacaaagctcctgctgcttgtctgccaggtagatcggctctagaagcctgatattttctctgtttgccttatgaaacaaaaagaaacgaggccatcgagccggcctctgcctcctgacgatgatcctcggtatacgcggcgtgctgaacggcaagtattcagatggattcagtgacgactagataattaacttcgccgccgaaactcctgatttgatgaacagtaattactagattaaacgaaattcggccgtgatatggccgattagatcgttccccagcggagtcgtcaaaaatcacgttggcaactttttatgacaagtcgacaagtacgatcgcaacacctaaacgccttgtggtgatatggagtcgccaaccacctcaatctagccaaagggccagatcaacatgggtactgtagaaaaacagctaaaccgactagcggagccgatttagagctcaaaatcagcctctaggccgatttagatcgatatgaggataactacccgtctcgtgggcaaacggaaggttttcaggacaaacctataaaagggtgtcgcagtctcgcagcggcgacggacggtttacggcgcaaaccgacaaagatggactaaattagggtaaaatagaaaacatagtaaaagaactattcaagtagattgtattcgggggttttacagtgaaccggccttgtcccttaaatagggatagaaaccaaaggaaacacgaaacatgccttcccaggtaagaaacccgagacccgacgaaaacagactcggactcggaccctgacggtctaaccgcccacatacctgcggtcagaccggccctactagccggtcagaccgccaatacacctgtggtctgaccg

SEQ ID NO: 26992 - DNA, 1194 bp, Oryza sativa
tacacaaaacgacaagtaatatacagttccaaacgtaaataaagcgtaaaatacttacagaagaggcacttagtcctcacaccgaaagagaacgacagcagcgaaaaaaggcgatcctagcggggcttcagctccactccacaggcaaaactcaactggggtctgagccttggtcttctaacttcggcttcagctcagaagcactacacttctgaaaagggggaacaatagcaaggctaagtacaaccaccgtactcagcaagccataccaatgatgcagacgtgcaaggggatacgaggatggtttgtggctatttgcataaaggcggttgtagaacattttattgatcaaaacagtaaaacagttgagtaattaaggtaatattaactctcgactgaacaacgctacaccacattgaacaggcccaaccaatccacctgaactacagtgcattgggtcgatttattaagtgtgagactaatcacggtgaatctggttgatcgcctataaccgtgggcatggctattcgaatagttttactctggccagaggtgcacaactgtacccacaagacacaatccaccggcatgtcaccgtgtcatcatgtgcccatgatgaacacgtcaccatgtcgagtgattgtgacaagacccttcatataactctcccctaaccatccacaccacgctaaggtttcacctgcactcctcgcaaggcagccggcagtcccctcgtgcgccgcggtgaatccggcagctggacaaccggacaccccggccgacccaactccatgacgcccaccctcgccaccggtgcctaggaaagggtcgagctatactccagatcaagcagttacccactcccgcttgtggtaagcactgtaattcttctagggtttctcgtgaaccggtccttaattgccatgggcacaactaacaaaaccatgcacccacagcccaccattcagttgcattttagttggataattacgaccatgaaacatggctagatgtctcgagcacgcagcttgtcaagatactagatgtctaaaactgtaattatcccatcaattgagctagtggtaattaagcatggctaagcataaagttctagctaggtcacataagtaatacaagctaggcgatttattacccacggttgacaaaggacagatatcaagtaaacatggcaca

SEQ ID NO: 26993 - DNA, 1775 bp, Oryza sativa
gtctaaagaatgctattgcttcaaattacaatctgttgtttattaacaggaatgcttctatcatgcgagtgaactgatataggacgaagggtcaggaggcgttgggatttgtactgctccatcaagcatctgcatcaccttatgcattgttggccgcatcgatggctcctcctggaggcaccacagtgccacagcaacgaagcgctccaccttttttatgttgaagattgcctcgtcatcgctcgccaccagcaagtcaatcctcccacacctgtagcaatcatttgcccaataagttagtattgtctgctcctcatctgcaacttctaattccacattcttcctgcagcacacaagctcaagcaggatcactccaaagctataaacgtcgaccttagaagtaatccctatgttcttgaaccactcaggtgcaacatatcctcgagtaccccgaatgccggtgtttgtttgtgtctgattcaccggaagaagctttgctagaccaaaatctgaaatctttgctacaaaattatcatcgagaaggatattctgtggtttcatatcgcagtggatgatttgtttattacactcctcatgtaggtagaacagtcctcgtgaaaccccaagtgcgacttgaacacggaggctccaatgtggatgggtatcgctgaagaggaatgtattgagtgatccattgctcatgaactcatacactaacagcctttcagttccctcgttgcaaaaaccaagcagtctaactaagttcctgtgaaatgtctgcccaatggtttggacttccaccaagaactccttttgtgcttcctgctgaagcttttcgattttcttgaccgcgatgttagtcccaaactcatcttgcagctgtcctttgtagacaacaccagaggctcctgtgccaagtacttcttggaaaccaccggttgccttttccagctcgctgtaagtgaaaatctttggaggtaatccagagttattggacggttgcgataactgggttttcttcctcgaggtgatactacaataagtaccaaaaagcataacagagattaggagaaagttcaccaatacagagcttccaaaaagtaatgaactcccaagaatccaatactttttggtcctccttccatttgcttgagccgctgctgaacacggatggtgaattggtgctcctaggcaccttaataagaactgtcctcggtacattgacatccattttaccgttcgacaaagggaaccttttcttccaacaagtgcttgaagctttatcgaacacagctacggcacagaaacaatcagtcacacacagccttcggcattcggtctgatctatgggattgtattgctcatagtcagatagaggccaatcaacgcgatcgattggtgccatgtcatactgcaacattgctgtcgtctcatccagatcacagttttgtggctcaaaatctggcctgcagcctttgtatttccttttatcatcgatgaacttataattctgtgggcataaacaacttgtcgtgttcttggtgccatcaatggtgcagtaactgttaaagccgcatgctccactacccaccattgtttgtattgactggcagatgttttctggaagtacatcgactgcagtccattgctctggccataagggcctggcatgtatgttttttgggtaaacatattgccggaacacaccatctgtgtcaagggtagcacgatggaagaaatcacccatagagtccacccctgcagaagtgatattt

SEQ ID NO: 26994 - DNA, 519 bp, Oryza sativa
aacctctctatgcggcccaaccacaacccgtcggacaagatcgataaaccagcaccagtctcgtgaattctctttctccaccaaggcaaaagctaaaggtacaagttggtcctccgcatcagctgataatgcagtcatcaaggcaccaccgtatttcccagttaggaaggttgcatctatagctagtactggcctacaatgcttaaaagcctcaatggaaggaccaaagcaccagaatgcacgcataaaaattttcttggtcactccatcaacgttgacaaccctatcaggatgagtatcgatgtggtagaccatactgggattcctctgcttaatggcttgcagcaaagtgggcaaacggacatacgcttcaccccattcaccgtaaatgagcttcatagcctcctctcgtgccctccaagccttgccatacttcaccctatactggaaaacctcaaatatatacaaagctaacgcagaagcagagagtgtaggttgcagttttatggcattgcataa

SEQ ID NO: 26995 - DNA, 4005 bp, Oryza sativa
gatcaaggtgaagaaggcgagcaagtgctaccctcctcgcccaagaatccaccaaagtatccaaagagatcatcccaccgacaacatcttaggagacatcaacaagggagtgtccactcgttctcatattgcaaatttttgtgagcattactcgtttgtgtcttctcttgaacctctaagggtggaagaagctcttaatgatctagattaggtgatgccgatgcaagaggagttcaacaatttcacccggaatgaagtgtggactttggtgtagcgacctcggcaaaatatgattggcacaaagtggatcttccgcaacaagcaagatgaggccaggctcgtaataaggaacaaggcgaggttagtggcgcaagggttcacccaaatcgaaggattagattttggtgaaactattgcgccggtagctagacttgagtcgattcgcatattgcttgcttttgctactaacctcaattttaagctatatcaaatggatgtcaaaagcgccttcctcaacgagcctatccatgagttggtatacatggagcaaccactgggcttagaggatccgaagtatcccaaccacgtgtacaagctccacaaggcactctacgggcttaagcaaacccctagagcttggtatgtcttcgcaattttcttgtgaaaaacggctttgaaatcgggaaagccgattcaactctttttactaaaagacatgataatgatatttttgtttgccaaatatatgtcgatgacattatatttggttctactaacaagtcttttagtgaagagtttagtaggatgatgaccaaacgttttgagatgtccatgatgggtgaattgaagctcttcctcggccttcaaattaagcaactcaaggaaggaactttcatttgccaaacaaagtatttgaaggacatgctcaagaagtttgggatggagaatgccaagccaatccagactcccatgccatcaaatggccacctcgacctcaatgagcaaggtaaagatgtcgatcaaaaggtatatcgttccatcgttggctcacttctttacctttgtgcatctaggcccaatattatgcttagtgtgtgcatgtgtgcaagatttcaagccgctccgaaggactatcaccttgtggccatgaagagaattcttagatatttagtgcacactcctaaccttggtctttggtatcctaagggagcgaggtttgatctcattggctatgccgatgcggattatgccggatgcaaagtggataggaaaagcacatcgggtacttgccaattcttgggtaggtcccttgtttcttgttcttccaagaagcaaaactctgtcgccctatccaccgccgaagcggaatatgtttcggcggggagttgttgtgctcaacttctttggatgaagcaaacctgagagactatgacctcaatgtatctacaatcccactcctatgtgacaatgagtgcgccactaagatagccaacaaccccgtccaacactcccgaaccaaacatatcgatattcgccaccatttcttgagagatcattccacaagagacgacatagacatccaatatgtaagaaccgacaaacaattggcggatatctttaccaagcctctagatgaagctaggttttatgagttgaggagtgaactaaatattttggattctcggaatgtggcttgatctattgcatgcatgtttgcttggtagaataggtttgcataccactttgtgacaaaatggtcattcaactcatggatggacactagtcacttttgtggagaacttgaatctatgtgtatggggatcttatttttcaatgaattttggtcctagcacaacttgaaatagattcacacattccctctctcgagggtgaattatcttgtatcatggtaattccctctcttttgatccctcggatcgtccatttgacttgtggctattgttttgtgtgattgattgtgtgctagtcacaagttcaaatggagcctctagtgctcgaccatccctcctttcctaaatactatcaaaaacctttgagaaatgtgtttttgtcaaaaatttcccggtgcttgtcccttgcaaaatccatttcaaatgtttgcaaaatagtttcatcaaaattcctagcgaaatccccttgcaaaactgtgttttccaggaattttcggactttccggaaaatttttggacttcccgaaaaattttcggatatatccgaaaaacattagaaccgtgcgcaacccttctggatccgttcggacttatccgaaaattttcggaaatgcccgaaaatttcggggtctttatatatcaccccgtggactcccttctctctcctttccactttttttccccacgggattgactccctcctctctccccaccggcgaccacctcctctccggcgacttcctgcggctcccctcctctctatcctcgtgggagcgcgcttgggggacttcttggggcttgcattgtcgatcttcaccgcgttcttcaagtgttcttcgcgttcttgaggtattcgccctaaaatcaaatcctttgattcctcaagttttatcttgcgattccctttggtggagatgttcccctagtgccctagaacctgcggattcaatctcacaagtttttgttggcggatttgtgcggcatctgagttatagggttcggcaggattcttttcggacttttccgaaaattttcggatatgtccgaaaatccctggccgacccctatcacttcagtgttgcacgattcttaccttcacttacttgtttcttgcctttttggcttccattcactggtcccttgtatctcgcttgtttgaaggatgcctcccagcaagcaaacctcccacaagtccaagcgcccgagggatcgctctcccactccatcctctcatgatgattcggacagtgattggtctggtggagaggatgcggttcctcaggttgccctggtggctcggggtggcaacctccctcctcggcgatctactcaagctcttggtgctggtggtggtggtgaggactcctctcgtcaactgcaaacgccgccgcatcaacccaatgtccccattggtcctctccgcattcatacccccgagagggatccagcggtgattcgccaagtgtatgattggaggcggaagactgaggttgttgctccctggtgggatgaggatccgcgccctcttcaccactccgccacgaatccgcggttttggactctctttcaacaagacttttatgagtcagtgatcaagtccaaagctcatcccaccgttcccatgcaatggatcaactgggaggagttgcaggcgcataatgatccggtgctaaactctgtgattgcaaattgtgagcgcatggggattcgctctttcatgactttgcagcaggattggtgcaacgaagtcatcgctcaattctatgccaccgttttctttgatccacaccgtgccatgcattggatgacccaaggatcttggtattctgtctcctatcctcctttggctgagatttggggtttcgacttgcatgacttactcaaccttcctgatctgcataatctacccattcctaccaacactgatctcctccctctttacattccaaatgatcctaatgtggtgttgggtaaggtcgacggtctcaaaccgtactttgcctacttgaaccggatgtttcgccggtcctttgtgccaaaggatggtgatgctagcagcattaaccgcctctccaggactgtgcttctcaggttcgatccccctcctcatcgctttcatccttatcactttgtgtgggaagaaaaccgcatggcttccattcagtacaggaaggggttggtctatgctcctcacattatgcggatgatcgagtctgtcactcagcttcagtttcgccatgatgtgtctcattcctagcttcacttgtgccttgttaaggcgccccgctcctcagccgctcgggacatcccctcc

SEQ ID NO: 26996 - DNA, 1426 bp, Oryza sativa
ccaaatatgccatgttgccagaaagaaaacctcaaggaaacccctttgtgcaaacctgattcttgccaaaacaatcatctgaaagaattccaaattacaatcccaatgaatgcctagctattgccaacaagccatactgaaaggacatgtgaagaagagatgaagtctggtggtgtgtattgcataaagcacatgtgagatcatcatcttcttttgcacaaagccttctgtcaagcatatcccttgtgttaagtctatcacagaacagaagccatgcgaacaatcttcatgacacatttggtttccacagccaaatcatgggcctaggaggttgcaaagaagagtaattgagcttgtaaaatctcttggctgtgtatatacctgttccccaaataaaactccaaacatcacttcttcctagctgaagctgcagatgattcaattcctcttgcagttgcaaaaattctccacatgcatcatctgagaggggaagaacaaaagagtcctccattggccgtaggcacatggtcctaactgaatcattcttatacaaagtcacactgaacagattagggtagcttgtgcacttaaaatcatcattccatagatcattccaaaaaagggcagttgcacctgactgaattgtacacttagctatacccctgaaaatatctgaaagagatgtgatatccctccaccagaaagaacccttgttcaaaaccagatggggtactctagaaacataataagtctgtgagatcagtttcacccatggcagctcaacaccattatataattttaccatatgcttgaaaagcaaagcaatgttctgaactctcaggttaatcacacccatacctcccttatctttaggtgtgcatactctgtcccaaaaagctaaaaacttttctagttgaggatgggttgttgcctctccaaagacaactcttccttgctgtatcaattgcctttatgacagtgactggaagttgcaaagagcacatataataagttggaatagaagaaagaactgaattaatcaatgttaaccttccccattgaggcaaaaacatagagcttgctgtcaatctcatttctactctgtccaccaatggtgcaaaatcaaccactctagacctagtggtaccaagaggcaaccccaaataagtgaaaggcaaggaaccaatggagcatcccaaaataccagcgagcaaagaagcattgtcatgagaaagattcaaaggatacaaactggatttgttaaaattcacctttagacccgtggactgtgcaaacatgttcaggatagttttgaaacagaagatttccttttgagaagctttgagtaagatcagggtgtcatcagcatattgtatgatagggaacccactcccatcattttcattaattggcttagagattaagt

SEQ ID NO: 26997 - DNA, 1239 bp, Oryza sativa
tcctgagctattatatgccaacattttttcataaaggaaccgttgaacccatctggtccaagcgctttatctgctgggacaatggatataagactgtcaatttcctgtgtggaaaacatgtccaccaaacattccaaatctgtgcttcgggagaagagagtactcaaatcaaaggccatttgaggaccagctgtaactcccattctattcttaaaactgtgaagaaaaagagatgccttttgtgcatgtagctgcacaatctacccattttgatccaaaacttgtgacactgcattgattatgtatctctcagttgcaatagattggaaaaatttagtattttcctctccaagcatcatccacctgttagtgcacctcttcttctaataatagatctttctaaattcctgcaacttgagaatttgcacttttacaatttctgttagattccattcaaagactgagagaattcttgtttcttccaccaaatccaaaaaatcaatcactttgttacagttggtcagaagcaacagtaatttggacagatttttgctccatgcaagtaatctctttcttagcaatttaagcttaaaagaaatgcatttagcagggtcctcaaaccctggatccaaagaccagacctgctgaacaatgtcaaaaaatccctccatctgcacgcaataattctcaaatctaaaaataggggattttggaatttttgtatcaatcttcactacacatggcacatgatcagagatatttctagttaaaggcaccactgtagtgtttgggaaagccaaggtccatggagctgaagtgaacacccaatctaacctttcaagaagagggttttgttgcgtgttactccatgtgtattttctacccttaagagggatctcaagcaagccaagggagctgataatgtcattgaaaaagatatcattcatatctgctccagatttgtttctatcctgcactgatctatagaaatcgaagtcactaaaaataaagccaattttgctgatcaccaatgctaatgttcttggcaaaatttgctacagacatctaaaaaacgtgtaattagctaggggacaccgtaaaaacgcgtatttgctgtagggcatcgcaaaaaactggtaattagctgctggacacccgcgacattattttattattttcggaggaataggagagagaaacaatcattaaagacaaatttgcccttggctcaaatgaatc

SEQ ID NO: 26998 - DNA, 1124 bp, Oryza sativa
tgcggctgctaatgcctatgcatcccttgctcctgatgatagcaactcagctccactgccgccgccgccgccgcatcactgccgcacggcgtgcccgatctacccttgtccccactcatacccgctacgacattgttattgggcatcgttgttgggctcagcatcgggtttgcaggtgctgaaggtccatgcatgagaagagcgcccgctgcgatggcttgagcctcgccgcgtcgccgttggcggccgcctcgcgccatctggtccagcctcccaaatccggcccggagccgctgcgctcccggcgtggtcgcgcccgctgagcccggccgtccttgcgtgcgcgctgacgccgcccaaccccgccggcaccacctaaccctccagctcgggcgccacctccgccgcgtcgtgctggcctcgacccttgcgcacgaccgcgcaacgccgccccagccgaggcgctgcactggtccacgccgtcacgacgctctccctctccctggggctcgcttgaatgaagagcagagaaagagaattagagagaaaaaaaaaataaggaagaataaagaaaaagaaaaaaaatcgaagggtataaccgtatttacacaactgtttctctctcctattcctccaaaaataataaaataatgtcgtgggtgtccaacagctaattaccaggtttttgcaatgccctacagcaaatacacgtttttacggtgtcccatagctaattacgcattttttggatgtcctatagcaaattttgccaatgttcttaaaccaagtaacaaaatcagatctctctgggccaccacaagggccataaacacaagtcaaggaccaggtttgagcagtatgcctcaaattgaaatcaacaaacacagagaacagattaatttccgccacagctccgacaaaaacccttgaagactaaacaaccaaaatgcccctgaggcaccactagagggtgcaaaagcaaacgaatcaaaacgttttggggcaaacttcctgatatctgagagatcaaaatgatcctttttttgtctcctgaatgcaaaaaaaacctggcactcacagtcctcaattttctgtctcaaagagagcaattttggctctgcatt

SEQ ID NO: 26999 - DNA, 2355 bp, Oryza sativa
atgaaaagattacacctggcttgaccataaccatacaagctggccaaaactgttcttctgaaacgcggttggaaagaccaacctcaggaggaaagaaacacatagaaagacttctgaacacgtatttctttctctaaagacttctgaacacgtctttctttctctctccatacaggtggtcaatgcattcaaagccgacattttctatagttttgataaggaaatgtgaaccaatctccctcttatgtctatcatattgacagctttgtaattgcatttgacaggttcaaccggttgcctcgcagagaaacttttggttagtcaagtatggaagtgatcaagactaacaaatgccgctctccaagggctataagttttgttgtcatctagtacgagcaaaaggttgatcaatagcaatggcacctctcctgttcttgcccatcctgcaactcttgctactatactgcaccaaatctgcccaagctcagctaaacatcagcataggctcctctttgacaccccaggggataaacaactcatggatctcgcccactgctgattttgcattcggttttctggcggtagatggaaactcctcctcatacctgctcgctgtctggttcaacaagatcgctgacaagaccgtcatctggtatgccaagactagctccaataggcaagatgatacaataccgatacaagtccaagctggctctatcctcaagctcgctgatggagcactctctcttcgcgatccatctggcaacgaggtatggaatccacgagtcactgatgtgggctatgctagaatgctcgacaccggtaatttcaggcttttaggcactgatggcgcaacaaagtgggagtcctttggtgacccttctgataccatcctacccacacaagtgctcccactagggacagcactccacagccgtctcctcgccacagactattccaatggccggtttcaactaaatgttcaagatgacggtaatcttgtgctgtatctagttgctgtaccttctgcatactaccatgatccatactgggccagtaacacagtggggaatggctcacagctggtgttcaatgaaactggaaggatatacttcacgctgactaatggttcacagataaacatcacttctgcaggagtggactctatgggtgatttcttccaccgtgcaacccttgatacagatggtgtgttccggcaatatatttacccaaagagcaaacaggccaggagcttatggcaagagcaatggagagcggtggatgcacttccggagaacatctgccagacaattcaaacaaaggtaggcagtggtgcatgcggcttcaacagttactgtacctttgatggcaccaagaacacaacaaattgtctatgcccacagaggtacaagttcttcgacaatgagaggacatacaaaggttgcaggccagattttgagccacaaagctgtgatctagatgagacagcagcaatggtgcagtatgagatgacaccaattgatcgcattaattggcctctatctgactatgagcagtacagcccgatagatgagaccgaatgccgaaggctgtgcgtcattgattgcttctgctccgttgccgtgttcaataaaccctcaaacacttgttataaaaagaagctccctttatcaaatgggaatatggattccagtttacaggcgacagttcttcttaaggtgcctaggagcaccattcaccatccatgatcagcagcggctccagcaaatggaagaaggacaaaaagtattggattcttgggagctcattgttttttggaagctctgtattggtgaactttctcctaatctttgttctgctttttggtacttattgtagtatcacctcgaggaagaaaacccagttatcgcaactacccagtaattctggattaccttcaaagattttcacttacagagagctggaaaaggcaaccggtggtttccatgaggtacttggtacaggagcctcaggtattgtctacaaaggacagctgcaagatgagtgtggaactaacatcgcagtcaagaaaatcgaaaagcttcagcaggaagcacaaaaggagttcttggtggaagtccaaaccattgggcagacgtttcacaggaacttagttagactgcttggtttttgcaatgagggaactgaaaagctgctagtgtatgagttcatgagcaatggctcactcaatacattcctcttcaacgatagtcatccgcattggagcctccgtgttcaagtagcacttggggtttcacgaggactgttctacctacatgaggagtgtaataaacaaatcatccactgcgatatgaa

SEQ ID NO: 27000 - DNA, 669 bp, Oryza sativa
acgagacccaggattacccctcaaagctttcagttatgcagagcttgagaaggcaacggacggattcaaggaggtgttgggcacaggtgcatctggtattgtgtacaaaggccagctgcaagatgagttaggaacttacattgctgtcaagaaaattgataagattcagcatgagactgaaaaggagtttgctgtggaggtccaaaccattggacggacgtaccataagaacctggtccggatgctaggattctgcaatgaaggaactgagagactgttggtgtatgaattcatggttaatggatcgctcaacagattcctgtttagtggtgtcaggcctctgtggagtcttcgagttcaacttgctctcggtgtcgcaagggggctgctatacttacatgaggaatgcagcacacagatcatccactgtgacataaagccccaaaatatccttcttgatgataatttcatagcaaagatttcagactttggcttagcgaaactactccgaaccaaccaaacacagacatatacgggtatccgtggtacccgcggatatgttgcccctgagtggttcaagaacgtcgggatcactgccaaggtggatgtgtacagctttggggtcattcttctggaactcatctgttgccggcaaaatgtggaaatgga

SEQ ID NO: 27001 - DNA, 2917 bp, Oryza sativa
aaaacttatttgaccatgcaagagatactatggaagtgagctgatgaaggaacagggatcaggaggactggggattgcaactgcaccatcaagcatttgtgtcacctttagcatgttaggtcgcatgcttgggtcctcctgaaggcaccacaatgccactgtcacaaatctttccaccttcttaatattgtagatgcctcatcatcgccctctaccagcaaatcaatcctcccagaccggtagcagtcattggcccagtaagtcactatcgtctgttcctcatcgacaacctctagctcgacattcctcctacagcaaacaagctctagtagtatcactccgaagctataaacatcaaccttggtagagatcccaatgttcttgaaccactcaggtgcaacataacctcgagtaccccgaataccggtgtttgtccttgtttggtttgtcaaaagaagctttgctaggccaaagtctgaaatcttggccacaaggttgtcatcaagaaggatattctgcggctttatgtcacaatggatgatttgcttgctacattcgtcatgtaagtagagcaaacctcttgccaccccaagcgcgatatgaactcgggtgttccaatgtgggcgactattgtcgaacaaaagacggttgagagggccattggtcatgaactcataaactagcagtctttcggctccttcattacagaaaccaagcaatctaaccaaattcttgtggaatgtctgcccaatggtctcgacttctaccatgaactccttctcggtttctggttggagcttgtcaatctttttcactgcaatgttggtcttgagttcatcctccaactggccccttggtaacccccaacccacaccagaggcaccggcacctagaatctcatggaagccagccgttgccttctccagctctttgtaagtgaaggtcttcaagggtagttgggatttacttgatgcttgtgacaatgggatattcttttttgtggctattctacagtaagtaccaaaaaggaaaatggagatgagtgcaaagttcaccaatatggaggttccaagaatcaaagaactccctaggacccagtgcttcctgttcctcttccatttgttggagcttgtactgatcatggattgcgaactattgctacttggcaccttgagaagaacggtcctctggacatagtcagccatattcccatttgacaaagggagcttcttcttccagcaagtgctggtgctctgattgtacaccgccatggcgcagaagcagtcgatcacacacagccttccacaatcatcttgtcctatgggctcatatttctcatagtcagacagtggccaatccacaccataaattggtctcagctcaaactgagcaagtgccgttgcctcatccaagtcgcagctatgcggttgaaagtcttgcttacaccctttgtacttcttctgctcatcgaagaacttgtaccatggtgggcattggcagcttgcaatctgattcctggtgccatcaaaggtgcagtaactgttgaacccacagacgccactgccaacatctgaaactatggcatggcagatattctggggctgcatgctcactgctgtccatgtctcaccacctaggatgcctgcattcgctttcttcgggtacacatattgccggaaaacaccgtcagggtccagtgtggcgcgatggaagtagtctgccattgatccaattcctgcacctgatgagatgttgatctgtgtaccatctgtcagtgcaaagtataccttcccagtctcactgaataccaactctgagccatttccagtcgtgtcagtggaccaatattgctggtatttggatccagagggaacagcaacaagatacagggcaaggtttccatcagtttgcacatcaaggagaaaccgaccactggagtagtcattgatgtcgagtcgggcacggagtgacttgttgcgagtcttgttgcaaggtatcacctgagtaggcaagatggtgtctgacggcatgtcaaaggtatgccactttgtcgtgccgtctgcaccaaggagcacaaaattgccggtgtcgcgcatgctagcatatgccacactggtaacctggggattccagcccccctccccagaccggtctttcagtgagagtgcaccatcattagtgagttggagaaaagaatcagatggcacttctactatcgatggatcttggtcagtatttttggcataccagacaactgtcttatcgctaatcttgttgaaccagacggcgatgaggtagaaggaggtgttgccctctacaggtcggaagccaaatgcgaagtcgccagagggtgatagccatgaagaggcaggactctggggtgccaaagtggagcccaatgtgatgttcttctgagtttgtgcacaagttggggacagtagctgcaacagcatgggaaagagtagcagagcaaccattgttctttgcttcaggctcttgcttcctacccctgataacagctggtgagctgccaaacttgtgtagttatagagctatcctaacacttgtcatggaaaggtcttcgtcaccatggaattctacatatacttgactaatcaagcacttactggaatttgccacgcagaaagcagcaatagggaattcgtgtcacgatagcagtaaatccgtagaaattcttgtccagacaaaaacaacaggtaacagctagtgagaccaaatagaccaaggcatcaagctagtcaattctggccattagtagcaccacggggaggatttgctgtcgtcgacattcttgctgaagtagacaggcttgacaggtgttaactagctatagattgccgagaaaatgtttttctaccctacacttcagggcagaagaaatgtttgcatacattga

SEQ ID NO: 27002 - DNA, 1801 bp, Oryza sativa
cctgcagcccgtaactctgattttctgatgtctttcaacctgcaggtaattctatacatggaactgtttgtaagtacttcttactgacaattcagtttagttgtgtatttgtattagattattagttgatgctataaaaacattactctctcccgaataaattagtaacgcaatttacagaaagagttaaattaatgtattactaaatggtttgtaatagaatattgagtttagtggagcaatttggtttcagaaaaagaaagtcaagcattaaccctactgaaaattgaaatttatgcaagaatagaagctggaaaggttatcataaatcaaatataccagaattgtatgttaagactggaacaactttattccgtaaagcattctacattgtagtgttaaaaagaacagatgaattgaactttgaaccattctgttttattttgtacagaatattggcaacatattcattggtcctaatgtttctctacaggcctgttgcattgagtatctgatattagagagtgataatttgtcaaagttgttccccaatgcacacctgaccattgggacatttacaataaatgcgcatatattattcgcaatcctgactactctgattgtcatgccaacaacttggcttcgcgatctcagctgtctaagcttcatttcaggtatcaacacttgtcaccggaatcctttgtttcaccaaatatatttgcaaaacttgaacttattgaatattacacacacacacaagtactctttcaaaaaaaaaaaaatagtgggccaaggatatgctgctggtatttgttactttgagtatatgtggacacacaccaaacggatgtgcaagtgtggtgtttgcgcatacatataatcgggaaaaaaaaggggtgcacaatgtgccttggatctcatcttgttcattctgttatagctggaggagtgattgcatctatagtcattgttgcttgcctgttctgggttggacttgttgatcacattgaggccaaggatgaagggacagcactgaatctcccaggaattcccattgccgttgggttgtatggctactgctactcaggtcatggagtgttccctaacatctactcttccatgaagaaacgcagccagttccctgctgttattttcacctggtaataaccctagaacaaatgtctgtgattcataagttctttaaaaaacagtgatgccaagctttgcttatgtttttttttcttgacagcattgcattatctactgttttgtttgctggtgctgcaattatgggatacataatgtttggtgaatcaacagaatctcagttcacattgaacttgccatctaatctggtagcttccaagattgccgtctggacaacggtattgttcttgtctaaattagaggaagctatgacatctagtacaatgttgacataaatgcatcacttgtatgattgagtaaaattaagttatgtatgactctttatttcagtcatctttagcattctctgtaacatctggtatagcttctaatacttaatgttgttattaggaatattgtactctactgatagtgtatactttgctttttcttgcaggtgacaaatccaataactaaatatccttactgtgttattttgtcttttttacacctattttcccacgctactttgtcattattgaacaacatgttggcagttcattacaaactaatagatagctagttcaattatacggaataagaagattttcaatttattaggttgtaaaaaagcatatttaattcaagtttctca

SEQ ID NO: 27003 - DNA, 1597 bp, Oryza sativa
agtcttggggatcaattcagatgactatgcagacaaacacaagctgcaaagatcctgtactgtttccaagtaaattatgcagtagtcttcaagctttccttaattttcttacaacaggtcaacaaggcttgaagaagaaacaattcgatcatatttgcaagaaactaatttgatcatattcacaatatgcaacagatattagtatgctctgccaggaatagatgaatacatatatgtatatagtaatccaggtaatggaacaatctgaagattaaatggatcttataatttagactgatctgtctagttcaaagagttcaaggatattcattaattacgcgtcgctattcaccaattcaatctggatttttcagtgggaactaattagcattctttttgtatatgcaagaaccaaaatcccataatttcaatattcaagctcattttttttggaaatatgccatttaataaacatgaataccatctcttgcaggtactgctatgtgtattcatcattgttgttgggctctgctgtgctggtgtgggcacatactcatctttatctaagataatccaaaactacaagtgaatgcatgcttttctagcatcattgtttctactagaagaaatgttttctgcaagtttcatgtaaagttatatatatatttatatagtatgtaatctcaaaggtgtattagtctgaggtgctttgcaaaagggaggacattagggtgaaccccaccttggttttctttgtgtaagttttgttagtcatggtaaggttggcatattcaattttgacatgcatcattttttggtatccatgactgtccatttcgtgtgtgtcattctccagtcgagtgtcaagtaacttctttacagggggcaatgttacatgagatattctaagtgttgccattaaccttattccatgttttgccatcgacgaatgttagtcccacaaaatgccatcacaagttaatttatctaaaaaataccatcgccattaggcttccatggattcaactcttgtcaggacacctgggctagatattgagtaggctactaagtatgacaacatgaaatatttagttggatgggatattaaattaaacctaaataataatagtagtaaccatccaacctcatcgttgatctagcatgcgaaacaccaaacacaacataaaacccaaagcaccgagtagtgagcacaggagatcttcgatggaatagcccgacagtcaacttcaacttaaaatatgcccatcaaactactcgaaggtgacgaccaaatgtattacatcaggggacttgactcatatcgctaaatttcacgaccatctcaattgctcaaaactctaacttgtgatcggctagtctcaggaggttgctagcttcacactgttatcttagccaagatatcagaaacatgaaggcacgaattaaagtaacttaagaatagctagaaacattggtctaaatcatctatatgcagttgaccggtcaatagaagttcagcggaaaacctgcctgcccttaccacacaggcaaaccgactagggatagacacctagtaagaactatcctaaagatccat

SEQ ID NO: 27004 - DNA, 2110 bp, Oryza sativa
taatataaatgtgacacatactagtacaatgaatctggacagacccataatataagagatttttggtagatatgacacatgtcacgaccggaaataacccaacgggtgttccatatgtgcgtgtattattccttgtcctaggaggcaaggtacaccaaaagttgatacaattcagagtttaatcaagcggaagcgtaaatagttaattattacatgggcaacgagggcccagcacacacgaagacaacgaaaaacagcggaagactagggcgacgaccacaggcgcttgacggcaggcacgagctaaacaccaaagccttcatcatccaggagctcctcttctgggtttgggaaaaattgagcaagactgagtacaaccaccgtactcaacaagacacactcacaagtgcaacataaatgcaaaggagtacaatggagttatagtataggggttaggttttgcaataaacagcatttaaaagactcttagttgctcaaagccaaatttaaaacacgatcctagaactatttaatattattaaacaaggccgtgaacccacacgaacctgccttaacccaaggcctacgatgattcagaccgaaccggcaacccgaccctgggtcccagctcgtcccaagccaacccaggccaaccattccacattttagttattaagcaggttttaagaattaaaaacactaacttgggtacattgctaggcttgcccataaccgagggcgcggctattcgaataggttttactctgatcagaggtgtacatctttacccacaagacacgtcttcctcatgtgcaaccacgtgccacataccaccacggcatatggacggaagacatgacatagtttccaacccatcctagccatagacaagagtaccgacccaaccccacctactgacggaacctccgggacaggtaggtaggactgagcccctagcagcaggacaccagccttgtgccatgacatctcgactaccgggccgcagctcgtgtagccttcatttgtcctagagatgtccatcgacccccgacttcgtccatctccatccgtgtacttttgtttataaccagactgagccacaaactaagccttacccactatacatgtggaagtacggtagtgctttgcaacagaggcccgaagaccggtccttatgtggccgaggtgctactatcaaaaccatgcaccccaagcccagcctataaccattttgagagttttgaatagagggagaggtgtgcatccaattccacaatagtccaaccattccataaagtccaagagatatgaatattcccaaagtctaaagttataaaaaccacctaatgttgtcttattaatcagcgaagcatctatctaaattcatactaggggaaccatgagtagagcgcccactagttggggttttgtttattctagggtgaacaaagtaataataacaataacaaaaataaggtcataacaaaggtaaataggcatggctaaataaaacagtgataacgcgagaatttaaataaagcgataatgcattaatttaaatcaaaataatttcataaagtgggatccaatatgttcaaagatgatatgacttgccttgctcgctttcccaaacgtcggcttcaacctccacgaagagcggatcttccgaagctgcagcgtctacacgaccaacggaaaagaaaaaggcttttactctaataaacttcatataacaaacaggaacaaagcacaaaaatgggttcttgacttcttaaggaaaaattagagacttgaacggtccaattccgagttcaaatggccaaagtatggccatttgaagtttatatgctctttaaatgaatatttacgaatttcttcatttaaattttaatttaaaaatggtttattgcgtcagccgagggggagaggtgcgaggaccgggtccacgggagtggggcccacgcggcagcctcacggtccacggtggaccgggtgcacccgggctcacaccggccggcgccgtgggccccacgcgtcagccgtacccgagggcgcgggcggctgacggccgggccccacgcggcagccgctcggcgcgcccgaaggcggc

SEQ ID NO: 27005 - DNA, 720 bp, Oryza sativa
cgctcctgcgttgacagcacttgtggacagatggaggcctgagacacacagcttccacctccccagtggtgagatgaccatcactctacaggatgtggctatgatcttggccctcccattacgggggcatgccgtgacgggcaggacagatactcctggatggcatgcacaagtgcagcagctgtttggcattccactgaacattgagcaggggcaaggggggaagaagaagcagaatggaatacccctgtcttggctgagtcagaacttctcacatcttgacgacgatgctgagccatggcgtgttgagtgttatgcccgtgcatacatcttgcacttgttgggagaggttctgtttcctgatgctgggggtgacattgcttcggcgatatggattcctttggtcgccaaccttggtgatctgggccgtttcagttgggggtcagcagtgttggcgtggacatatagacagctctgtgaggcctgttgtcgtcaggcaccatcatccaacatgagtggttgtgtgctattgattcagatgtggatgtggttaagactaccggttggaaggcctaagtggaggcaaagcttcactccttggccctacaatgagccagacatggagaagacagtggcctacctttttgagagtactgccactgcacatgctcaccgggatgtggcatacaagcattatgtcaatgagatggactgcttgca

SEQ ID NO: 27006 - DNA, 1055 bp, Oryza sativa
  unsure (1)..(1055): unsure at all n locations
caatacaatacaatctgtacatatatggcaaagtattcctaatacccacccgcagtcgcagcgagaggctcacggatgcaaaggctggaccgaaaatctgtaaataactgcactggcaagcctttggtcatgatatcggcgaactggtgtgtagacggaacatggagcacacggacctatcccagagccaccttttcccgaacaaaaaggatgtcgatctcaatgtgcttggtgcggcaatggtgaaccgggttggtggtcatgtagacagcactgacattgtcgcagaagacaacagtcgcagtggagatgggagcatgcaactcctggagtagctggtggagccaacattactcggcaaccgcgtgagcaacggcacgatacttcgcttcggcactggagcatgagaccgtcgtctgtcgcttggaggactaagacaccaggttatcgccgaggaagatgtagtagccggaggtggagcgacgagagtcggggcagctggcccagtcggcgtcggagtagtcagtcagagaaccgaccggacggtgccgatgtggaggccggcagagagtgagcccttgatgtagcgcaggatgcgtttaaccaaggcgaggtgaggctcgcgagggtcatgcatgaagagacctgttgaacgacataggcgatctcaggacgggtgagagtgagatactggagcgcaccggcgaggctcctgtactcagtaggatcggcgacgggggcaccctcctaggcggagagcttggcgcgagcatcaaccgggttggcagttgggtggcattcaaacatgccggctcgctgcagaagatcgatggcgtactgtcgctgggacaggaagaggccgtcggggccatgatgccgaaggcctgccctgaaaagtgaccttccaaaaaagccagctccctaacgacctgngttcggcctaggataaccttggaagctgaatatgaagtggaaagacacaaccagccctatacatgtccatatctacaagataagcatgtaaaaacctatatacttggatttgtagttagagc

SEQ ID NO: 27007 - DNA, 3571 bp, Oryza sativa
acagagtcaccgtccatctggtctcttctctgtttcaatgagatcaaaaggagatggtggtggttgctggattggggaatttcacagggatggggaggagagtttgaggattgccgtttggcccatagtgagcgaactaaagtttgtaaaataatctgcttgtttgtttttgtatatttgatttgcaatttattgttgatgtgcatttgttttcagtttttttttttataaaaacatccatccatgttcttgggtgtttgctcctgtgttttccagatacatagatcgcagcccttctgcccaggtattttagttttgggttccattttgactccgcgtataccgccataaattcttcgctgtcaaagaattaactgctgccctgtgcatgtatgagattgactctcatttcggttggatattaattaatgtgcatggctcagaggagctaaaggattggctgatgagctatttagtccaatacaacaacaccaattccagacttacgttttgtttgatgtttatgcattggttatttgaatttgaatttatttcgtttgttgtaggatcattttggaaattctgagtcattatctaatggagcaccaggcctccaccttaatggtacgagagagtttaatggacagcaatttggaccaacccgggttcatagtgttggcgctatgctggatcactctgcagttaatgttggttccccatggatacagaccaaaacagatgatgctgactttcataggcatgccgagaatcgcttcatgccaaacatgggaaagatgaatgcttttgctagaagggaccttcagtccacctatctctctgactctgatctttcaaatgctttatctagggtgaacttgtctaatcatttagaatatgatgaaaggggccttgccaaagacctgcttgatgaaatggaaatgcgtaatcacgacaggcatttttcctctaagattgccaatgactgccgttctcctttatctggcaatgctttgtgtacgcttggttgtgagcacttggatgttcattcactaccttcatatggagatggtcttctacgcaggcagaacagtattatggatagtccctatgtttcaaggaataataaccatcacatgaagaatgtggatcgcctatctcttgctgatcaactagctttgatgcagctaagcaatcttgacgagaataattaccatagcaatgcagatatggtaaatataatcaaccccttgagaaacagacgcaacatcacagacttggacttaatcaggagtaggaaccatttccttgaagaacttattgcacagcgttgtttgcaggaagataatgtctttcagtcaaaatctggtccctcatataatgacaacatactatatcatgatggacctcgttttccatattcaagaatgcaaagatcagggtcccatgcttattcacatttgaggggcattccatatcttggtgatcagcaatcgcggatgttatcctctagtaggaggacacctggtagaaatatgggatcacaaatctaccaagataatcctgtagcaaactgcctggatctgtcttctttggatcttgcaaatagaagtgttgcttgtcccttggagcttgttaatgtagtgggccatgttatggaagttaggtacatttctcttccattctcctgttgtagattttcaactttaatgctttgtcacattatctacttcttattttaatgcagtatggatcaatttggaagtcgttttattcaacaaaaactagagggttgcctcagctgatgacaggggaaaaatctttccagaggatactgaccaatgctattgctctgacaactgatgtatttggcaattatgtgattcagaaggtacgcctatctgtcctgctaatttgattactcatatttatattttgaaacctaacattcagaattgtacatttgcagttttttgagtttgctacagaaagccagttaagccagttagcagatcagctcagaggtcactttttgcaactcagctttcagatgtatggttgcagagttgttcagaaggtaagttatctttttttttcttggggttcatgtaaatctgtaacccatgcaaactctacaagtttataatcaatttcctacaagtttattgtggacagcagtgtagtctcctaaagtaaatctgttagtaatgtacaaaaaagaattttaatgtacacaaaaataatttgagtggaagcctgaaccaagattaaatcatccgctgcttttaacactcaatcttatctcactactagcattgagctaatgtgtaaaagctacaattgatgacaaatgatttaccatttatgatttttctaattgttatgtggcaaatcattttttcatggtggctgacaagagataatgaatctctgtttattaaaaaaaatgaacatgctttgttctttgtttgcgttatgagcgttatgtcttcaccaaaagtccatgcatggaatgccaccttaactaaaattggtgtcactctgtcagcattatgagtgagacattgatgaggcacgagtcatttcactttagaggtgcttgattggaattttatccatgcatttgccacaggtcattgatgtggttgacttggagagaaagatatctattgttggtgagcttaagaattctgttctcagtgtatttctgatcagaatggtaaccacgtaatccagaagtgcatagagtgtgttccagaagatcacattccatttgtaattgggatatacttcagaaaatttatccgctttgcactcaccaatatggctgcagagttattcaggtacaaattgcaaccttctgtttcctaagcattaaattctgtaactttaaatggtagtttctaaccttatctttgcagagagttttggagcattgccataatccagcaactcaaagtgctgtgatggatgaaattgtcgaacgtgcttttgatttgacagaagataaatttggaaactatgttgttcaagtaggttaacatattccatttatttattcacttgctgcaattgtcaaacttttgacttaaccctgtataaaaatagttacactgccttgatcattaaaaaacctagtagtttacagatattgtggataaaattagtaaaataaattatgtgtgtggagccagggttcaaacttttgttggatgtggctggttgccagcggttactaggattaccacatttcttctatgtattagggctatttttatctccatttgaaatggttacatataaatacaacagtaacctcctgaaatacgatatattcttcatactctggaaacaatcattaactgattaactgagtactttgacaccagcggattatcattttacctactgggaattaaaatatataaaacagcaccagcttatgatgttcctgggctcaattaacttgtaaatgtttcttgttattattttaaataagttgatacattgcagcatggtaaaaagaatgttatatcttttaggcccagtttggaatgtagtattattttttttc

SEQ ID NO: 27008 - DNA, 3044 bp, Oryza sativa
tatcattaccctcgattattgtttggcaaaatttgctatatgatatctaaaatttgtgtaattggttggagaacactgaaggcactattttataatttttggagaaaaagtggacaaacattttgagtttaaagttttcaatttccaaatgaaggttttgaaatttgagttgaatgtttttggagttcaaattaaaagtgttgaaatttggttgttttttcaattttgagtttaaagtttgaaatttttcactaaaaaattcccaatttccttttcagatttgagtttgatacactccgtaaaaaataatgtgcgtcattgaaaaaagaaaatcatgtcgcaattcacattgcctatactgtcctcaccaagatcgagtcggtgtttgtaccgcgttcctgttcctcgtagttctatgcataacagtgcaagccattttctcctgtaaaatcaaagtgtaaaatcaaagtgtgtttgattgttattctgtgatgaacaattggcatatgagattattgattttgatatttggagatcattgacgaagtggttttggagatgattgatttgcaggtgatgaacagagactgttgctgacaggtagtgaccggtcaggccgggttgttgtagtcagtcagaccagaggtatgtgtgcggttagaccagctagctcgtggcttgaccggccggctctgtaccggtttcggtttagggttgattctttggatatccatggacaatcaatgtttattctagatggatactatgcatatgtaatactgttgttcgctaacaatgagtcaaattggtgagaacttgtgctcggatattgtttcttggttgatgcgtttgtaggtggtcttgatgcctcgggagagtgttgccggtgatggatcgggagtcaacttgggataagatgacgtccggacgatcagaatatcacgtgggatatttaagctaaagatcaatacacgtggttgtgtgtatgggatacatagccgaatttagagggagtccaaatttggttcaattggagtttgtaaagtttgtttcttgtacggaaaggtttcttaggggattatgacttcttgtacaaggttggtctgtggctttaggctgcttacgttgggtataaatggagaaggagggtgtgtcattctggtatcatttttgatagagttgcgttgagataagataggcatatttgtaatctctatacatccaaaacttaaatgaagagcttgtcttttcgtttggcaatatttgattcaactcctgttcgagagagtttatagtagctatagcttctcttagaaactccagctgtcagacattccccaaagagttatttttaaccagattctgataatttgttgatgtagaatccatataatgaactagaagccaaaagatgagaaacccaactttctagatcttaccaacagcttatcagaatcttaagttcccaaaaacatgatttaaattgttgactctatccaaacattcatcttaatacttctgggttatgcagacttttggataaaacgagtaacatagttaatggacgaaaattaaaccatggccattggtaagggaagaaatagactttggttaaaattaagaaaagagaagagctcattattgggcggggctgagtcttttgacgcagctttagaatctatcgagctttggtctacttttctttttctagccagacaaatcattaaataaaatgaaaacgtactactgtgcaaaatcaccgttaaaacaccaccaacaccaaagaaaacgaaataagaaaatactttccctattattatatacatcctgagtttaactcggtaagacgggtaagtctcaagtgagtacgccaagactgtgaagagcttttccttcccacgcatagtagtagccatagtcgatacagcaaaagattagcatgagcctcacttcaggagacatatccagattaaaattgtggcaagaaagcaaataattcagaagttaataagaacaaataaatgtaaagcgagaggtattcaggtttttttgccaaaatgaatacggcgaatagcttcctgagaacgtcgaaacttctgattcacatctatcatctgactcgtctcagctggcatacttcattgaagggcctagctaacaaactaaactgccttctcagcgactcaacagatcagagacataagaaaggattaaacgacacgctttgccaactgacagctcaaacaaatgtacagctgatacccatcagtaaacttgtacatggccaaaaaacagatttacagcggcgatacctaacactcatctaattaccttttaagtacccggagagatctatacaggccacagtaaaaaagaagagaacacatccagtctccaccaggacacccctattggctattacagtgtatctcaaaacaaaaatctccacatttgtcaattcaccagatttgcttattgatgccaatgcttaaaaaggattagcgtcaacatctgtacagcttagtgactgctgacattggctagtcttggaccccatccgcactcggttttctgaaaatcaaggagaaacgttagaagttggaaagatttcggtcccgattgcatgtcacgataaacaaacttatccgctcacctcctgtaatgattaacttctccacacgcgcaactatatgcttcccgaaagtgtagttcttcagttcgttcaaatgcatcttgatgcttgagaggatcacaactaggaatttgtcatcacatgtctgaaggattctctgtacaacataattgccaaactgatccttcatcagtccctgcatagattggtcaaaatgtgttattacaatcactgaaaaatcattgtgcatcaagacattgtcatacagtactagtacaaatacagtgaacattatattaaaacccagtgccatactgccatgtgttctgtatgaacaataaatcctaaaggctcttgtgcacttacttgacatacaaaatgaaactaaacacaataaatacagcattgatgt

SEQ ID NO: 27009 - DNA, 710 bp, Oryza sativa
gtcacagagaggggtggtataacgcgtggtggtgttagattcggcgcaagagccttcaaagttgaaggtgaggggaactcatgttcttgccaaaggccattgctctaccatatgccttgctcacatcttatacacgtttatctgattcatgcaattgataaggaatctcccaaccgaatgccgtatcagttctcttcaagagccgttgtgaacacatgggcaagtcgctttgagccatacctcgaccccacacagtggccatcgtacgatggtgaagaatttgttgctgacccaaatttgaagattaaaacaagagggaagaggagatcgaaacgattcaagaacgaaatggactcaggtctgggtggttctggaaggaaaccaccttcatgcgttcaacttgatgctgcgccggtgcaaaatagatgctcgttgtgtcaccaggagggtcacaagaaaactaagtgtcctaagcgtccaaaaaagaagaagtccaaaaaaaatttaagtgttagggaggtaaatattttgttttcctactcatgttctcgcattcattttcttttaatatatgtcacattggtaactaacggtgaatttattactttttcatgtaggatggccgaggagggacaaccgccgacttacccagccttggaggcgtactacgaggcccgtcatcgcggggctgcgatcgaggcggggagggt
